United States Patent Application Publication US 2007/0054278 A1 - sequence listing, part 29

SEQ ID NO: 94094 - DNA, 12934 bp, Homo sapiens
tctgtcacctagttccatctaattggcccatcaatatcagaaaagagaactcaagaccacgctagcagttacttagattagtaatcctcagagaagctttaataaccaagattcacttgaaaaactgtacctttatttctttttaagctaaaaggctgtttatggtgagcaaagcaaaatcattgcacgctgctaattctttttgcatttgtttgtcaggagacttctgaaatactagagccaaacatactggaactgacctaaccacaggaaaagcaatgttgctgaattgaaagcctgcaagaaattcgtcatttattattaatgtcaccatgagcactgaaggctttgatatggatgctggagatacctgcctgctttcaggcaggcacgacaatctcacaccctctttccttttgcctaagagcrtttaattcatggggaagaaagcattttctgcagcttgccctccagaccatcacaataacagaagttttgaatgcagaaaccaaattatttcaaagggggtataaaatctgctctcagtgaaatctggaaaatcacaagatttagtagaaacagggcctgaagaaagacataagttcatgagcaggattgcagggcacagcccatgtcacttacatgtgaaaatcatgtttgttgtctaaccccaaagtgcttcattctttaccttacttccaagtgccccaaaaggcagaaaatttttaggactttgatggttgtttccagttcttagttgccatacgcaggattatgtacaacgagatcacatcaagtagctcagctaacgctggggacctcttgatgactctggcaaatcaaggatggagtgggacatggaatggccagagccatcactcaggacttcgtacaaagactacagtacaaaaactacagactacagagtgcacactgggaaaacagagacacatcactgtccttatcttgccagcaattcattcaaactactttgcttcataagctcccatgcccagtctgctaggtcttcccactgccacagagaatatttattcctataaaacagagttaaaaggggctctcttcattcactccttgcattggctgtataacatttattcattcatgattgacttaacaaatatttgaatgctggacaccaggctccttagacaagttacttaacctctctgagctccagaggtcttatatgtagattggagatcataaccccattaccaggtgattgtgacaattaaggaggtaatatttttaaagcaccgagcacagtgtctggcaatcagtagctgctccattttttccctttctcttgacttgcacctgcacctgtcactccttcagcatgttttttttcttgttcctgaacttatgccctccttagaaaaacaggcagctgcataaggcttggagctgccaggagggagtctgtatcgaatattcaagagccatcactgtgctcaggggagaataaataggaaacccaaggaattctctgtagtctcagataaacatgggactcgactggcctggtaacacatctccatgatggcgagatgcaactatgtccccttttctgtgctgatgctgttgtaatttctaattgatggcttttgggaggtcaggaaaatcttgttgctttcctgtgggcacaaaaattggacatgttctgtgctcttaaagggaagagctttcttggctgacttctggattgcctacaaaggcacagtactctgaggggcagaggctcttgttatttgtaaaagtacctcaaaatatcaagcaaggcagaccacacagcaattgagagaaataaaatattcatcagaggacattactgggaaggaaacagcacagttaatttcacaaaaactccatcataatagaggcacaaaattaatcacgcaatagtgttatgactcctgagcctcaaagccaacataaaataattgagggaaaaaaagagaaaataaaacaaacatgtgccctgcatatagagcatagatgactggaaggtgattttaaactatctgcaaattccagcaatgcagaatcatgactagagttctctcatttacttaggaagacaaattttaacacatttcactaatgttaatgccagtagtcatatcttgtttgaatatacttgacggaagttttactgaaatagaaagaaagagcaaaagcctggcaaaaaatgagttagctgtgctagccctgggtgcaaattttgcagacttcataacccacatgttttccaaatacagtgcttggtaagtctaatttttcattcctcatggcagggatcattaagaaaaactttaccaaacaaggtcctgcactacagaatgtagggcctaacatggagtggctaaaactaagggagtagctaccatttcttaagcatctactctctgctaggccccacacagggtacttagtatatgttacctcctgagccacctgtgtgaaagactttgaggagcagcaaagtgagcaggcaggagaaattgccaaagagtcagaaacctcaggtttaagtcctacctttgaaaaatcactatgtgatattgaacaagtcacgcaatctttctgtgcctcagccaccccggctatgaaatgggggaaatgatccttcttgtgcctgcctcaaatggtgtgtgagagaacaaaataaaatcaataaaccatacaaaacaaatgtaatgcaaatcccaagggtttttttttttccttttgttttattttgcttttggaatcctttgaacttaaaattcggatcaaaagaataaatgaattctctaaacctgtggaaagatggcctcagcctcctgccacagttatttgcagggtctaggggattaaattgctcctgcttttatgattgatctgacctcgcagagctcctcattatgcataccttgctctcattatgatgctcgtgaaatgaaggggaggttaagaaagtggttttgttttgttttggtttggttttctgcaggaagcttggagtctctccaggtatttaaagagattggatttgtgagctaaaactcatctatttttccaactccagcaacacccacgtactctcacatctttatatttcaaaatgtgatagtagccaaatcatttgcttctgcattttccctcttcagtgaaacccaggtccgcttgcccccctcatttcaagtgctccataggggctcatctgtgtgaactcctataggtgtttggcaaccagaggtatgagatagaggcctgcaatcatctgacatcactgcctagataaggattatgtgacacaaatgatattatcccacccttttgtggaatctgaacattttagtttccaaataaaccttcccagttactcagtctgacaccctggatttgtggatgagaaaaaattggcccaaggagattcaaaagctcatctgacatctggacctggaaagtgtgtcacttgcctcttttttctccctgcctaagtcaggagtcttccaactgggtaacaaggagcaggacaagagcttgcttcttatagctgctgagagaagtagtaggaagactctgaaagccgagttacaaatccagaaacaagaacacccagggggcatgaggatgctttccgtgttcccctaacagactctataagaaagagacaatgaaatatatatgatctcatgacaaatttgtgtatttttgctcatataaccaaagacataagacgtaagtcatgtgatgtagaactcaaagaatcagaaagcattagggaaacaggcattgtgtgtcagtagtcaagaaatgtgatgtttacatacataaccaaaacagtgatctaagtattattccttatttaattcctattacataatggttgaaaattaaagactgtgataagagaatcacttaacaaaatgtaaaaattttacacaaaaaacacattttcagtaacatgtaatcaaaaacatgtaatcaaaataaatttattttgatttatttttaatgaatgatttttatctcaaagtaacccatttacatagttagaaaatatcaaataataaaagcttaagttgaaaagcaaatctcacattacctcttcctcttccctacttcctcatacatgaggcaactacctttacctttttcagttgtttttattaataataattatatcaccaactaatagtcttaatcaatatttcttggtttatcacttaacaacttttgaaattggttgtattttgtgtttttattgtcatcaggtaaacaattagatatttgattaaagaaaattgaatgggtttcctgtctatagggctttgacgactttgaaggccatggaaattcactgaagaaataaaagttagctgataagcactgatatatctaggtggtaggtaatgggtcatgttatttatttgtttgttcatgtatttacttatttagctgtatgatttaatgtttttttccaagtttcttatatagagtatgttactgctaaaattaggaaaacctatatatcttctcttttctgctgttcattaagagagggatctcactatgtttctggactcaaactcctgggctcaaatgatcctcctgcctcagcctgccaagcatctgggactacaggcacatgctaccccacttgacttagaaaaacatatcttaaaatttagaaagacatatggttagaaatggtgaaataaagaacatataccaccaagtgaaaacaccacgatgagagaaaaagagttccatcttcattaaagttagaaaatatccacaatccatatgttaaatgtatacagtttatggaagacacaaggataaaacatgataacatgtacctttatgttctcgcatgacagaaaacctttaacattatgtagcaaggacttgaagagtccaaagtacaattcccttatttaggagagcaaggtcaagggtttgaggagctattgacccagcactgaattctcacccctgtaaggtttaggcaagaggaacaaatgaggaaatctgcaggcatctatctgctcaaggggccagattctagggtggcctgggtaggttttctgccttgcagctgcctcttacaatcagctgaaggaaaataaacacataaaatactgaagggagagaaagagaaagaaaagaaagagagagagacttgtgacatacaggactgaacaatttggcacagggattcctgactcctcaagggccctgctagcctcactctgagagcacagagcacatacaccctggggcagagttggtgaggtgcttagaaacaacaagcctggatgaacctgcctttctgctggttcatttccccagcctgtatcatatctgctccaacagctagccccaaaatgagcaccacaaatataatttataatccattagggttcagtatagacaacaagtaaaaagaatgaaaataataataacaaacagaaggcatataaagactgctcttcaaggtcataccaggaagcaggggaacatttaaaagatttttatgacattctataaattatagaaagtataacctcattgaaatcagaatataaatgaaagataaaccaatcaaaaaaagaaatataaggtgtagtaaggaaatgaatacgaagctggcagatatcagtaaataaatggaaggtataataaaaaatcatggaaatgaaaacaatttgtagtcagtatgaagtagaattgaacccactgaaaacagctaagggacatttgaaacaggctttggacaactaaaatgagaaacatgaaattggaaaaagaattcataagtttaagaaggataatatatgtagaacatgggatccagtatatacataataggtgtttttgaagtaaaaggaaacagaacaataaaagaaaaaaatgtccaaagatacaataaaagaaacaatttctgaactaaagaaatcaatctgaatacattttttctttcatcaataatgaaacaactgacagggaaagggataaagtgatgcccctgattatgcagggttttaaagatgcagccgaggaagcaggaatgtctgtaacttgtggccaaacagtgctaacctcctggattgttttgggaggagtcactacaactacaggccaatcartttatcatgccagacaatacagcgccaggggatgtgctggagtccacaaaacccctgggggcacaagtggagtggctgtgcacgactgtcacttgtatcaaatagcagtggctggatattcctgaaaaatgaaataaactagtggtcacccacgaagatgtagagttgacataccaagaagcaataatgaacatggtgaagttcaacaggaaagcttcatcatgywcacgttcagtgcccatgcagccacggacatcgtgggcattaggatttggggtcatacacagaacctgaccaagcagctgaggaatggttttttgcaattcacaacggtccctgtgctggccaagatgactgtgatgagcaaggcctgtggaaacatgttcagcctcatgcagggaacatgtccagagacagcaggaggcattctgatctgtttaccacatgagcaagcagcttggttctgtgcagagataaactcccccaaatgtggtggaggccaccaagcatggattattgggattgcagagaagggcagccatgcagctggaatcatagascaaccctggatcattgaggttgcccgagtagccactcaaaatgtgaatcccacacctggggccmcttsttaatctagacagaaatagctttttggttttgttttaaaatagatctatttcctttatcatcgcttccattaaagactataaacaataaaaatctcattgtgtctacacatctggtgaccctaagtcaatttgtgagtggatacatcaacaaaataaaatccattgtctttttttcctgttacattaactgaaattgcccctaatcttgagtcagcttctgagttgagaattatattgttacctgatactgttgattcattttgaatctctagacacttatctcttacacataggtgctctctttttaaaagtgctttcacataggacagacattaccaatagcaatgtcaaatggcagttgatgtcttttcattttatgtttatttatcaggtaagtcatggttttttaagtgtcttgaatggttttctggaaagacagcgttggtgagtggcacacgacggtatcccagtcataagagggttacatgattacttctagtctttgaattgaaaagccttgtcttgtcattcaagagcatcttagacacaggacattcagttcaacacagcaagtacttcactgcatgaaaaacactttgaaaaaatgaaattgtatttctttttctgtagccttccttgtatttacagtaataccattaatggtttcctttatcaatagaaaaaaaggatactttttgcaatataatgtcattagacatttcataatgcaacaaagaattcccttcaaaaaggaggttcatgtataatactcatttacaattcaatgtataattaactatgcaaataattttaaacataattaataataaagactgttctatggacggtagtgtttaatacattttatatttttatagtgatttcaggccttttgttttcttaaatgcagcagctgtatttagtctaattcttagcattgtttagtcctttgcactagtactttttttgtgcacattttctgtgatccatgttaaaaatctgcattgccaaaattgcagctaaaatgtaagcttattattcaaataaatatatacttctttaaattgctctggtataatcagatgccctttcagtattattttagaaacattggaagggttttgcttgaagtactatttgctgggagaaactagattttagttttttaaaactcttaaatctttcatgggacctatattttcttgaattttatagttctagaataaataagtaatctaaaaaggttatctgtgttacttaaaaagaggctttcttatatcctaacctactaaacaatgaggaggaattcctgtcattaagcataagggcactggattctcaggtgtctgtcttcataagagaaaaagcagagcatcctgcaagtttcagacacttcctgctcacaggcacgaaagccacatgtgtaaactgaccaacttcttgccaaaggaaaccacccctgggaaaacgaagctccctggaagaggcgttcacttggacacgccgtgctccaggaaccagtgggcagcctttatacatgtgtgaccagaccaccagccatagtatggtgtgcagtactgaacagcctgctatgtaactgaaactaattggacattttataggaattgatagagatgttggtcctcaaaagcttaaaatcagttatctgcaaaataaaatgtgttggaaacctctgaaagaaaagaattttttcttctaccatattttggaacattattctttcattttaagtatacatatgtataaaaatgtccaggaaaatgccataaaataattaacagggagatatacacatttgaagatgttaccaaacttcaaggatcaacaaaagattcctaaggagggtccatctgggaaaagaaaaagttctgttcaaaaatcaattcttctagaagaaatggaataatatatatacagtatacaaacacgtatataactaaagacatataaaatagtcttgagtgataacatacaaagccgatagcattagttacttctttttaaacatacaaagctgataacattagttactttttttaaaaatgtactggaatttggaagatactcaaagacattgatcttctttaaaattttaattcttaaaatagaatatgaaacaatattaataaccaccaccacaacaagaataacaatgatgaagcaacttctaccaagttatcaggacaagacagtgtgatccaagttgttttttaagtagaaaggagcaaaccccatattcaaatatgcaaggcctaaaccacctcatgaaataattttgataagcaagaagtgactggagaagccatgacttttttaaaaattggtagtaagcaaccaatctattataacattgttagacaattgtgaaaaatggttatagaacagaatttcatgctgtaaaccatgaagagatactggggagaagtcaacattttttttatactgaactggactcaaggaggaatatggtgggtaaattcttatgtatgtaacattaataaatgtgaacgatgtctaagaatttaaattatgccaaaaaaaagaaacgcgtttttaatggctttctcagattagagtctcccaggaaggttgaaggatctttcagagagattccaacgttaaacaaaccacagaataaattaatagaaagctagtatcagctcatagatggcatggcagattatattattcttaaaaagcatttattattccccatcccctaactgcatatactaccccatttcattaatgtaggatttgaccatgtgactttgtttactccatgtaacattagcggacttgacacaatcagggtcttccaatgggattacaaggttgatgcattctctcttggctctgccattattattacaagaagaacaggaagctgatcatccctcatctttagtcccaaaagtaaaaataaaatgagtgttaagagacagagaagacaagccacacagactgggagaaaatatttgcaaaacacatgcctgataaaggacttatatctaaactgtattaaaaactcaacatttaattaaaaaaaatttttaagtgagcaaaagatctgaagacacatctcaacaaagatccacaagtgacaaatcacctaataaaaggattctcaatatatttcatcaataggaaactgaaaattaaaacaacaatgagatatctctaaacacctattagcatagctcaaaaaaattggcaataccaaatgtttgcaagaatgcagagcaatgggaactgtcatcttcattgctggtgataatgcaaaaggctacagccactttggaagacaatttagtagtttcttacatagataacatagtcttaccatgcaatccaccaattgcttctagttgttgatactaatgagttgaaaatgcatatctacacaaaaatgtgcacacaaaggtttatagtacttttattcataatcaccccaaactgaaaacagctaatacgcccttcaataggtgagtggataaacaaactgtggtacctcatacaatggaatgctactctttggtaaaaaagaaacatactatcaaactacaaaggacatagaggaatcctaaatgcataatgctaagtgaaagaagccagtacaaaaaggctacatagtttagaattccaattatatgacatcctggaaaggacaaaactatagagactgtaaaacattcattgcttgctaggggtttagagaaagaggaggagagaagcacagggaatttttaggatggtgaaactattttgtataatactgtaataaggcacatgacattatacatttatcaaaattcatagaattttacaacacaaagaatgaaccttcatgtataacaaatttgttaaattatttaggaggttgggggatcccaggaaagaatgcagaatgtgacagaggaatttaactgtgttacaaatgtatgaaacagactcactgaagagggttagggagaaaacgtgatgaagaaagtagctttggaaatgagtggaatttgtaagattaaaggtgaaagtaactgcacctagacactgtactctggctaataaaattgtttcccgtgtggtatggattaacaattctgacactgttgtatgtgtacactaataatgaacaattacgtaaatggatggtggatgctggttttcattgttaaacggaagattccaaacaagaaaggaaaacttatctagagtgacccatgtggtaatgaattagagttagagacataccaattaatgatttattaattgtacctaattgtaacaacttatgtttaatttttaatatagatgcacttcattttatatatagaaatgtttacagataattggacaaatatggattagtatacgtaaatatttctttgctctgtcagccaagcaagcccataagaagtgacactgtaggagcactgagcacacactgcagtcagatcttgttttctaatactatttttcaataaagaaacaaggctgcttagacaaacgactgattctagggtgggggcacaaaatatacaaaatgagcctggagcatcttgcagcccattaagaaatgcttgagaaaaatgcacacacacacacacacacacacacacagagatatgtcaaagggacacaagagacaaaaggaaatagtcaaaattggaacaatataaacaatgaaataaatagtcttgaattgtaaccccagatattttaaaaatcaaagagcctatactcatataaataaatgattgaataaattaacaagtcagagagaagagaaaaatctgccatgcagaagaattccaaataagtcacacagatactctatcctaaaggakgaagtgcataactccccactcaagtgcaggctgcacatactgtaccatgtggaatctaggaaaagcctacagtatggaaagctggagtcagcaaatttatagtaaagaaacctgacaagcactgcttcagcagatgattaaggtaaacaattatacgatcaacaatcataagtcatgttgatagtatgtacccttgatatcatttgatgaaaattgcactttatttctgtgatcctgtgtaccaaaatccataatctccatctaataatgacaaaaacattggaaagattttaatataagggcatcctccaaaatattaatacctgaccagtactcctcaagactgtcaagctcattgaaaacaagggaagcctaagaaactgtcacagcctgtaggagactaaaaagacataacaactaaatgtactatgatatctcagatgggatcctgggacagaaaatagataatacataaaacctaaagaaatcgagaaaaattatggatatcaattaatagcaacatatcaatattgattcaatatctgtaccaaatgtactgtactaatataatactaggggaaattgtgcaggaggagagtggtttatgttaagtcttggtattatttctgtcaatctaaaactatgaagtctatcaatttttttaaaaaatataacaacacgggataggcctgagtccaaatctaaataagaaacctagcctagccagatccataagcaggagatgaagttgtccaaccagcctaaatcagctgactcacagaactagaaagggaattctggaaattcctgaaacttttgacataaagaacatacaatttcaactttgctaaataccacaaaattgctctccaaaatgattctactatttgaacactcaccaaatgcatgagtttttattcactcccacttttgcttccaattgtcagcacaaacattttaattttggctactctaacaggggagatattttatttctttgaatctgtatgtcacagattcctagtaaaggtgggcatctgttatcaacagatactccagtaagtatctcaacagatagaactttttaaaaaatgacttcagtagaggtattatgaaattaacaataaagttagtttgtttgaatcaggatccaaacaaggttcacacattacatttagattatgtgtatcacaagtctctcttaaaatattataattcttcctctttgtgtgctatttgttctttttctttaaacaactaaatcctttgtctt

SEQ ID NO: 94095 - DNA, 399820 bp, Homo sapiens
  misc_feature (1)...(399820): n = A,T,C or G
ctcaggaatgggaaagtttatgactgttggctccaacaaatggataaccagatttagcaagatattgaacagtcacggaaaaaatccacagcaccaaaatttagcacatgagatttttatttagggattcttggtattgggggtcttttttctttctcccaagggagtgattttgtttctcagcctagcaatttcatcactgcttttgcttatttgtaagcataattctaaaaagttggaagaagccatttctgtccttatttggtacgtggccaacaataagggtagcatgagttggagtcagtgttgcaactggtttcccaattaaacaacctgtctctaggatcccataagttttcaaaaaataagtagaaacatttctatatttaggagaagcttagggttttgagcaatcgagaaattctatcacctaatttttgtaaaatttcttgccacctaatttttttagatcttgtaaacaaagttcttagagggttttaatgctgcaaataaaacattaacatttcttcatatgattaaccttcaagatataacagctaatattttattcttacacacatgggatataaagatttcaaatagagaaaagtgttatctatcaaaactgaggactgatattctttttgaaactgataaaatggtatgcctatttaccatgctcatgaagtaaccaattggcaatttttagaacttaaagatgtttctaacagtataaaaatagttttcctacctctcccaaaagcttacaaacatcagtagtgtgtgcctaaaattttgtccagttttcagaatgtttttatataaattgccttattcagccctctccaaaactctttgcaatggctctcaaatgagaaccaaatgggtaagacactgaaactcagcaaggtcaggcaacaatcttcaaggtcacatggcaagttcatggcataactgtgactctaatctctaatcccctatacagtgctgccctgaaaacttgcccaatggtattttgattaaaaaaattaattaatcaatcaaataggaaaaagaaactaaataagccctacctaaattacctgttctgaaatttctgcccctatttaggcacatataagaatataatgtaaatgctccatcttatttttaagatgccctgaaaatattggtttgtccatttattaaacaaacataattgtggtttttatgtctctagactgtttgctaagcactgagtacccagagggaaagcagatgttatccatgttctcatagtgtttaggtctatcaggggagccagataccaaataagtcattactaatgtgatgacattgacaaagaggaagtacaaagtgcagtggagacctcacctggtatggggaggcagggaagacttccggaggaagtgaatttcaagatgtaatcctatatccaccactccttcactcaccagtcaatagctaagtaggatttttatttaagactgtattcatgagtagaatattaaatagaaagaatttttatgacttttaaaatcttcatatacagagaattgaacaagacaatcagtgacaccagaagacttttacacacttgttagaaaattgtgtcaaattatttatttcaaatgattagtctacattgatttcaagatttttaaagaatttgagtctagaaatattttttgaatagttagaaaaatctcttaggaacttgtcagtcatttagtagatattcaataaacataaaatttattttcttttccttccatttcttcctccatgatttctttccttcaatcccatttatccaagtaggctttatccaacaaagctttagaaggagctttgttagtttagtgaatagaaaagcttgacttagttgttttccaaattgctaaaaaaaatcctaaaattaatgtagatggaaaccttaagtgtctagtaaaacattttgattcacaatcatagtcatattgattttttatcattatatttaagcatgcctcttattgattgttttagtctatatcctgattttagctctttaattacagtttgtgtctgtttgtgtcctgggtcatatatgagtaatggatgcaattgtagaagcttaaaacacagagcatgctttcccagtgttcttaagaccatggggtaccttcaattctgttaatgttttactgttgccaagtcttaaaataattgtctcccatttcagaacatggaataattgacctttcratcaagtagactcatataaggtttagaatgaatatttgaaagcaattcaaagaaaattttggtattattttgcaacacttccattttgagaaataacttatagttgattttgataagtaatgtaataaaaatcattttttacatttacttgtactgaatggatattagttttaaggagtacacaagccccgttatcaaactgccttttgtcacactcttttgcaatgtatcattctgaagatagaattacaacgacaccctcatcagaagtagatggtaaataacagtctgttatttgcttccacattaacttctgctggctttgagtctgtaaccagagactatttcaaaatacagcactatcctgaaacccactatctgcctgctctggtttcctgaagcaatgtctttcaacctaacgcaaccccactgatgtaactgcttatttctctgaagttcagctcaaccctcgtctcttccgtatgcctgttaactagagacttgatgcgcaagtaattgaatgcctatgtggattacgtttaacttatcccactctcaaatttgggagtttcatttttattcatagtagctatctcctataaaggaaattctgagtttctgtgtcagacaccgaaacccaaatttgccatttgtaacatctggaatcttggaaccaaaatcccagaaatattcaagaggcaaaaaagatgccttatttagagctctgcagaacataagagctaagttattggcaggagacgggcactttgctgatactttagtggggttaggacttacatggataacaattggatgggagcaatgtttagatttccgaatctggttttccctaggacatataaaattagtgtgcacaacttgtaaacataataatttgtctcagggatggaacatctctccttgctattgaatcatgcttttactaaaattcatctggaaaaataaacgcttaataaatgacagtaattagaatgttcaaaagatgtcttctttgttcttttatactctttgatacccatgaagtaaaaattataaacagcttgttgtattataaatgctagtaaagattcatcctagaaaatcattttatttaatttcttattttttccaaatgtctaaattctcatgtctgtgaaatattagccagttcttcaaaaacaatattgatatttctatttgaaatcaaggcttaattttgctcatgattaatctcagaaataagtagcttatttctatgaccttactgagacctggtaacctaagaaggattatgtgtaactgtgtggaagaaatgaaaaggaggcggtaagtaattatttaagaaaaaataatattaatattgacagacacttcttgtgtctgtaactgatttcacactaggaaaatgaagcagagtttcaattttcttgttcataatttcacatttacagttccattgttttatcttgcttaactgttctagatgactgcctttacaaagcagggggaaaagaaggaagaaatgtttttgacagtaatgaaaaagacaagattagttctccttccttgcacatttttagaaaaagttggacattccctagcagattcattctagattattcgtatgtccttgtagcttatcaattagatatccattaaatttgaatatccctttaaaaaggtaaatttgtaagcaaaggcagttaattatttgtgaaaatgtatactgctggctttagcctgaatacaaagatagggtttatcttgctatcagtaaaattgggataacaatgaaaatatttttctgcttccaaagtcgtatacataaactgtagcttttattagaaatcagtgatgctgtttcacctacaaaaatttaaacaccactggacaaaatgagagctttgtgttgcctggagggtgaaaaaagtccatctttgccagcaacatcccttctactcttctgcttgtctttgtggcctccctccccctccctttcacaccaagccacctcaccccaccagctgttagggactcctcccctctttacgcagatcaccagttatcttacactgtctggctttagtctcagatgaagacattctaataagcaccaagttgttcagctcagtgctaactctgccaggaatgtgtgcatttcctaagagctgccgaaaatggaaattaaatagtttgaaagaattaaatgataatggtggcatttcatacaccagaagggcagattggcatcagtgtaagcaccttttcagtccttctttgagaacaccaggaaagtggctacctgttttgctcatgcgaaatttggatctctatacaaaagcaaaaagacagtttgtgaagcgttacaatattgcaagttgattcagagagaatgtgttgtgtttatttttgaactctctgctcctccaaggttgctgctgttcagggcagttctcactcacccactttctttgagctcatgtctgataagaaagaggtgaaactgtaaaaaccttttctattactcgtctccaaagctgatatgaaacctgtagcattcttaagaacccctggtgtcctggatgctgttgtgaaaacaagcataatgtttaatgtcttgagcttttattgaaattatrtgaatattcaagactcccttggtgtacaagagacagattgagctttagaggtctcaaaatttgcagatatggtgatgttcactgagctcaactcttggtcaattttgtccagttcagagagggttaaattcactcttgggcacttgaagcctctctaatcttatcctgaagaagtggcgctctcccttggtttacagttgaggtcacccgcggggcagtgtttggatacagactgatgaaattatgctgcattgttaacattgaataccactcagtggtgaggaccgatgacggcactagggtcctttgactccttgggtacaatttcttgaaatagatgctttcccaaaatgtcctggactcataaaatatatgaaggattctatttggctttcatcatttatttaatttgaaagaaagttgttttaacagatttatcagagttaagaaatgtttctagggaatagaaaatggacaagataattgatctttgttgtcagagtcatgcattgtaattcactctctaaggtgacrcagcatctccttgagggcaaagctgccaaaagttctgaaagtgatctgcctgtttttttttctcacactgacttttagagaggcgctggtattttcaagacgagtaaatcctgtttacatcctgtggaaggttggctaagaattatatccatctctttttaagagaagttgaaataaggaaaattatagttggcagttagctgtgtgaaatttagtaatctttgtcagatgagccagtcataggcatgtattttttaaaattttttaacgaagccctgtgggtttacattttttaaagttcacactgatataaaggtttacccacttcaatcacaccttttgttgtgtgtgcatgcgtgtgtgtgtgttgtgcttttcaggagtggcatgtgactatgctgtttaatcagggctatatttaaaaacaaattttcgagggagtgtttctcacgttaattatgagataaggcctgagtgaagcaaactctgtcgcaaaggccaagtgtcatgcagcaggaagtcctggccatcccttccagccctgcctcagccagcctgccatctctctgtcagcgcataccactgcacaaaggaaatgccctcactcagctacaagtgcctcctgctccgtgcggggcctcagggccccagagccccgcaccagctctgacttctcgtggttcctggggatcttggcatcgtccttaaaaatggcttttgtttgggatcctctgggagccacggtgccaggaccatctacaagagccaaatcaagattgcgtttctcaaagtcctacaggtattactcttttccttttgtagctaggaagaattgtttaactgccttaggccccttgcaaataagcctttgccctatgttgaccttctaactcctaatgcttgttaaattgacaatatattaaataagagccaagaagatgatgtaaaccttgaaataggggtatgtaggtacgtgcagaagttgaaggaagttgactaactttaaaagctaattctgagagttaaatggcaaacttaacaaagcattcatattactgccacctgaaaaacagtgtattaacttgtctaatggcttaatacagtcaactctaaatgttagggaagggttcttgtttgaccaacaaaaaaaacactacattattcttcataagtgtttcagggcacatgcacatgaaaaaatggaaactaatgctgtttcaggtagtaattcagtgttcatcttgcccagcmgaattacatgtcatgaattcaaactaaatattttaataatcttttgtttctggaagtcatattaaaaatcttgacctcatgacttcactaaactgtcaatgactgttttacaacaaaatcagcttattttaaccaaataactggaaagaaagaaaacacttaaaaaatattggatttccttcttcatttgagtattctaggtgttaataaagagaagattgattattctttattattgtttagaaagaaaaccttttctgtttttgattgattacaatctatagcactgaaaggtatctatttaatcaatagtaaatagaagtgacattgtttgcaaaattttggatataaggtctttcttatttagaccaaatgcagcacatctggaagctgccaagcctatgtagaaatatatattaacactgaattaaaatgtgttctgatttgcctgcatataaaacattcaaagtttgaattaaaataatttataaggattaattatttgctttagacactaaagaagataatgtccttggaatttttagggaactataaaatcagagaaatcaaatttaaaaattttgtataacaatgcataagcaaactttggcaagaggtaaatataatttgccagctaaaggtataggtattaactccatttatttttatttcaaaataaaataatgatttatttgttatgtttgttacagctataaaatttagttgaaaattttaaattatatgcttcctatgtgctttgcattttgttaaatgtgattctcatgcttattgtatgctaaattgtacatttagaacttaacatcaatgatttgctaacattactgtgcatatttccaacatatggtggcttctaggctctcttcatcactagatctgataacaagctccttaatatcataaatctccagctgctgaataaagtaaaagcaatagcttgattgactaatgaatttgagaaatctcacgaaatgcagagtttaagctcttctgtgtagtttgcaaatatattataaaccttgccttctcaatttggcaaagatatttttattttgaggtgttatggtattgtaacaatttaaagctatatgataaatatattttttcaaggttcctttggtcaagttctgaccctttccaaaatataagcattagcagctaagaatgactttttcatgtayttgaatacctcacatctgtaattttaacaagtttcatttgtaacaagtttaagaggtgagaatgacatctcaaatatccatcatgagtcagtttccttcggaagcttgagaggctcagtccttcctttacttcctcttaatttgaatatacartttcccacagaataattaatttttttatatgtgcygctttcactgtttggaggttctagtttatctttccagttgcactgcaaactctttgaggttagaagtttccttacatacagcaaaaatgccagtaatgcctatttgataaagtattctgttaccctttcttatttggcatcacccgataatgttttattggcatagccaacttgatatgatcatatctatcataagttgaattgagtggaagggttagggaggtaggaaggcagttggccactggctcttgcatttctgcaggtccctcatgtatccaaaggagattacgcattcagccacgacaatgtactgacaataatgaaaaaaggtacatatcatataasttaaaatttttatcataccataatacctcaaatgcaccatgagtcactctatatatatacagacacatatacacaccacacacaggcacatgcacgcacagttaaatgctataattatcttctgaagagcatagttttattgcatagcattcttggaattaaaggtgttaaactatttgatgtaaacatgtaaaatatctcataatgtcacagccttgtttttgcatttcttattttttaaaaaatatacaaaatccttacgcggtgaaagtaacttaagcttatcttgacctttaagaggctttggatctgattccattattgaagcaactgaaagaactggacattggacaacatttcttcattgaatttctcccttataattttttttatgagcaatattttttatcttgtaaaatcttcaaatgtgcctattgtagtgtcatttttctttggctattgaatggataataatgcatgctactgggggtacacttagctttaactggaatatttttccttggcatggcttttgctgcctggtaatattcaggctaaaggaaagccaggtgtacaagatatgaaattcaattagtgtctgatttgttaaagtaatagcaaatcatatacatttaatgagtgttgactcttgagaaatacaatctgaaacagttttacaatgctcaaaatagatgtgaaagtttttcagctgtgacaattttttatcttatgtgggtaaaatacatttttataagaaaagattaatatatagcttattaagtttgattgaggcagaaagaaggattgaaagagaaaagaagagggagagggaaggaaaggcaggggagaggaggggagcagggccgtggaaggaggagtgaggaagagaaaaagagagaaagcagagggttacataataaggaaggtactttttctctgtgagcccagaagagattgccaaccatgttttcagtaatgggatcagtgttagcattagggcaccacttacaaagatgagtactaattttgagggcaaggtgctgatttatctgcctaggttctggcacacatgtttaaagattcacctaattactttagagcaacgcccctcccaagtattatagagaagaaagaggagaatgatgtgctcaagaaaacaatgtggagaagtttatattggttgtttaaacatagtacctaaaaaaaaaaaatggggaaaaacgatctgggaagtaaagaaagaatcaaggagcaaagatttagcaagcctgtggaccctgacaactccaataagagaacactagggaattttgtgatttaaaatatattattgcttaaaactacagtagtgttcaaggaaactttaaatagaaaattactcttcttgagatgattctgtcttccaaagagaacaaatcacaaggatgttaaaaggaacattttatgtgacaagtttggggtaggtactatgtaaatagaagagaaagtcactcaaggtacatttgaatgtagggcagagattattccatagcattccacaggccagaaacagaaagtgtcttctagttttcttgccctttatagtaataggggtcatgggatagaaattctcagaaaatctccaaatctcatttttgccaattgtttcaacatcttttccttcccagcattttagcagagctgccaaacaggtgattaattaaatacatatgtgcatgcttgtacctcgtgtagaaggtctaatgagtaaatttatttgatatgacatagactgaacagtagaaggaaggattaatgacagtcagatcaacaaacaaaagtacaaatggtatctgggctatgaaaagataaagcaatatttgcccaaacaagaagatctagatatccctaaattacctcctatattattaggaagtaaagaccaaatctacaactttgatctggaaattgtatagtagctgatatgaacagggatcataggagagtgtggtctcatagctactctttgctactaccaaaacctgagtggtagcacatcagtgattgcccaaccaaactgcacaattcccattagaaaaagctgtctcaaacccacatcttagaaaggaagtgaatgccaccagtgaatcaatacactgggatgtaactttctgcataccccaagaatacctcctgttgcatagcactttttagttttcaaagcttttcagatgtaacagatgtgacagctgttgtttttagtgtgccacagctcatctcacttaattctttagggtaagtgaaaaagatgagtgtaattagtatcaaataagagaagaagaattgaaggttcagggactagagaccacacatatatgtggttagaaagtccaaagtaagaacagtagagctagtttgtattggacacttactatgcaccaggaaccrttcccaatcccatacatgcattagctcatgcatgtcatcctccaaaacagcctcgggaggtggatctagcattacctttatcttacaaatgaggaaaccaggcagagcaagtttaagaaacctgcacaggtgtgaattctggaagtctgtgttagaaccaggactcctggtccctctcccacctccagcttcctcaccagatcctattatcagcacacaaggaaaaaaattccataatgagaggtattgttctaacagatgtactatcttcctctacttaactctgaatttttctctgaagacagaacaccacgtaatttgttatagaatagggcttagtaatcagttaaaatataaacttgttaaataatatctaaactgtcctctaacctaattgatgttggtttaaagaaatgctaagcaaaagcatcaaaatagaggtatttttatattaaaaagaagaaaaaggaaaatgaatccgttattttatattgtctgcttctgccccctcctggcttttgcttcatgggcttccatctggctcatttcatctggccaaaaacattggtcatgtggttgtattttactgccaaatattactccttggccagctgttcagaggagccagaagattctctgagctmgagaggtcaactccatcctgtgtcatgtctatttattctactggcatagtcttgactattaaactaggtttcttaatgatatttcaaattgtgagtaatgttggctaaattgacaaaaagaaattatagacaacatttatatctaagaataacaatactactaacaaccattgcacattgtaggaagaggtagcatggtataggaggagaactttggctctagagccaaacagacccagcttcagtgccaactctgctgctttcttgattgggcaggtttcctaacctctctgagccatttccatgtacataaatagaaaattaaaatatctacttcataaggtcgttgtgcagattagatgaaagcatgtacgtgaatgcaggactacctgccaactctttcatagcattttccaagtcttcactaacatttcacaaattttgtgaagcttcttttgtgaaatacattttcagataaactatcatcattggtaccactcttggtcacagaatagtacaatagagctggcttataaatggttaccttataagcaacttgcacatacaacccaggctcaccttggaaatgtagtgtgcaggaatgattgacagctggctagctctacagccacactgctgctgaggttcacattttcacattatcacttatagctatgagactttgggcaagttacttcatgtgcctcagtttcctcatttgtaaaatggagtattatgaggattaagtgtgttagccatgtaaagtgcctggcacatagacaacactaaaataaatgtcagctattattaataatagaatgtaagctccacatggcagcaatttttgtccttttttccacctttgtatggccagtgcctggaagagtgtgtggtacatattaggtgcttggcgtttgtgtattgaatgaatgaacctattagcaaatgtgttccgattcatggcaagtgtgaggatactctgcttccttttgccacattcatgggaagagggggttagagctgaaggaacctgatggttcatttgttcaaactcatttgtcttacattgaagagcttgaagaccttgaaaggccccagggtcatgcaacttgatagcggcctggtcagagctagaaccctggctctgtgtgcttctgtgaaaatctttgttccaatgtcccacccctcacttcaatacatatgccatctaattcartgctttcagtaaggcagcaaaatgaatgaatgattcagagcacacttcttgcagacaggagagtgtataagagccataattgggcaatgaccatggaaggacaggtttctgaataagagaaagacttatccaagtaaaattatgttcagacattttacttacaagtctaaaaatcacttgctacaacagctacaatagggtttttgtaaggaagtaccactttgtaaacaacatttttgtagaatgcattatatgcatttttttcaaaattgaaggaaagccccatctcaaacattcaaaagaatcygctcaattatcaatgtagactagaaacagagatagagaggggagatacagtttgagtgttttctgtattatcatgacagcacatggaacaaccacaggcagaaagattacaaactctgcaataaatataaaggtattggttttataaggtggcctgcargctacggaccagcacagagctctggcaaatgtggaatgccaggagatgtacaaaaaaatcaaggtgacaaaagaagaaaagacactccaaactgccaagggtttataatcatgctgtggatatttctgatcatcagtgtgttaatggttttcactatagttaaaactataccatttttgaatgggtaataggtatgaatatttatgcttaattagtagtttataaaatttatactatttattttcataatgttgattttatgattttcaacgagtgccatttgtccttaagtcatgaagtggatgagcccccatcaagtgattttaagagacagtaccttgactgagcagctggatcaaagcctgtctgatctgggcagagcaaataaggaatacttcttacaaaagaggaagcattcaattctatacactttaccttggtactccttgttctggaggcctcagcttctatcatgttctttgccacagtcatatacccaccttctaccttggctctccctcctcctaacttccattattttttctactttcaaactataattgacaagcctttttaatttcaacaagggtctgaagagaggtgtctgattttccgtaaggctgggttatataagcacacagagttgaatcagagcaaaggaaaaatccattggcaaaggaagaatactatatgctactttaaaacttgtctgaatgtattattttatttacttattttagaggcagggtctcactctgtcatctaggctggagtacagtggcatgatcatcactcattgcagcctcaaactmctaggctcaagggatcctccagccacagcctcctgggtagctaggactacaggtgcaccctaccattcctggcttaaaaaatatatattttagagtctgttttgcccgggtttgtctcaaatacttggcctcaagttatcctcccacctcagcctcctaaagtgctgggattacaggcatgagccatggcacatggctcaaattatwtaattcattagctggtaatagtgtaaatttggaagagaaaaactaaaatgataaagaggaragatggattgtgaatagagtaaatatatattactgtaattatgttaagccaatcaaatgcaaaggacagttcaaagggracaagtatgtaagccacattccaaaaaaaaaaaaaaaaaagctttgaagtgaagctttaaaaagataagctttgtgttgagctaaagaaataaactctataaaaacaaaaccctaaaattgttatgacaatgaattaaacattcaaaaatgaacagaacagaatgtaaaagattattccttcaggtggtaaatgttcacaaccagctctctatgggggaggggaagggcactatttgtagtatttgctgatttctgtgccaaaaaattctctcacctgcccatttcaaacagcagaggtcactaaatgtggagttggcaagagatacatagacatagtactctatacagtgtttctatcatatagatacagtagatataagttgccccaaaaacataataatacaaaatgtagccaaatcattcagaagttatgagttttgaatacttatttccattgtttttaatataatttgtttaattatagttaaaaatttttatgtaatttaatttttaataactgttgggtattaacaactgacttataaatactcctaaaaatgtaacagaatgtagtgagggacaaaatggatgcggtctctgctttcatcaagtttacattctggtagagaaagacagaaaataaacaagttaacaataaataaaataaatagagactgagatgagaggttctgcttggggaagccagggaaacctttacaaagaaattgataatttatttgcatataagttcaagcatatccattccatacatctgtgagtacatttgtagttctaggcctgaaactcagaactgcacaaggtcaatggaaccatataaatattgacctcattactgacttgttttcagtctccagtctcttgagtgaatttacctttgcttctttgttattataaaaatacagtgagggaaagtaaaacaaggaggaagatgaaaagaagatgtagggggaagaggagcagtttacaatatactttctattacattgtttcacactatctcaaaactttttatacgtagaaaatactaaagcaaagaaaaatggaagttaaaaatcggtagcagtagtaatagtcctayagtaggaaccttgttttgtttgaaatatgtgtctgtgtctgcctacaaaacataaacaycttaagctaagaataactgtgagattaattttttattttcaaagaaataatacaaattttaaatcttgcattaaaaggaaagctagctggaygaaacttttctgacacacagattttgagaatagcacccataaatatgcttccaatgcttgtcacttgatccctttttggcaattaacttgcctttaattgatttgtggattacccactggaagttgctatggataaaggaatgtaatggcagagtttgtttatrtagggtaacaaaatagactggctgggaggagggatttaactgcaaaatatccttgattttcaggaatttttcttttcacataatggcagtgtttagataaagaatggaaagttaatgaatcagatttgtgttcccatccaaagggaagatttatgtcctgtttaagaatcacattaatttgatgacgttagtacattctctagtgaaagagtggccactttagtggaggaaaaaaacaagcaacaaaactccttctgccatcttcaggttgtacctgacgaaaagcttttatttgtgggttctatgaagtatcactgccctgatctcagatgaactaaaagatgaaaacatttcatcgctcaaataattgtttatctcacatcttactggttctagaaaaggactatatattttccctcctaactttcctcagtttcttggtataaagttcaaaatgctttgagtagagttgttcaggaggtcctcagtggcactgccactcactggttgggacgtttttgttctctgtcctcctgtgtggaagatgacaaggacggctttgtgcaacttctgttgtatgcgctgcttttcaaccccttggatgagatactcatacaaggaacgtcaggtttttttcctaaagcaaatccgtgtaaactgagacaacataaaccttagggagatctgacacaccaaaatgccragaaagggaaagaagaaattattatcggtgggggaaacaaattatcctgtattttggagtgaatttaaaaggcttattgtttgttttagcactacatgacttaaaaaaaaaagtctcgcagtcttgccttcctcatgttggttaaaatggaaaggattctctttctttgctatttatagataacccttagcactctgcaaggatctatttggtataaaatgatgggtgtgaatgtgccagtaagagagaaaaaaatgcttagccatatttactcatataaccaacatctaggtcaaaatcaaaatattaccagctcccaaggggacccctttattcttctttccagtcactatgcacccgaagataaccactaactgacttccaatagcatagatttgactacttttgaattttatatgaatgaaattatacaatataaactcttattttatttcagtcaatattgtgtttatgggattcattcatagtgttttgtgcattctttattctcattttgttagtattgcaccaaatgaatatgctacaatttacttattctagtgttgatggatagttaagtattccagttttaggccattatgaattagagccattatgaacattattggatatatcacttagtaaacaaatgtacatgtagtgttgcagtgttttgtgcatacacgtaggttgggtatatcccaagaggtaggatttctgggtcataggttatgcctttgtctttagatattgccaaatgtgtttctatactggttgccacatttatgtcgcccccaaagtgatgtttcagttctctgcattcttaccaaagtataggtcatccattttcagtgatggcatcttaaaaaatgtttgcctgtaataacaatgtcatcatgccttttatttatgcagttgagtcttttaatctttaggacctgtttttccaggaatagtgtgggtaacagtgagccattcacactctgtctgtttctcctcatgatgaatactatgtaactgtgaattaagtgactaaaataagaaacgatctgatatgcagaaatagagttttccctgtttgatccatatgcagcttaaatatgtgatgttattctacattttatccagattcatttttcaaaccaatagtaatcattgttagcaaaaaccaataaataatcttttattctgttttaaaatttccatgtcgtactttgagttcttgctatatatcccgtgctcactttaaatcaggttttccttcccgtacattatttcttggaaaatatgttttggacttttcctaaaccaccttaacctgttgaaaaacactagtaaatgcataggcagtgtaagtcacgctaaaataaatgtgtattgctttttcaagattttgtttacccatgcatttaaagaaggtttttttccctttattttctttcttttttgtcattatagtcattatgtctttttaatgttaagattccggtaatatatattcctcatttttatgtcatctccaaagctccccataactgattgatgatatcaatccggcttctggcatataaagtttgttgacctggttcagtttgtaccatgtcaaaatgtgatcattaattattagatgatgtcaggaaaaatttagtatgtgtgataactgtgggtcccatttcttaaagctttcaaaatccaatcttaaggctctctactttgtggcatatgagggaacataagtaaacattagagcaatatcaaacgtattctaagggtttcatgatgtgaaacaatatatcactttattaccagacagatacttcacatcgtgaaatttgaaaaagcatacgaggtggggcacagtggtttaccctataatcctagtgctttgggagggtgaggtgggaggatcgcctgagtccaagagtttgacaccagcctgtgctacagagtgagaccccatttctacaaaaaatttaaaaattagtagggtgtgatggtgcctgcctgtagtctcagctactctgggggctgagggaggattgcttgagcctgggaggtcaaggctgcagtgaatgtgatcacaggagtgtactccagcctgggcaacagagtgagacctcatctctgaaaaaaagaaaaagtatgtaatttttacgtaagagtcactcgattcatatcatgaagcttgtgctaaaaatggaatcattcagtgatcatgggctgcttttmaagcatttttcgctcaccctttaccattatgacagtaaactttggggaaaggggaaggcatgggccaatacatcttttagtatttcttggttatactaagaacwactgaggaactgctaaggaacaactacatagataaaaagtatttttattataacccttgtgaaaaacctcttcccccataaaacgtttagtatcttgtatgaaggcataatgtacttttaaatattcaaatccaattccagatttcatttatgtgctatgtactgtgtaatccaccacgcaaaatgtaatttcttgcttttaatataaattttcattattatcataaatgaagtctcagaccacaacattttgttaggttgcattcaaatggtaatcataatatgacctataccagtttttgcatggaagggcagcagccggctgaactagatttccacttttgtcttggctcattaaacaacaatggacaagttaccttaacttcatgggtcctcaaccttctcattcgaaattgagtgtatggactgtatattacaatatccttttaagcttacagaaataacattatggaggtatgagaaaattgtaaatgatccaagatatgtgcctaaatatttcttcatacatcaagcatgcattcatgaaatcaacaccaagcccaggaaatatcaaagaatagctcaatgtccctgtgaacttatatccaattcaataattcatccaacaaatgtatattgagtatataatctgctagacttatgaagccttaaactttatgctgtacattctgatatatgttgttttaaccaggggttggtcagctttcaaaagtgacccttttgctaacattgttcttctggctgaaagctagtaagtataagcaaaaggagagatgtatatgatctcacttctatgtggaatctaaaaaagtcaaactcacagaggcagataatagaagggggttaccagggggtgatgggaacaggagggattggggaaatggtggtcagaggatataaaatttcagttagacaagaggaataagttcaagagatctactgtacaacatggtgactatcattaagaacaatgtattgtaaaccaaatattatatgtggtcacttataagtgtgacctaaataatgagaccacatggatacataggggggaacaacagacacaggagcataccagagaggggagggtgggagaagggagagaatcaggaaaaataactaatggatactaggcttaatacccccatgacacgaatttaccattgtaacaaacctgcacatatatccctgaactttaaataataacaaaaccaaaaaaaaaaaagaaaatttctaagagagtagattttaaatgttctcaccacaaaaaagtatgtgagttaatgcatatgttaattagcttgatttagctcttccgtaatgtgtacgtatttcagaacatcatcttgcgcactataaatgtatgcaatgtttgtcagttaaatatttttaaatgaattttttgaaaagaggaggggtgtgaaaatgaagactacttctgactttatattttatattctggggttacaagaatgagacctccctgatgcctacacacaaatggattaatgtgaaactgaaggtttacttgcccagtttacttgcccatgtttacttgcccagttgattcagctggtttatgtataattgtcaacaatttaaactctgtcmcattcctccccaaaatttatgtactttaaaaatagatctcatcatttcaacatttcaatttatatatgagagaaataaaaaggactagtaaaaattatatgaagaagcaactccaaatatggtaatttatggttcaaaggagataggtaattgtcttctctcaagagccactagaccacaaaatatcaacatcaaagatgaatgcaagcgctaggggaaacgatacagatcagaggcaccatgtgttgtgcattctggtatttgtcagagataaggaatgaagctgaattttttcatggatttgtcttgaaggaaaataaaatgagaggttatgctaagtataaaactatctttacaaagttcctttccgttaagaccttcaaagatatgtaaaatcataatttgagaattgcttttaaggacctaattcaggttagctaacaaatcattatctaaaaagagagtgttagaatactatgcatttaaagtgagtagttcacttcatgattgagcagaaattcctgagttcaaatcatggctcttccacttgcagcttrtatgacatttatgaaattccttaagtgtgctctgtttcaggtgcctctgcgcctacatcattagagttattcaagtattaaatgagataatacatatatagccgttaaactagcgcctggcatagagtaaacagtcagctcacatcagctagcgttattcacaagaataggctatacatttctttccatcaaagataagtgcaagtttgaatagaaaaattaatttatgaaacaagactgattttatgcttttctatagtgcccatgattcaaaggaaaagaaggaaataatcaccaaccaagtgaccctgtaaaatagataggagttacgccatgcatacatacatgcatatatatgtattttggatatatatggatatattatgtgtgtgtttgcatacgcattatatatacatacatacctttgccaagaaaattggatgtctcatatctaaaaaactttcagtgttaagaactagccaagtgtcaagtacacaatttgtattcaacatatatttacagaatttaactttgtaaaaatttcaaatcactgttattgcttttcctacttgtaaaacaattacaaaaatcccttggcttttgtggtgtggactattataagggactctgatgcttcatgacagggagtaatttgatccaaagtacaacggagctstcgtgtggwtttaagttaccaaactattgaagggacccatgcaccaccaagtattcaaatcacaatataatttcattattctctaccctcccttgcaaatgtaataactctgaactgataaacacattgtacctgtgtagaaaaatgccacccagaaggaagctgactgctaatctaggcctgtgctgtccaacaagagagctagtagccatagagcacttgagctgtggctaatccaaatcagatgtgctggtaatgtaacatgcacaaaggatttcaaataatagtgtgaaaaaaagtaaaaattttctcatttgtaattttcataatgattacatgtttaaatactaatactgtgtatagggttaaataaaacatatttaaattaatttcacctggttgtatctaagtgtccatcagccaattaacrgataaagaaaatatggtacatacacacaatggagtactattcagccacaaaaaggaatgagatcctgtcatctgcaacaatatggatggaactggaggtcattatattaagtgaaataagccacacacagaaagacaaactttgtatgttctcatttgtgggaggtaaaaatgaagacaattgawctcatggagatagagtggaaagatggttatcagaacctaggaagggtagtgagtggcaggggtgtgggagtggagatggttaatgggtacaaaaatatatttagatagaatgattaagatctagtatttgatagcacaaaagactgattgcagtcacaataatttattgtacattttttaattaaagagtataattggattgtttgtaacacaaaggataaattattgaggtgatggatacctcatttaccctgatgtgattattaggcattgtatgccttatatcaaaatatctcatgtaccccataaatatacctactatgtacccacaaaagtaaaaagtaaatacattaatttcacctggttgtaaaaataactttttgtaatatggctttttaaaaatttaaaattacatgttgtggccatcattcatggttcacattatrtttctactgaacagcgttgatctagacagtagacactacgcaaaaacagctaagaaaattattaattctttaaaaggataaaatttaaagtgataaatgagatcaaattttatgagcaagtccatcgtagttcactctgtgcttgtttctagggaaaaaaaattggaactttctgtagagtgtgccagtcaatgcaaaagtgctcatcaagagagaattaaaacattagcaaataggggctgttgatgaaaatgagattccagagarggtgagaagactgaacacattcctgtaaagcaacagggattaatgcaccaatgagaattgcttttttttttttaaacaaaacaaaacaaaacaacaaaaaaacccactaaatttttctaggggaaaagtaaatgctagagtgatattagtgaattaggggatttgtgaagatgcatttgaatgtcaagaatataatgtagttttcttagtatttttgaattcagtgaccttttgttaacctcaagagactgaggctaagacaccaacatttaccatgtgcttcaatcattctctcaaggacgcacagctcctctgagctgtaataggaattcaggtctgtgtgactcctgagcccacatgaccgaacgtgtgcccatggaacactggtccctgcaactgctctgcaaataatggttctatacttaaatcattttaagaaatgttgcatgtatcgttaccgtcttaaacatgattcattgatttgcatattaaaggcactgagaattgctaaaaaactgtttaactttttaaaatctttttctcaaacttcttttgccacagaacacctcctcccctgcacatgcatctatatgccatttatcaccagttgcatgctgaaactaaccttagacagaatgctatttggaaatgctgagatgccttaaattgccttctatcatctctcattattagttactaaggaaaatggctttgagaaaatataaaatatttcaggaaaatatgtaatttgatgctcagataactcactttttgctacatcagaaaaagcaaaactagaatttaaaaataaacttggatgcatgtcttggttattcttatattcatagtgtgtgatccaaagggagtcaaagaaatctgtagcgaggctgctcacagtctaggtctctttttgtgtaggacaaaggtagggcttggcttctagttgaagctacagttctgtaggacttgggatttggaaaagtaatgacaagataaataagttatcaccatcagagacctaaatggttgcaaatttggcactggttacataatgaacaaaagtttcataacatatttcataagatattttcataacatatgtcttacaattactttttttattttctgaggttttttctctaaattatgctaaaaatgtcatcgagaagcataaaaacagactttcattaatagttgctatagcagtgggaaatttttgtaggaatttaagtaaaaaagcaagttatttagcagttttgttcaaattagacatttctgccatcagcctgccccctgggaacttggaaagtgcatacttgctcttgagttctgctagtgccctaaccacacgcctttcatgtctaccatacttcgatgatcttggattcaaatatgatcctctgccttcctcacagaaagaaacaatttagggacatggacttaatggtaatgactttcaaaagctaatgacgtgcagtctttcggcactgcctagccgaacactctttagacaacctgctgctttagactggacatgcacatgattcctaagatacactaaacaagaatatgagatgctgagtccattgtttcctgtgcaaaattcagttcaccaagaatactattttcaccaagaaagccatagactgtgtgtaggtaaagaacttttgcgctaatgaaacttgttattggctgggactaggggcctaaatactagtttgagattctgtttctgctgtgccatatagcatgagatmccacttttgcctctataaagcagggctatggttatctttccttattacctcagttgattgttggctgtgagaaccaagtaagatatgcttcatggaataacagaagaatgcaagatattatcacgggaggcaacatttttgggatatcacatattagtggaaacttaaagaatatttgagaggttatctttgacatttacrtaaaaccatgtatgaaacaagtagttcttgtgtttttttaacctatgaactttttcaagtgttttctccacaacattcctctcttctaccaaagaaaatcagtttacagtcatgtgttttgtaaaagcctaaatgggaatgaaggtggttagtaagagggttcacaagatggagaggctcccatgacatttgtaggtttaatctcgtgccccatgacctcttaaaatgtccccatgcccattcagaataccccaattcacttcaaaggcaaaaacaacgtgacattgtgaaatcataccrgatgttctagtagaactgtgttctggtcctattgagttcacccaggagaggcatcaaactctgcaatcagaacatatcaacacatggcctattagctgattctgccacttggtagctgyatattctctctctgtttagtgtccttatctgtaaattgaaataataataatagctcataaggctttgtggggattaagtgagataatcatgtacagtgcccagcacagtgtctactgcatggtaaatactgcaaaaatgttagctgttgactgctcctatttatgaccttcattattaaaaaggggaacttaggctgacgcaggagaatggcgtgaaccccgggggacggagcctgcagtgagccgagatcacaccactgccctccagcctgggcgacagcgagactccgtgtcaaaaaaaaaaaaaaggtgkrggggggggaacttatgaatgcctttcacttataccagcatcattaaaaatttaagttttttaagaaccatgaaaagctaaccattgacaatttaagaagcatgcaagcttggtttacaaaagaactggacaagctcagaatgggctagttcagtggagtgactgctgcaggagctcaggttttgagaccttcctgtcttcttccttcatccttctcctctttttgtgttctctccacacacttttcctcatcaaagccaaaacctttgttcttgctatattctctttttagagcctgctcacagtaaaattttaaaaaaatgaagaagtgctgaaagtgtagataagcaattagacatgagttaatgttttttatttgcaagagcatttgcattctaatatgaactgaacattgagtaaatagattcctgactccctaacagggctatgtcttgtgtcaggaagccagcgcactgggcttcttggtaggcaggagacccaagtcatcatctgctactaaggctgggtcttggaagatggagaaggccgtagaagaaaggaaagccaaaaaaagaaaggaatgagattttgatatattaattagctcatacyataagcctggacttttgctaggcattttccatggtaatttggttatacctcaaaacaattctcaacattattatcactgccaccacttctgttagcagctgtgagaacagaggtcatgtgagtaagcagtttgctaagggttgcatagcttaaaaagtagtcaataagctaaagtttgaaccctgagatgcctggccttcacagctaaacttttattaattacacctgcttctaacaacaacaaccatggctaaagtttcattaacctaccagtttctaacaacattaacaaaaacattttcaaaaatataataatagtcatcaataggaataaagggaaacaatccaaaaatagctctgttgaggttactgatggatggggacaggaaagtacaaaattttttctacgaaagtttccctttgaggatcactttccttggctgtcttgccttgtgaaattataccttccctaatggcttggagctgattgtgcccttctttctgtcaaggacagcttaaacttcatggaatagtttatttgaagcttgtgggtaccaattccaggcagcaagatactactttcagagattcaattaacttccttcagagtcacagcaaaaagcgatagagctaaattgattaccttgaagtgccttaaccgttttgctgctgttgttacttcttgagccaatttattctcccagcaatgtcactgttactgaagttggtctgttctttattctcagtttatgaataggaatcatctgaatatagttatagacctctagtctagatcattttttgcaaaattacaaagatgggaaaatttccaagccatagttattccaaatggctgggagtgccttaggaacttatttctggagtcttttgaactatttatattattgatatgaacaatgcccctgattgttagttagcaatctattcattgatagggacatgaaaggcagtctgctgccatctagctttttagtttctatctttaggaattttccggtcctttcacagaaagacactttttaaaggagcaattcttacttcatccctgagagggaracacttatgaaggtactgcagaatcttaaaaaaaaagtcttcatcattcttttacttctttttgcctttaagttggtcttaaatgggtaaaagtgataaatgtaggttgtgtagttcaaatccattgcagtgactaagcagtgaccacccataggggcaaaaactatgtatttttagaggcaaagattgataaccacagccatgaccctgagcaagactgtgaaatagatgcagttctttgccatcctcccttttcctgagttatgggcactttctgccttcatagctgtttcctctgcaaaatggagattttactgtcagaagtctcctattgctattgcttcttggagttggttcccatgctctgggcacaggaaagcaatctgagatcttcactactartatttattgagcacctatactatgccaggactggactgtgctctgaggtcacagtggtaaacataccgacatggttcctgctgtcatgagccttccaaaggaatagcgaagaaaaacattaaacatatcagcccatgattaaatgcataattagataaaatgcattgaagaagtaaagatcccaggaaaggagagaaccaattaatatgatggatgggaaatcaaggctgctggaaggaagtagtgtataagctgaaaaatgaggagtgaataggaattagccaagtgaaaagcagaggcaaatgggtttcaggaaaaggaaaaacatatgtaccagtaacatttcaagaagaaatgggaaggattagatgatttctgttattcttattaggttgatctcttccatggaagagacacacagaatgtaattaatttatagaatataaaaatgatttttttttttaggaatggggaggtgaggagaagacccgcttcaagttctgttccaatattaatatggttttgctttctctacaaacctaagtaaaacaatggtggtaccaagggttggttgggaggcactagttttcccagtgtacatactcacaactaacataaaagctaaatacgtataatcaacatgcttacactacaaacacaacttcaaataaaattcactagatcaaccgggcacagtgcctcacacctgtaatcctagcactttgggaggctgaggcgggcagatcacctgaggtcaggagtttgagaccagcctgaccaaggtggtgaaaccccatctctayaaaaatacaaaaattagccaggcataatggcaggttcctgtagtcccagctactagggaggctgaggcaggaaaattgcttgaactcaggaggcagaggttgcagtgagccaagatcatgccattgcactccagcctgggtgacagagctaggctccatctccaaaaaaaaaaaaaaaaaaaaaaaaaaactccactggatcctctcttccaacttttttcccctaatttcttcccttagcactgatattatcaaacaagtggccaatcctataaaggctatcagactccaatttaaaaaaactattaaatttaaaaacactcagagatataatgattgtatgccttttatgaggaaacttagtacctaaaagaaaaccctataacttaacattaagcatatgaaggtagctattattcaaataagtagcagtaaagacttttcagctttggatcctcataaacaagacctgcaggtttaaagatttgcatacatcttttaacaatgcatcatttttattatagtatattatatactattttatatttacttaatgagattactgacctgggtttcaagatatgtatgaaatataattaggatatgaaaattaaagataaattatccccaccagaaataatcttagcaggttatttactaaagaatcttaaatccagcagatcaagaaaaactccccaaggagtctttaattagaactctttaggatggaatcaaaatctctccataaaaaatgaatcttgccttargctacataaattacaaaatctgaagccctttaagcagcattaaaactgctgattttaattgctctgataatgaactggagagagacacactaagcttcctggatttctgttggaaatgaatgggattcttgccaactatggatcacagttatgaggtattctgcacagggaaaatcaaaagaaagcagatggaccttgacatgctatgccatcctatgccttcttccttcccaagaagcatgttacaataactttaagtgaaggttgtcacaactttaagtgaaaagtctcccctttctgtctaatttttaatgtaacttcccccttctcgatatatccagaaaatagttaataacaatccctgagggaaaagaaaaatgctgcccttcatattaaaaaaaagargataacagagatccccttagtggtgagtgatttatagtgaaaacagccaactcattctcttttgcctccttttgacctagagaactggattcgcggatttgtaactggattttgattatagagtatgttctatggctacaaaagagttttcctttgaggaaaactcaaactgccaacagatatgcttggtatatcagttttcaatgctttcaattgtaaataacagaaacctggactcacaatagcttgaacaaataggaattacttttaagtaggtggcaccggaggtgtttcagctgttgcatgatgttatcaccatttgcaaagaggcagcatctccacaattttcttggcctgttcctcttgatggcaaawggctactgcacgtccagatgatcatgtctgtgtcacagatagtgagagggaaggaggaaggatgagagaggatggccagctaaagttgtatctaccccacttataagaaacacaaagcccttccccagagcttacagccctttagccagaactatgacacatggtcatcttgagtgcagaaagatggaagttaacatttggttttctggtctttttaataaagatagcaaggatgaagaagtttggaaaagactgtgggctagccaatcaaattgtcgaccacatttggcctgtattaatgtatagtttttaaagcctaatgtcaatttgttaaggtgtcttaaggacaggaaaatggagaagaactaagattttttatatcaaatacagagtaaatcttggaaagggtgaattagagtggaaaataaactagacattatctaagagtgccttgaagccagatcttgcaaaacattaggcaagcatgtcactcataatggaccccagggctttccatctcataatgtggataaaaataacagtgtttctctcagtttttaaaaatgtcaccaaaaattcaataaagtatatacatacatattgtaattgtttaaagtaaaaattttatgctgttttgggaagaaaaataaccaaaaaaaaccatcactgaccattggtcatcaaaatctgatttatgccatgtttacaagataaaaacaagaataaataataattgtttgaaatattttcatcatattgcctctgaaatgattgatgtcatactgcctggatttagtcaactcagtgaatgatttatcagtagccatgctctaaggagctctctattcatagatacttatgatttggtgaactgggaaacccacagagaaaggtraatgaaataggagagccaggtaaatgggccatggatctaagaaccaggaatcatgattgtttggaagaacatatctcagactgagaaaagctggcgctaaagtaagctagcatttgattagaatgttgaaggataatttcattcttggagacagaaaacytaagtagaagcaaaagaagtaggaaatagaagcctgtgtttgagagattcagagtgactgtgttttattagaattgcaagaaagggaacttgaaaacataaatttaacatggggcaacaggccttggattctgaacagagggactttgtttaaggatggctctgtggctgtggaacagtttttctatagattatcaaaatgattctggaaaagaaatgtcattctggactgagagcacataccatagggaaaacatgaggcttatgggctgaattgtgtcacacccaaagtcatatgctgaagtcctaacctaggacctcagaatgtggctttatttgaagattgagcctgtaaataggtgattttgataaaatgagatcattagggtagacccgaatccaacaaggctggtgtctttataagaaaaggagattaagatgcacgcgcacacgcagagaagactacgtggagatgaggagaagatggccatctacaagccaagaggagaggtctcccgaagaaaccaaccccactgacatcttgacctcagtcctctggcctccggaactgttttaaaacataagtttctattgttaaagccacctaagtctgtggtattttgtaatggcagccctagggaaaaactacaatgagcaagtattatttgtattttaagaaataatattataaactaaattcatggaggggaaaatagaaaaagaggtcatttctgaaaacattgtataggtgtaacatagttgacactatcaactactacaatgggatcaggagacagagggtcagtgataacggagctctcaagactggaaactgggcgatccagaaggacaggcggttgatgaaagaaaatgatgagtgtggttgaggctgcgtttcccttgaggaggtgctggtgctcagggtagaggcatccatcacgatgtcagaaatgtgtgtcagacacgaaggcaggaatgaggctgtcgaggaagccatggcaacataaacagagaagtgccacagcgagacaaccagccaatgagttgtgtagtttcttgtaagtagctgaaacaacataaccaaattgttcaatttagtctacatatgaaatttcaatgtcagagaaaggcctttaatctcaaaacgaaataaactaaaagacattattttcctgacagctaagtcttaaaatttcttttgagaaataaaaaaaatggttttctcttttaacatagaggcaaaccagtaagtcagatacttcaggggaaggtagcttggtgatttgaatgtatgtgagtgtgaatacgtgagattagaatcttacctgagaacaaattttcatgagcatcattggagagtgggagagcatgaagacttttacccttctctctgcaggagagaattgtgcaggaggaggtggggagaatgccaccaagaacaggttgcctggggctagtttagcgatggggtccaaacgatctcactaatgtgaaaggatcatagttaccttaccaagggaaagttggcttcaaytatatatttcacttctgtaccaggttttgcttaaatgctactctttggagaatatcaagaaatttagatgagtttaccaaatccaagattgtgttccctgcttttaactcttgttactgaaatagccccctgatccccaagagtaatgcttgactgaggtgtttgcatgaattgtttatatcattcattaattaacgtgatgaacatattaaagataggactcccagttttcatcccaagggcttacatataatagtaacaacctttagaaaagtactgcattgtttatttatagaatggctttgactcacttaataatgctccataattaatttgtaaattactttttgactttgcacaattataatttaatgtcatatatctgcaaaagaaaacacttttatgttgctaatattaatttcccttcataaatttgagactgttttgactatagataaatgtaaaatgtcaatgtggtgagaatgactcagcttctcagatattcatttattctataaatatttttgaatacctactatgtttcaggcactgatctaagtgttgaataagtagacaaggacagcctgccttcaggttttttacattcaaataacacaagatgatgaagaaatttttaaaataatctggttccatttggcagataatatagatatgctcagttttataaattttgatacctaaagtattgtgataatccaaatcatgacctttagacattacactatgcttattgattgaaggttgacatatgtttagcatattctcttataatgtatttaaggacttcagtgagtagacaaaagaagtaaacttgatcagacaacatgatttctgagaacagactcttcctggagcaagcattctggttagattttacagggcttcaataaaaaggtatatgtttatgctttttgctagttgggggtttcctagcaaatgattccatgaaaacatttgcagggaattcccatctgttctatatttccctgatttgggggctctgaatcaataatgctgatgtaacagttggcaaattagataagaacagcccgagacttccttttccattaggtgtagtctcatggaaaatcacccttgaatccatcaatggaatgaagcaactgggtggagcctatgggaaaatcctggaggaagtccccaactagtcagcctcccctctctgccttgcactcttggattccttagcgaaacatccaaaatggccttcttgcaaggaggatgcagtcggtgatccacatactgaccaacagctgtgtgtgaaaggcaccgtgcccaccacaacaaaggggcagtgaggtctgctgagcagatgagtcgcttttctggacccttccaggcttgcagttggctcagatgaaaagctcaggcttatgagctgccagaaagtatttggcaaaaagcccaccttttttctcaagtacacgtattcaattgacttgattcctcagagagatttgtgagggtgaaagcaagttcattgtccacttttaatgaccctcaacttctaatgaggtaatatatgtgaaagtgatttttttaaatgcaatgcaaatacagggtgtttttagycattatttcagtacctgaggaaaatgtaaaaacacaaagccacacatgtaccaaggcactacatgagtgtacttggtttcaccatctaatttagccctctgaagtgtagagtccatcgaggctattattttgtggattgtgtactgaagttgcttttctttgttctcccaacatacacttgtgacacttccaacctctgatatgtatatgttaaatacaggctgtttttcaaacaagataaatcaaatgctagctaggaagtgtgcctagagtttaaagcattctagaatgtactcccatataacagctatacttatataatacctacattgtgccagtgtttcatatatgtgaagtgctttaatcctcacaacaaacataggagggatgtagtattattaccccctttttacagatgtgaaaactgcagtacmcaaggtgaagtgagaggccccaaatcacacagctagtaaatggcagtgtcagacctcaaattccactagtctgtcttcagagtctatataattaaccactgctccctgtgcttttaaagrttagtttaatggatattgtgctatttctaataaaaggatataatttttgttatatatttttcttcttagtcttcacttttggatcttggaccacatgtgctattatcatattttagctcataagagacttctctgataattttgtataaaatacacttatagaacatttgtatcttgtaaatgtaatttttcttaccattatctcatttgatcccccttatccacctctagaatatacagagctttatcctcatttttcagacgaagaaatggaccaaagaagactaaacaatttgttcaactccatatcaccagtttgtagcagttctgtgactagaaaccaaatttcctggctcttagtcctacattctttctagtatttcaaatcatcttttcatttctctcccttatgcttttggaaagaaaattgagaagaacgttaagaaccccagtaaaattggagaggcatttcttgagaaatatttaaaataatttaagaagtcttcacaaaagtagtaggcaaaaatgtgttacattaacaacggatctcattaagtcagtgcatacagctaggttctggtttattaattttcaattttttcatttttgggcctgcctaatctgaacactttgcagtacaattctgagtgctctcatgctttgtgctatcgctttcttaaggtagctcatttgcacttgttcatcatcctgttccttcccccagtctcctgggctctgttgctaattattgacccaggaaagcctcagaaggggccaaggcagctaaaattggagtgctctttacttagacttataatgcattttccatttttcagaaagagtaaagcacttttagctaccagatccagagaccattcagttatatgggcacttgagtttctgctaaagaatcacaactcaatttaattttttttttttttggtatttcattcacagccagtctggagtgtgtgtgtgtgtgtgtgtgtgtgtgtgtgtatttctgtttctgtattaacatatgagacagcagaataataatgtgtccattcattccatagatatttctcaaagagttgccaagaataaagaatagtgctaaaaaaaggtggaagatggttaggtgtaaaattacctcctctcacaggacctggcacatgacaaatgcttcagaaatatttatcaaactgaaatgagctattacatgaattgtattctctggctttggaatctattggggaaatgatgaagtcattaaatatatgcgaattggaaaggaatttaggaatcatcttatgcagcccttttactttaaagatgaagcaatggaaatgcaagaaagttatgtgtcttttccaagcaagatcacacatctatttcgaaataatatgctttttttcattgtaacatgtgttttagagattacacatatgtcaatgtctgtagtgcagggcataatgtgaggagagctgttgaatgctttagaacagtgctacccagtggaaatataatgcacaccccatatacaattttagatttttattaatagccagatttttaaaagtttaaaagtcagtgaaattatttktttcatactaagtcttcaaaatccagagtgtgtattatatttttgacacatctcaatttggactagccatattttaagtatttaatagttatatgtgtcttggggggggctactctatagactatatggctccagaatcacagagagggaaaaataataatgtatttttaaagctgcagtatttttaccatgggttatatttttaagtttgattgtaacacaaaagtacaaaaatgaaacaaactgactcaacacattttttttcttttttttattattatactttaagttttagggtacatgtgcacaacgtgcaggtttgttacatatgtatacatgtgccatattggtgtgctgcacccattaactcgtcatctagcattaggtatatctcctaatgctatcccttccccctcctcccaccccacaacagtccccggtgtgtgatgttccccttcctgtgtccatgtgttctcattgttcaattcccacctatgagtgagaacatgcggtgtttggttttctgtccttgcgatagtttgctgagaatgatagtttccagcttcatccatgtccctacaaaggacatgaactcatcattttttatggctgcatagcattccatggtgtatatgtgccacattttcttaatctagtttatcattgtgactcaacacatttaaaaaaaaaatctagagtagacctatacaatttgacagattgcatcaatagttacaattttagacacccctacccctccacacatagaaattagtgaataagcagactgtcaatagtactggctcaaataattctacatacaagttctaccaaactttcaagggaggggtaacttctaccttatacgaattatctcattttacaagtaactataagtatacaataagttccatttgcagcactataggagcttgaactgtctgccaatttttaaagaatatgctcaagcaataatcttggttatccatattatcttacatttccttatgaatattgagagttctgttattgataaatacaaaggtgtcactgtttaatacactactgtgtaggtccttttgctatgcatttactatttaaagcgtaaaaacgtaggtagcaagaagatttatctttctggctattcttgaaattcctgtttctaacaagatattctgcagaagcaaagatactactgcattgttcaatgtttccacaaaaggttaatataattgtgggttcagctatcaccttgaccttttcttggatctttgatcagagtttaggtaaatatgttgttaggtttcccccttttaagttcctgagcttttgaagtaaaaccagagctgagataggaaagtgaacagcaaggggcagagcacagcagaaactgaattaggtcacttttctagaggcttctgaatttggtacagtaggatttctgtgatcatcttaaacctagcttttcaaaaggctattactgttccattttattctctggcccagaaaataaatcagaagacttctacatccttttcctcaaaagctgattctgattctctatatgatgccacattaataaagttttccctattaattaccatgatgccatgcagccttctaagatgttttctttagttcttagttcctttgcagttccatctccaagcataaattctcattaataatcagtacagtgaggaagatagacatgtgtcagtcagtgagaatgcttgcagctgtaactgccagaaagttgtaacttaactggcttaaaccaaagccatcctgaggtgggaggctccaagtcactcagtgacattatcaaaggcggcctgagtctttttcatctttctcttctgccagcctcaagtgttggtgagttttctggtttgttcctgtaaactcgagatgtctgtcacaggtccamctattacatgcagataactatggccagtcagaaaagaggatcttctttttacgtcttcttttaagaaagaaaaaaaatcatttccagatggtctccccttgtcccacttcccttcaatgtcttattggccaaaatggtttcacatgccgatgtcttaacaaatcactgccttggaaatcgtactttcatgattagctgagacaatcaggtttccctcatggtggctggggctgaggcccacctccctgtaagtatgtggctgcaagggtaggtggatatttgaatttcactgggggcctagtaggaaggaatggctcttgggtaggctacccatagagtcaactacaagtaaatcagaaactatagtatcataagtgctacagggaaacatgtaaatgcaggatgctgtaggaacacgcaagaagggcccctggccatgcttgcttgagcaagagggagagaggaatgccagagtgggcttttaatgaaaatgttatctgatctgagatataaagctcaagaggagatagccaaggaaagggtggtggaaggagagagagggtatcaggtagacacagtatcatgtgcaaatgactgggaataagataaaatgtggtaggtttggggagatgcagaaaaattagttggcctaaggtatagagcataagttggggagtcagtcagaaatagggctatagaggtaaactgtagatcataaaagatctgataagtcacatagaaatttctactttattctgctgcagtggggagccagtgaaatattttaagcagcaaatgacataattaaatatgcacttcaaaaaaaaaatgtctttggctgctgtgggaaattggattgcaaatcttcaagaccaaaagtaggtagaacatgtgagaatcaattacaatattccaggaaagagtggtgaagggctttaagataatgtcagtggggctggagagaggtgaataggtttgattgatgtttaggggttttgactaaacaggacttggttaataggtaagagaaatagggattaataatcactcacatttctggcttggacaactaggaggatgggaatgacatttactgagttaggatatccaaagaagaagcagactgggggcaaggggagtgaattaatttaaattgtaactaatgaagggcttattctgtatgaaattcaagagaagtattccagtccttaaagcattttcaaatgccaagggatatattaaccaataagtggtatagaacaatactaggggtactataatttatcacagatggtcatcaataaagcaagagagagagataaaagagcttaaagaagaaattgcctctctctcagaaagaattagtgggagaatctgatgttcttcatgaaagaaaaaaattttagttgaatcttgcataaaaagattagacagatgggaattgtcgagggtggaggcactgtacactacatgaagcatatttaaggaatgataacagtctagattgctagcaagcttgaataggcaaaataaaatagaaaggttagggaytagttgaattagtcagaactgttgagattccaagagaaaaacaaaattcacattttctgtgttgatctattattgcaaggtgcattagtcagctattgctacagtaatgctaccgaacaatcaactacaaaataccaatgacatttgcttcttgctcatagtcctactaatgggtcagaatagtgctgcttcaggctgcaggttgccttcatgcttgttcttcatgtttctccttcttggaccartgatctcccagggcgtgtccttgtggcacagtttacaactcccaatgtggcaagtagaaatgttcaatactttgtaaggcctcagtttataaagcagtatcatttgtgcccacattctgttagccacagcacataatrtgactaaacccaatatcactgagggaggagagcatgaggaagaaaaggatggtgaatatatgctgcaatgcctaaaacataatgtaaatatagatagcattggatttgacccataagccataaagattytagaataccagtgttcccaactatggagtgcccaatgagcttcttgacaaactcaggagagtaacctccatttgtgtgacctcctttctttgctctttatttgtgcttttcaaagggatgacatgagcccataaactactcattgggttgcttggtcagaatcagaaccagttacttcaggactgtctcatttcatgattagttgcctttggtctcatgcagtggtatcagttcattcctctagaggtttatgttccctcaatcaccagcaatactgagtgaatgataagaactaaagcaataaaaaatgattgaactattttccttagtatgtagttattggacttcttccaaaaatccagcacacttataaaaaccaaactaaggcattttgctggttattgtgccaatagtgtgtcttaattagtcctgagaatttatgtggcccatgaaagaggcataattttcctaagattgcacagctaagttacatatctgagacttgaagacatcctcagattatgttatccctaaatctctaattgctwtgtagcaaaagattttagccatttttttattcctgaatcaaggatacataaataaagttgtattcaatcaatccaaaaatcctcaagcccaaataatcctagtacttgagcagaccttatagtgtgtgtgcacaagtgcgcatgcgtgtactctatttttagattatcttttaagagggaccggtgacatggtcatacagtacaacagaagaactcactccctgtttctctataattcccatattacactcagcacttgctctcctttcattctgtggcttctgtgctgctagcagtgaccagtgactcaggaaggctgcatatagtgaagaaaaagttgcctttccaggcacagttcagtcctgaggcgccttttcacaccatctcatagacatttcagagccaaactctagctttctttttatgactacttttccattccacacttttcttaatgttgcaggagataatttgaaagaaaggaaaaaagaacagggagaacacaaaggcaagaagatgagcaagatgccagatttaagaagtatatttatatttagttctttacaaattaaattctgctgagacccttaaatattagctgtcacaggggttgtgcttgaaaaacttgattccaaccctaagcataaaaatcttgtctaggcagggcagtagattggaggattatcattacacattataggaggaaggccctgttcaatgccaggttccaagaatgccatctcagggagcgagggaaagacataggccaggtaacatgtctgatgtatggagaaaagccctcagggtgccatgttggtggaacaggagcagaaaggaaatcagactgagagaatgaaaactcaatagaagcacaataaacagactgaacaaagtacagatggagtcagttcaagtttaatatgaatgtccctgggccctgtgtttcatcccagtgttaagtgcaggaaatcattggatttctccaaggatgggtctttagagcaaccgactttagaaattgaatactttaaaattattttctataaacaaatttatcaatagaaaaaatagattacttaattggtttatcttaatgagaaaacaacaaaaagcttcaacaaataattgttgctgattggttggtgggttcgttggtgaataatgagaaggaaagaaggaagaaaagaaaagaaggagtagaggaggaaaggaggtgagagagggagatttgaaagggaaatagcggtgctctaagttcacaatttttaaaagcctagagttattaacaaattatgccctcaatcagattttatataacttttttcaatcttgtcatatattaatgtgctgtattcatgaaatgattttgagattttaaagcaatgattgacaatatagtagttcatttaaagtttttacaagttgctgctgacaaaatatgggtaatgaattacatcaaataagtataaatataagtacacgctttgaagttaaaactcagtaagttgttatgattaaaattgttcactttattttcctcctgtgtatgggtttctcataaatggtaacttatacctatgaaaatacagggttctataaagtctgaaaacatagttattatatatcttaacrgaccgaagatgtccttcctgatattatgtatagcctgtgtttccagactaagtgccaggcactattctaagttaggcacgattctaagtgttttactgttcatttaggctgtctggctagtgtttttctcaccttatcagcatcccatttttattaagtgaatttgcctaaacacacctgcacacgcacatgcatgcgcgtgcacacacacacactttttgcatttggaagcctggctattatggaactctagaacatgagagctcagggtcaaccaccaagactcaataaggtatggctggggatgtgaccaagactatcctagcatctatggctgtggactgggtgtcttctccactgacccttgaaggtagttttgcttcactgctttagaaatggtgcagagacttaatcttatttcacttttcggtgtttgtcttggttcctgtagaactggcttgaggcttagaagatgtcctcccacctgcatttggaaaaatacatttctaacacttctcctcatatggaaatttttaagtcattgaaaaactcatactgcagcatttgtagaaacaatttcagaacagagtaccttattgcttttcctaaaagaattttaactgtgcatgtataagtattataaatgcataaaatatatagttaatccaaaagacataactatatcatgcatagtagttataggtcacctcagatatattagtaacatctttttatagagactctgttgttatttcactcacacaaaagaataaacacagaattaaggttgaaatttacataagaccagtctaaagccagccatagctatgtaatttccatgattttctcccaatcaatggaaaattactgtcagctgagccaaagtctgcagactgtgagcaaatgtctgtttccttcccacaactgagtgtttgaaacttttttcaatcagtaaaattaccattaaaggtcagagattagtttttcatgcatgatggattccatttgctttaaaagtattataccaggagagtagactttttttctgactttagaatcaaattagaattcaaatattcagagttttgggtcaacctcaaactattttattttgtttattttcccttgacaaaatgttattgttttaaatagggaaggagaaaggtcttgggaaaacacacacacacacacacacacacacacacacacatatatatgtactctctcatatttgaaattagcatgtagtttaaggatactgcacacagctctatgatgagcttaacttgaatctccttagattatgagcattttgaaagcagggacttgattttttaactaaatacctttcatgtttgataacctgttccttttcctgtgtgtattgtcttaactaaagactgcctgcaatgaacagaagggctatggtcttttttttattaagataaaagaattttccaaatcgttgtttataaaataaaagattagaaaaattcacctgtgtataaattgaactagacttctataacatagcagccatcttgtgcagaaaggggctgcttacgtagtttatttctttaacacacagttgctaattacaaaaacagcatgcatccagagattgtgaaaaaagaagttaaaaaaaatcttgcctattattctaccaccgtaacacaattatgtttaacatttttcatatttttaatttattttctctttccataaattctaatctgtctataaatgtactattgtggtctgcttcgttgactaacagaatattttcacccctttcagaaccctttttttaaaaaatggcttcttttgtgtatttgaaacaatttcaacttaaccctattgcatatattctgtaagtagctgtccttcatgaaacagacaactttttcttttaaaaatcaaggagattgtacagaactttgtgattttaattactgcatggcaaactaattcagtctcatatcctttccatttaatagggatttgtccctagctatgtgacctaagcaagctctttaactgtactccacctcaatttgcttatctgtaaaacatggataatattatttttagtctaaaacttcctctggtatgacagaaaagaccaatgtgaaacaattccctgaatttgtcaataaaccatgttacatttataaaaatgcctccagtgtacccagaccagaggaatctgtggcttatactaaaacgtgtattatgtattcattctcaaggtatatgccaacagttaagttagaaatccatccctttctctgtcacttgtccaaagtcaattactccatgcttcttttacataaggaaaactatcttaaaaggaggaagtaagatcacggacaaacaaaagttcataaggtctttcattttactgcctttcaaaaggttaagatcagagaacttagacatgcataagctttggtttgaggaacaattgagtcaaccatcgtaacagagggcctgaaagtatctgaaggtagaatgaatagtttatagtaagccagtcyactctcagctctgagaacatccagctgcataacctcaagggaactgcgtggaaaaaattaagggaaattctttgggctttagagcttttcatttcctatgaacaaggcatctcctgcccttgtctcacccatatctccattgtcctcatgtagtcttctgctggttcactgtgtgcctggcaagtcaggttcttacgcgagggaaagagctgttttaagttgtttatgaatagagaaagcagattcagtcagacgtaatctgactctgtatgcctgcaggggttgtggcctttgttagtttattatgcctgtaatttgggaagtcatgctgcagagatgtaaagtgggatgggcctgaaataggtcttgtaataaaaaggcagttagggaagcctgctggtgtcctgcctggttactactatctaagtgcagcaatgtgttagttgattttaataaagagttgaaatcattgttaactggcctccctcccactgagtgaagaaggcagattacacaggcacacgtttrcctcccctagtgtgtactatgaatgcagctgcttctgaagggccagcacgtggccttcttaaaactttccttggctggggttttcccttcttgccaactggtgcccaccaagccagtggatgctctcaacgtctaggcaaatgccaaaaatgtcatctttggctcagatgtgcactggcctgttagagacaactgccatgcagagaaggaatgtcatcagctgctaggtctcaaattatcagcctggattgacagctgcaggatgtagtgcctgcctatagtactgaggccatgacccacctctggagagaccacagcctcatccctagagtagaactggaaattctccattgagacaggaaggcagcacttgaacctggcaggttttggagtgaagtrtctaaggacagaatttctcatttctccacctctgcccatgtgtaaggcagcaatattttcatagaggtgaagaaggcaggtgtcccgtggttattatgacatctgtttacctcattctagtcactgtgccatgtttcacagccattgtcaactacatttggtgaaaactgtttcctccgtccacaactggaacattgacactaaccacattctagagttcattacatagagctgtgtctrtgggtaagttaacaggtagttttaaataactagatatagtcttttcctcttccatgtaagccaagataatatttccacttctccttctgaacatgtgagtacagwttatatataaatcaacagcaagatggaaatttactctgagctttgtgatgttttcactttaagatgctgtagttctgatcctttatacatttatttcattttccccatctcaaccccagtatatagcaacactcacctgctctagaacatgattatcaactgtttcagctatcaatgtaacattaaaaaaaaagttctatgttcaaagactaaaggaacccaggtagtttcttttaaacagaaagactagttttcatgatcataaacatgtaaagaaatatgtcatttttgaaatttcatgaatcttatgtctataccgattccaattccaaactcagactggcaatctgcctttattattgcaaagccccrtagcttgttatcttcatgtacctcttgatcaagtatttaagtgaaataaagagtctaaatgttacgggaggtgagtccaggcagggtctacggccctcagtttttgtcttcctggaagaaaaaaattcagctgagagacagatgtagatttcagacagaagcaaaagtttattgaagcaaagtacatttggaagggaccaagtgggcaactggaaagattgagtgtcccgcctgattattggctcaggactcttataaagttactatttcctgattcttcctgatctcctcccatcatacttccttttgggccagctgttggctaatcgccgcgtgctcagtgacttgccagtaatctgggaggggctgcatgcgccatttggtggttgtagttatgcacatgtactctttgggcaattttcctttactggtctagtgcccccagaggaaggtcatataccagtcaaactttgccattttgccccttactgtgcatgcytgctcaattcctagggttttatcgcaaagttgttgcctacaagcttaagatgtttcctgttaggaaatttccccctccctggtgccagccatgaccatctatcattcctgaagaggccacctgacagtcacaatgacagtcatttgactgtctcctgacattccttggggccctatcctgccctgctcatatycacctatctacctaccctaacatattcccccctcaagagtgtgagactcaattatttggggctagtggatgaaggtcagtcctctgtggctgcttcctgctgaaataagggctgtatttgtcctctgggtctcaatctcttgctaattgtcagaacagaatggtcccatcggtaggtagaattggtgtccagccaggtccaggggaaacaggtgtatgttttcttcacatttgggtagggaggtagatattcctgtattgcagaatttctgctcctcagttcagctaaatccaggttctgtgtcacgaccaggaaaagttaggcatgcagacacgtggaagggtgaggggaatggaatttattatttattgggcgaaaaggaaaacaagaaaagaaaaactttcagcaaagtgagaggggtttctgccagcaggctcccatctcacagattggattccaagcccccacacacgagctaaagttcccaggctctttccccccaacaaggcatgaacttcctggtagctttaccccatcgtcgcagtgcacaggcgggcgggagattctccagggatcctccctcttatctgcctcctgcatctatcacctgcattattgggaacttggtttgaaattgttatatcctggagaagacaaatttatctagtaggttaaaaggcaggggccaaaaagaagtagacgtatggagacagctggttcgagcaggggaggaaccatgtgagcaatgggagagcagattttacagagttccagatggaatctgctgagggattttctttcccagagtcatgaagccacttagcgtggtcacagattctctttatatgttcctctacttgcccactattgttgacacaagtgcaatagggtttattgatgacagcacagacgactctgttctgcaaggaggtaatctagagctagtctgttgtccatgactgcattagctactgaattcagtgaagccttgagtttagagattctgttcccagttctctgacctaggtctccaatttgtgtagagaggttttggagggtgactttatgataactgaatcctctgtatggggcagctaatcctatggcagcccctagccctaccattataaggccaagagctctccttttttaagaatttgtaatgttatagatggttacacctgttccttgtggccccaggagtcctagggcacatcccctgtatgttgggtgttatctatgcagataaaaaggtttacaagtgagggggttgaataagttcttttagaacttccctcacagggcagtttattttgtttaggtccatataaaaatacatagcctggaggggtgtaggcccactcgggaatgttggttttgaaccaagtgtaagcataagcaatcccaccatgaataagatccagagtactggggctaccttatgctgagctagcattagtttgaaagaaaagaaggcattacttataatttcattgaaagagatattatagatcttccaatgactcacaggaatactcaggtgctggtcctattgttgattgttcagaagcctctcaaggttttatttaggaatgatgtatccaactagaggtgccaggaactttgatagctgttgcagtggaaaggaaaacagtaaaagggcctttccatgaggggattagttgagattttgtagatccatcactttaggtkttaataaggacctgggtgggtacacaagttggttgttagagggtctggagccagcagtactctctgtatatatatttggttctaggtatgaaattctctgtcttggatttggatactttgtaccttacattttgctaggaagkttaaggtttgtactgcatattgttgtgcaagctttatggagggggagcagatgagtaagccatctacatacagcagaagttgtccccactcaagatatagcttggttagatttctttgctgggtcttgtccaaataagtgtggggcatctctaaaaccctgaggtaggactgctggctttcctgggagaaactgggatattagggggaaatatcagtccagatgttgggtaaatattaagtggatacccattttggaaagtatattcctactcaaaagcagtgtgaggcatttagacattgccagggactagtgggagaatagtaattagtcccataagcaatataaataaaggggatgtgaatctttagaggaaggggttgctacttgctcctgttacccaacagaatttgggggtaagttgcctagagaaaaaggttagcacaaagtaggcagttcttgtatttaaaaggatatttatagcactacctgtcatttccagagtttcccttggctctgttcctttaatgatgatgtctgatttggaagctggccagagtggagggccccttcagctcaaggccattattggatgggggttcaactgggggaccttttggatcccagggcagyccctcttccagtgggacttatctccagcttatcacaaagagggcaggctgtgtggggcttcctcccatttggcccatttggaaaattccttctccagtagcctggtcttctgcatcagtggcagttacctggaggagggtccttaggagaccctggagggggctggtgggcttgtaaagcagccaatagttgagcctgcatcttgtccctgcatttctccttttccttagccctgtcctccttgtccagatctcagttataaaagactgaggaggctaatttgaggatttgtggcataggggcactgggttctaaggctgacttttgtaaattttcctaatgtctggagcagcttgggtaaattgtcctttaggactagtccctcaggagattctgggtttaagtttggtgtgcttaataagtttcctgtagacttttcagaaaggctataggatttccatttggcccctggtttatggtggctaattattgtagtttagaggcttgatcttacttcattttattacctctattagacacaagagcctatggttcctggcccatattcccgctttggcattgtagtcctgattggggtccagctggggaacagctgtagcccctccagggtagttggcattttccaggtgtaagtcatttcgacagtggattgctgctccgcagatggtctgtctttcctcttgtaaaagggcttgtcccaggagtacatttatgtccttccaaattaatctaaatgtaagagccaatttggggaagccctctatgagccttttggggtcatctgagaacttttttaggtttttcctaagttgtcaaaagtcgtacatggaaaaggggatctggacctggacgagttcagttggctcacttacctcctacaagcttggagaggagaactaaggagcccggtgtaaagtggggccaattccaaaggtctgggagtgggataaatagggggaggatccaggggtggctgtttctccctctttcacctccaaaggaggaggtagtttttccttttggcttctggagraagaaatgttggagaggaatcagcagaggagtctccagggccgatgcagggccctggaggagatggctaagcatagctaggatgtgaggtttgccttacaagctttacgaggattagggtcttccctttaggccataaaggtttgtaaataggggacctctggctttttgccctgataatggcagaaaaggtctagccggagaatggtattaaaatttgtacttccattctctagccagacttcctctgcaatgaaaaattagttttttcattttagggtttggtggttggatttatcgcagattttaaggatgcatccaaggggtcagtcccagagtatggagacaccgttatctatctgcaagacagaacagggaagagtaaggaagaggaaagagtcccttcttcttcatcttttttctttttctgtttttttttttttttttttttttttttgagacagagtctctctctgttgctcagctggagtgcagtggtgcaatctcagctcattgcaacctctacttcctgggttcaagtgakgcttgtgcctcagccttccgaggagctgggactacagatgcataccaccaagcccagctaatttttgtatttttagtagagacggggttttgtcctgaactcaggtgatccacccgccttggcctcataaagtgctggaattataagcatgagccaccacgcccagctgaaagcattccttcctgatccccttataccttggatcagagtagtgagtagggcatcccccattcatcctggagttctggaataaaccagtgattaccaggtaccactaaccctggtcccacatttccctccaggaccagccttcatctctctgctaatggtaatctgtcctgcacctgtggcctctggctgacctgtacctttgacactgtgatcttacagtgacctttgtttggagcattccagcaatgaaatggttttcctttctctcaaattcccattctccatatccctttaggtaggtgaggatcttatccctagccagcagctgtaagggaactgggccttcctttctctggacatagcactgkaggtcccagtatatgttaagaatgtagatggtcagaggaacagaggaaaacctgcatctgagtccccttgtcatccctcctgtggattcctggggaagcatggaaaacaagtatttaaaatgacaggacaatccatctgccacccgtgggaatggtagaaaataagggatattcatggaaggctgcttttgtrcagtctcacaaasagcagcccttagacctaagaggacattgcctatcagtcttctcagtgtagaggaagaactgtcagggccagggagtttgggatgagagaccacaaaaggcagagaaagaattgtcctctccccaaagtgcagatagctctagaaaggaagtaggagttgctcttaatggaccacatacagatgccctatggagacaaacaaatgacctcaagagccactggaaaacctggtctcaatgtgtagcaggatttaaaaattcatgataggaaataaagaattggtggagacagagtcttcccaatattaagcagagaaagaagttgcatgatatgcagaatagaagcagggaagaggttgacttgcccccaagacagacagtgtggccagcatataaggccatctcaaagtccacagaaaaaaaggaagcataatagggtgtagacttattggggaaaagtccactttggttaaggaaatgaaggtctccagtctttgaatggcctaggctcaagccctatcacccttgtgagccacctgtccaaaagggccacagtgacttaggtctactcrgtacagastctgaagtcctccacctctgctgtcgcccaccaggatgaactgaggaatctgctagagggaagagtgaccaaagagaatttttctggagatgggctggtgagtgagacagcaagagaaagaagacctcacgtaagcagagttgggtgcctccagccaaagatggcaaggcacagagggtcttaccgagaagctgcaatctgattcatgacaccaaaatgttactggcagcgrgtttgggcaggatacacagtctttggttcttattgtctgagaagaaaaaatacatccaagagacagaagtagatttaagatggcagacaggaggcaggactagattgcagctctggacagagcagcatgtggaggctcgcattgtgaattatagctccagattgactgcaagaacaaaccagcaaccttgagaggacccacacaccctctgaaggaagcagactgctcttgcaggacctgggaaacaccccaaatactgtgagtaccccaactgtggaagtgggaaagggagaccctcctctcctgaacacacacccccactggagaagctgaaggtctgtttgcaagagaagtttctgactttacctggagctgagtcaatgtggagagctgagtgaaatacagaggcaaagaaagtagcagaaaggccctggaagctctctgagtcccctagcaggccatccatgcctggcatcacagggatccayccagagggcmgccagagccagaggtgcaaggggtaaaactctacagggagaagaaaatctctagctgaagtttgtaacaatttgaatggggtgagaagcctcctggccagaactcaggggagggcacacatctggcgtgcagactccacaggtggagtagaaccaatccctttcattcacagctgggaggtgggtagcctggggcagattttcaagctcatcttgccctccaactgaaaatggactcaggctgttagagggtgggagacacagtgagagtgagactagccatttggtttgggtttgcgtggaagcagagtgaggcctgtgactgctggctttcccccacttccctgacaacctgcatgactcagcagaggaagccataatcctcctaggtgcacaactccagtgacctgggaatctcacycccatcccccatagcagccctagcaagactcacccaaggagagtctgagctcagacacacctagccttgcccccacctgatggtccttccctatctaccctgggagtggaagacaaagggcatataatcttgggagttctagggttcctccccatactaccacagctgatgctctctggaaggcaacacctcctggcaggagaccarccagcacaaaaatagagcattaaaccacraaagctaagaacccccacagagcccattgcgccccccaacccctaccccctgcaccagaacaggcactggtaacctataaaggaaaatctgtgagattaacagcagatttctcagcagaaagcctacaagctagaagggactggggccctatcttcagcctcctcaaacaaaacaattatcagccaagaattttgtacccagtgaaattaagcatcatrtatgaaggaaagatacagtctttttcagaaaaacaaatgctgagaaaatttgccattaccaagccaccactacaagaactgctagaaggagctctaaatcttgaaacaaatcctggaaacacaacaaaacagaacctcttttttttttwaattattattattatactttaagttttagggtacatgtgccatgccggtgtgctgcacccattaactcgtcatttagcattaggtatatctcctaatgctatccctcccccttccccccaccccacaacagtccccagagtgtgatgttccccttcctgtgtccatgtgttctcattgttcaattcccacctatgagtgagaacatgcrgtgtttggttttttgttcttgcgatagtttactgagaatgatgatttccaatttcatccatgtccctacaaaggacatgaactcatcattttttatggctgcatagctttccatggtgtatatgtgccacattttcttaatccagtctatcattgttggacatttggattggttccaagtctttgctattgtgaatagtgccgcaataaacatacgtgtgcatgtgtctttatagcagcatgatttatagtcctttgggtatatacccggtaatgggatggctgggtcaaatggtatttctagttctagatccctgaggaatcgccacactgacttccacaatggttgaactagttgacagtcccaccaacagtgtaaaagtattcctatttctccacatcctctccagcacctgttgtttcctgacttttgaatgattgccattctaactgrtgtgagatggtatctcattgtggttttgatttgcatttctctgatggccagtgatggtgagcattttttcatgtgttttttggctgcataaatgtcttcttttgagaagtgtctgttcatatccttcgcccactttctgatggggttgtttgtttttttcttgtgaatttgtttgagttcattgtagattctggatgttagccctttgtcagatgagtaggttgcgaaaattttctcccattttgtaggttgcctgttcactctgatggtagtttcttttgctgtgcagaagctctttagtttaattagatcccatttatcaattttggcttttgttgccattgcttttggtgttttagacgtgaagtccttgcccatgcctgtgtcctgaatggtaatgcctrggttttctyctagggtttttatggttttaggtctaacatgtaagtctttaatccatcttgaattaatttttgtataaggtgtaaggaagggatccagtttcagctttctaaatatggctagccagttttcccagaaccgtttattaaatagggaatcctttccccattgcttgtttttctcaggtttgtcaaagatcagatagttgtagatatgcggcattatttctgagggctctgttctgttccattgatctatatctctgttttggtaccagtaccatgctgttttggttactgtagccttgtagtatagtttgaagtcaggtagcgtgatgcctccagctttgttcttttggcttaggtttgacttggtgatgcaggctcttttttggttccatatgaactttaaagtagttttttccaattctgtgaagaaagtcatgggtagcttgatggggatggcattgaatctttaaattaccttgggcaatayggccattttcacgatattgattcttcctacccatgagcatggaatgttcttccatttgtttgtatcctcttttatttcattgagcagtggtttgcagttctccttgaagaagtccttcatgtygcttgtaagttggattcataggtattttattctctttgaagcaattgtgaatgggagtttactgatgatttggctctctgtttgtctgttattggtgtataagaatgcttgtgatttttgcacagaacctctttaaagcgtaaatcacaaaggacctgtaaaacaaaaatacaagctaaaaagcgaaaacaaaacaaaacaaaagtatacaggcaacaaagagcatgatgaatgcaatggtacctcacatttcgatactgacattgaatgtaaatggcctaaatgctccacttaaaagatgcagaactgcagaatggataagaactcaccaaccaactatctgctgccttcaggagactcacctaacacataaggaccaacataaacttaaagtaaaggggtggaaaagactttccatgcaaatggacaccaaaagccagcagaggtagctattcttgtgtcacacaaaacaaactttaaagcaatagcagttaaaagagacaaagagggatattatataatggtaaaaggccttctccaacaggaatatgtcacaatgctaaacatatattcacttaacaatggagcccccaaatttataaaacaattactaacagacctaagaaatgagatagacagcaacacaacaatagtgggggacttcagtacttcactgacagcactagacaggtcatcaagacaaaaagtcaacaaagaaacaatggatttaaactgtaccttggaacaaatggacttaacagatatatacagaacaactgcaaaatatacattctattcaacagtgcatggaactttctccaagatagaccatatgataggccataaaatgagccttagtgaatttaagaaaattgaattatatcaagcactctgtcagaccacagtggaataaaactggaaatcaactccaaatggaatcttcaaaaccatgcaaatacatggaaattaaataacctgctcctgaatgagcattgtgtcaaaaatgaaatcaagatggaaattatacaattatttgaactgaacaacaataatgacacaacttatcaaaacctctgggatacagcaaaggtggtgctaagaggaaagttcatagccctaaatgcctacatcaaaaagactgaaagagcamaaaagacamtctacagtcacacctcagggatctagaaacaagaacaaaccaaacccaaacccagcagaagaaaggaaataatcaagatcagagcagaactaaatgaaattgaaacaamaaaaaaccatacaaaaaaawaaataaataaatgaaacaaaacctggttctttgagaaaataaataaaattgatagaccattagcaagattaaccaagaaaagaagagagaaaatccaaataacttcactaagaaatgaaacaggagatattacaactgacaccactgaaatacaaaagatattcaaggctactatgaacacctttatgcacataaactagaaaacctagaagagatggataaattcctggaaaaatacaacactcctagcttaaatcaggaagaattagatacactgaacagatcaataacaagcagagagattgaaatggtacttaaaaaattatcaacaaaaagaagtccaagaccmgacagattcacagcagcattctaccagacattcaaagaattggtaccaatccttttgacactattccacaagatagagaaagaaggaaccttccctaattcgttctatgaagccagcatcaccctagtaccaaaaccaggaaaggacataaccaaaaaagaaaactacagatcaatatccttgataaacatagatggtaaaatccttaacaaaatactagctgactgaatccaacaacatatcaaaaagataatccaccatgatcaagtgggtttcataccaggggtgcagagatggtttaatgyacacaagtcaataaatgtgatacaccacatraacagaattaaaaacaaaaattccatgatcatctcaatagatgcagaaaaagcattcaacaaaatccagcatccctttatgattaaagctctcagcaaaatcagcatacaagggacatacattaatgtaataaaaactatctatgacaaacccacagccaacgtaatactgaatggggaaaagttgaaagaattccctctgagaactggaacaagacaatgatgcccactctcaccactcttcttcaacatagtaatggaagtcctagcaagagcaatcagacaagagggagaaataaagggcatccaaatcggtaaagaggaagtcaaactgtcactgtttgctgatgatatgattrtttaccttgaaaactctaagaactcctccagcaagctcctagaactgataaatgaattcaagaaagtttctggatacaagattaatgtacacaaatcagtagctcttctatataccaacagtgaccaaggggagaatcaaatcaagaactcaacccattttacaatagctgtaaaaaaaataaaataaaatacttaagaatatacctaacaaaggagtcgagagacttctacaaggaaaactacaaaacactgctgaaaggaatcatagacaatacaaacaaatgggaacacatcccgtgatcatggatgggtagaatcaatattgtgaaaatgcccatactgccaaaagcaacctacaaattcaacacaatccccatcaaaataacaccatcattcttcacagaattagaaaaaacaattctaaaactcagatggaaccaaaaaagagcctgcatagccaaagcaagaccaagcaaaaagtacaaatctggaggcatcacactacctgatttcaaattatactataaggccatagtcaccaaaatggcatggtactggtataaaaatagacatatagaccaatggaacagaatagagaacccggagataaacccaaatacttacagccaactgatcttcaacaaagcaaacaaaaacataaagtggggaaaaggataaccttttcaacaaatggtgctgagataattggctagccacacataggagaatgaaactagatcctatctctcaccgtatacaaaaatcaactcaagatggattaagggcttaaacctaagacstgaaactatgaaattttagaagataactttggaaaaacccttctagacattggcttaggcaaggatttcatgaccaagaacccaaaagcaaatgcaataaaaacaaagataaatagctgggacctcattaaactttacgagcttttgcagggcaaaaggaacagtcagcagagtaaacagacaacccacagagtgggagaaaaatcttcacaatctatacctctgacaaagggtagtatccagaatctacaasgaccccaaacaaatcagtaagaaaaaaacaaacaatcccatcaaaaagtaggctaagggcatgagtaggcaattcacaaaagaagatatacaaatggcaagcaaacatatgaaaaaatgctcaacatcactaatgatcaaggaaatgcaaatcaaaaacacaaaatgtgataccaccktacttctgcaagaatggccataataaaaaaattttaaaaaacagtagatkttggcatggaaggrgtgatcaggaaacacttctacactgctggtgggaatgcaaactagtacagccattatgggaaacagtgtggggattccttaaagaactaaaagtagaactaccacttgatccagcagtcccactactaggtatctacccagaggaaaagaagtcattatttgaaaaagacacttgtacacgtatgtttatagcagcacaattcacaattgcaaaactgtggaactaacccaaatgtccatcagtcaataagtggataaagaaactgtggtgtacagatatatatacaatgaaatactacacagctatgaaaaggaatgaattaacagcatttgcagtgacctggatgagattggagactattattctaagtgaagtaactcaggaatagaaaagcaaacatcatatgttctcactgatatgtgggatctaagctatgaggacacaaagatataagaatgatacaatggactttggggacttggggggaagagtgggaggggggtgagggataaaagattacaaatatggtgcagtgtatactgcttgggtgatgggtgcaccaaaatctcacaaatcaccactaaagaacttacttatataactaaatataccacctgtaccctaataacttatggaaaaaaattttataaaaagtaatagatttaagtcagaagtttattgaagcaaagtaaagtacattcggaagggaccaagtggaaaatttaaaagattgagtgccccgcttgatcattggttcaaggcttttatagagttactgtatcctgattcttcctgatctcctcccctcatccttcttrggggaactgttggctaatccttgcatgcgcagtaacttgctaatatctgtcaggggctgcatgtgccgtttggtggctgaagttgtgtgtatgctctccatgacaatttttcgttactggtctagtgcccccaaaggaaggtcayatatcaggcaaactctgacgttttgccccttcttgagcatgcctggacatatccccgaaggaaggccaaactccgccattttgccccttactgcagatgcctggtcatgtttgcttagttcctgggatcttatgaggaagttgttgctcataagctcaagatgtttcctgtttgggaggaaattttccccttcttggtgccagccatgaccatctgtcattcccaaggaggcccctgacaattgcatgacagtcacctgactgttgcctgacattccttggggcactctcctaccctgctcatatctgcctatctgcctaagtaacatgaagacattttaaaccttctcagtggttctcccatttcttctctctctctctcccccactttcccttcaaaccacctcaaaactcctttctatttctactcagcaaaatggagattaaaacctcactaaaatgtgtctttgcccacccctgccttcccatttcacagcgcacttctttcttcaaacagatttagatttacagaggaaaaaaggcagaaattctctttaccggcttcagacacttaaagaaaatctgtccttttcatctctacacgttaaaatatttgctataataagtgtagattcaagagccatttggacatatctggcttttaaatagtgttgactaatgaccaacttaacttagatctttgaatctatgtgtggtgttatgatatatattagttttcatctgaggtctagctcataactcccacagcccttgttacagtcttttgttataatgttgggtgtgttaggcctcaggggcaggcccctgaccttctccttctctcctttcacctgttcctgcctttctgattgtggcttttaagaccttccccagagagagtactgccctataccctgggggaaggaatgctgatgtcatgaagcctccataaaatcccagaaggacagggttcagtgagcttccacatagctgaacacttggactttcatggaggttggcacagccaggtaaggcatggaagctccacaccccttcccccatacctcaccctatatgcatctcttaatcggtaacatttgcaatatcctttataataaactagcaaacataagtaagtgttcccctgggttctgtgagccactccagcaaattaattgaacccaaagagaggattatgagtatgccaacttggaggtggccggttagaagctccagaggcccacacttgtgactggtgtggtggggggcagtcttgggaactgaaccttcaaccggtgggatctgacattatctccaggtagacagcgttggaactgaattacaggacacccagctagtgtyggctgcttggtgtgggggggaaacctcacatgtttgttcgtagaaggcttcatctgtgttgatgatttttgtggtgtgagagtagaggaaaaatgccatcagggagagttttctctacaccctatagctcctagatgctttttatttaagacattcaaaccttgtgaaaaacaaacaaacacaaaaatctttttatttaagacggtcaaaccttgttcaaaacagcacagacattaactcggaatttaggatttattattgattaattgacattatcttcagtctgttcatattattaagtgatataagtcaggtacacacacacatgtatggggagtgtgtgggagtgtctgcatgaagtatactgtcagaaaatatactcatttcaaagaaacactgatttaggccctggcaaataaggaaacatttctatttcttctagaaataacacattcatttgccaacatctgatctatccatatgacctcttaatacacacatgaaataataaagtgtatttttcattcatttaataagcatgtgattcacgtgacactgtaagccttttttttttttttttttttttttttgagacagaccctttttctgtcgcccaggctggagtgcagtggtrtgatctctgctcactgcaacctccacctcctgagttcaagcgattctcctgcctcagcctcccaagtagccgggactacaggcacgggacaccacgcctggctaatttttttgtattttttgtagagacagggtttcgccatgttggccagactggtctgaaactcctgacctcaggtgatctgcccacctcggcctcccaaagtgctgggattaaaggcgtgagccactgcgcctgggcgagcatttttttttattccagtgtttctcgttaatctaccccatggcrttttatttcaggttgtatgtatgccagagatgaaaaaaggcaaatgacagaagagcaagtatatggagaaagataggagggacttgagaaaacttggcaatttactaaaatgaaatggcattgtttccatatttaccaaaaacagacaaacaaacctaatcattcctctcattttgatcagctttcatgtatattttctaggcctaatcaaaatcttctttggtgtcacaaaataatggaagagacatgtattggtttaggctcctgcagcagtagaccccaatataaggaatattagttgtttatttaggaaattcaagaaacmtaagtaaaggagtagggaagtgagacaggaaatggaaggatctctgaaaaaatacacatcatcaagtccgttcccacagagggaaacaggagctcagtccccattgytgggttctggaagacagtgtggaacagaccccagagttatcccaactgtgagatgaggaagctggggtgcttttcaccaactcttcatccatcacctgcttccgggggtcattaacaatccaccactcccaggttatttatgctcaggccaggcatgtaactgcagccagaaaatagcccttgccaagactcacaggaattaaaaaccttcaggcaaggagctactggtctttgtaataataagctttgagaggcgggtattcagaggctatgggcaccaataacttcccttatgtgagtcataaacacaaagttaattttgtttgcatgtgtatacaagtattttgaatgaatgcttctctttgttttgtgtgtttggaaaatttaaacmaaattattattgtttttgtattggtatttaaacatctgaatatgtaacatcaaagatgatattaaaaagtataaagcaaattatcacaaaatcagatgtgcagttacatgtttacttgaaattctctctagactacatttgaaataggagcttccatagggggaaatttaaattttttttacaagttgtttaattataatgtgctttaaaaacactttagcatatcataaaccttcaaaacaaaatgagtaatcatcttctgagatccatagaaaatgtttcttaaatgtcactttcaattaccacttctggagctaacttgcaaaacaattgtgtttccaccaactgaaatatgttttcaccaaatttaagataatctgtggtcagtgtgagctttgtcttgatttaggaggaggaaagcaaagttccatttatgaatactttgaaaattttcagaaattctcctaaattgtttcagcaaccaggccaaaagagaggcctggaatcccaaggtgagaggaaactttaaaagttacacttatggccaggcacggtggctcacaccgtaattccagcactttgggagactgaaatgggtggatcacttgaggccaggagttcaggaccagcctggtcaayatggtgaaaccccatctctactaaaaatacaaaaattagcctggtgtggtggtgcatacctgtaatcccagccacttggcaggctgagacatgagaatcacttgcacccaggagacagaggctgcagtgagtgagatcatcccactgcactccaacctagacaacagagtgacactctgtctcaaaaaaaaaaaaaaaaaaaaagtttcacttgtgccttggggttggctgcctgctatcatatttttgttgtgttcttctaccccaagctccagtacctcccctcacagaaatcacctctcctaccaaccccaagggaacccattccatttttattagagagttcttctttacatggcctcaagtcttttcatcaagatttactgatagaataacagtaaatccacattactccaggtgtctctttgcccttacctagcctttgtgtctatgccattcttctcaaggaaattgccttcctttatcagctttaaaagtccatatttgggatcccctctcctggaaacattctctgactatccagcccagataattttttttctctgctttctcattataacattcatgatctgtgtcattcattcattcattcatttgcccaatatttcttgagtgcttcctaagttcaggcactgttctaggtactggggacataggaggatagaagccagkcaaattttgcactcactgaaactttactttagtaggtaagaatctatagtttaaaaaaaaattcacatatgaggcctgtgaagcaaataaagcaataatgtggtggttttcatggacattatgtctttcactacccgtccctctttttgttgtaaactctctaaggcaagtataacctcatctatacattagtatttatttaccacaaggacccrtaagtatttmttgatatatcttcctaagtatgtgataatattctaaatagatagtagatttaatcattgggatttatgtgaagttggattaaatagataacatgataattacatttagtattgcatggaaggacacattttctcacttatagaagcctaaacaaatgtcacaatgttgatagattcctttataggatgttaactctgaagctgtcgtgaaaatgtgtgaactagtttcactttcaacttgatccttttggaatcatgacagattttgctagcccttaattcttctgcaatctttgttgatccctcctatttcaatctcataagacacttatctctcctccagaaagatctgaagggttaagtcacctatttatacctaattacagtgagccctgtgttggatttttaagggataaaaggaagtatcagatctcagttaacttatgtactgtctacagtgcctaacaatgacacaggatgactcagttaaggagaaaaatactccatttatcagcacagaattcttccctttaagctatcatatggyagctaaccttgcctaaccttgcgagtttaaccttgctttttacgtgcatgcacgcgtgtgtgtgtgtgtgtgtgtgtgtgttactaatttctaactgtaccagctcctgaattaatatttggcaacatcaatattccttgtataatgaagaagcatggtccaagagacttggatgtgacctctctaaacatcaacttacagctgcaaaataaggaataagttgtaattattccttatttgtaacaactaccttacagtgttgttttgaagattagaagagaatatatagatgaagtacccagtggacagtaggtattgaataaatgttagtttccttccaccttctctggcttatgtaacaaaattactcattctactagtcactcagactttagttaatcattagctaaagagtaacaatgcaggattttttttttaataaattggctaggattggttttatgcctggatggaataggcacttgccatttcatcacaattcaaaattcctcctgaaggcctgaaggcctgaaatgtttaccattggaaactaatcccactgtatggttactattatttattatatctattaacttataaaatattaaaatataaagtaaatattaccctactgatgcattagccactcaacataaatgagtttcttggagattaataaagcagtacatcagtatgtcccaaacaatggctaaaaggaaacctagtaaccaccccgaccccaaacttgttttgttaggccagtcagatttttttttttcattttgaattagcatcacgattgaaagtggaaagatctcacatataacttcacatttctctgtacaattgagaaacgttggctatgttggctctctgaatagcagctacctcctttcaaggtttgtatttacaatatttcccacccccatgagtccttattatcctgacactgaggacaaatatgagttgctgtccatcagcattccaaagctgtttttttttttgttttttttttcttacacttagcctacttcactccctaacaccaccagcctgatttctgagggggcctgaggtaggaggaggagaatggagagcactttctctgagagccgccattttaacagatcattaaagacacgatattcacatgacggttgcttactctctgatgaaaactacaaaaacagaatacacagggaaggtaatctgaaggtgatacctttttcctatgatccttggccttataaccactaatcaagcctgagggccgaagttcctgcctcatctctgcctgatgttacgaactaggcaggctagcagaggcaacaggcaacctgggcacctgaagagctacctggataacctagaagaacagtaggaggttaaagatgaggacaagtctatcaaaacaaaagcctgtcaagaccagaaagagaaagtcacacttttgactttacagtttgtgctgggctgacacaaaggcctcagttaacaccaaatacaacttccatagacttcaagtttccctcatatttttcctgggtcactattccagagttgagaaactgaactacatctaatattttrttaaaataaaattgaagattattagaaaagtttattagtcaatagtaaaacgttatttggttagctttcttaaacaatggcatttatagatatctgattatcccaacaaaaatcttcaaatggttcatggacgctttgtcaagcttttgtgccacctgagagaaaaaaagataaatggggaggtataatgttaattttgtagcctttgcttaatgtttatttttgaaatgcctatcattttctatcagtatctgaaactccatggatttctattagccttcaccaataattacatttgaaagcatccagaagagacaatccttaccacagtctcttttaaactcttaatggctgtcacaaaattctatttttcattttctctaagagcattctattaaactgttcctagttattagctttcataaaggcacacagaaaatgtttcctctacagccacaaatattcctaaagcagaatcatagtaaaacagctgtgataatgttttattcattccagaatcctaatgattgaacaaaagagagacagtcttaagagttaacatctattgagtccgtgactgcgtgcattgttctttcaagtattttacctgcactatttaatgtaattctcccagccactctgatttcactcattttacaattgaggagactgaggcatagaaaactaaagcaatttggctggagtaagggccaggttgggacttataccttggcggtctgcctacaaggtgttcctcaccaccatctgacactgctttctctgtgtagcccagagtgtcagcctcagtgcttcaacttgagctttcaggatctatttaaagatggaaaatatagttacattatgtcaccatttgagatgcagaaagacagggccaccattttgcacaattctgaaagcacaattcatgctgtggtttgtaaaaatggtactccctagagttgggcaatggacagctcacacagagatgcagtggccctgctaaactaatgccttacataaaagagttttactcttcattcccttaaatgattcttagtaacactggctgacacacacacaaaacagtttctaagtaggtctgtccgcatactatgatcactggtcaacattaagtttccacaattaattttacataatccaaagactgccaagcagtttatctgggtaaactaaacattctgtagtcatttattctgcttccagtcatgcccagcaacaggttgagaagacaaatgttctcagaaatgatctccaaggagttgggagcaggctgcttatacgtctaattcaccagaataggtgagcgtggtcgtggtgaccttttcatactgttgcagagctgagtatgaagagatgactcacagtcctccaatgcaacacaggtgaccctgcagccagattttgccttcagtggtatgtgactcccatggggtcaggagagtatctcagacattgaaatttgacctaatggcctacctacctgcacacgcaccctgcccacttacagaagggcaagaactctgcattactgaggccttgttattattatagttcctatttaggtaagaaygcaatggagaaaaaatgcatttggttattgggcctctgtttgaatatcctgtgctttttgccaaacaatrcattctacataatcttaaaaaacaaagtccatttcaaagaacaaaaataatgaccatatccactgagcaattgagcagaatggraatcggagttttaaactctgatatatctgttttccttagggctgaaatcttcttttcatggttctagtttctctaattgaaataagaacctaaccctgttcaaaactacatctctgggaatgagtgaaaaattaatgatcctcctattttgttggatcataataatgactctcatcctggtggggccaccagcaatgctattcttctcagactctatcttagttcctaagccactcaccaggtatttaaaagaatgatttaacacaactagaatcatttaaataactgtattttttaagaaagccatattattgctttagtttggtcattcatatatccaaaccttggactcatcatcttgcaatctcatgtgttcagttattccagagaaaacattaaggagaattgtattcttcttcccagctaaattttaggtcctcaaagctggcaaccacaatttatgctttctaaaaatcatctatgatactaagtatgagctggatcatgaataaaacccttgtaacaataaatgcttgatgacttacttcatctcattagcaagggaaggtaactcataattatcaaggtactacaggaaatagggcactatctggaaatgctaaatacatctccttgcatgaatcacttcttaccagaattccctttctttccagatcccacctccagggttctgtggtccataccaggcactacaktcctcaggggctacagcctatgagcgtctcatggggctatgaaaccatttgagacctggaaaatgaagtaattgaatacaaacagaaaactgcaaaatgaggactaacatttaattaaatgttcaaagcataagattatgtcgacttcaataattgtcaaatgagtattcttaacattttactaaattaaaaaaacttatgtgctgagttttttattttacaagtatctccaagtatgctggatgattgcaaagaaaatcaaggccagtcattggttaaatgagtttaatagtagccacataatttcaaaagcaaaattataaagacccttcccagactgttgatagcaaaaataatctrcgttgtggaaagtgggtccatgttaatatgttagatataagtagtgaggcctaaaaaggtattaaaacatctttgcttaaggtactacctatttgcaagattgttattttaaaaatagcttatgttttaaattgttattgctttttatcactctaataagaatttatagttgctgtaagataacaagaaaaaggttaactatctgcagagatgcctgagagtcagccagggagtaacttaaatcctgcaggaatctgactcactgaagactgtcaactgaatgaaggcttaaatttcatggtcttgggtgggagaactttttcatattctttccccatatggaataacaatctgccctgaaaacagggagtattttggcatgatctctttttgcttatttgccttccattttccataaagcaacttttgccaagcaccatacttaagactcaacttttttgcaaaaatatcagacaaagcactgtctttaagaacacagagaacacactagatcccttcttctgaaaatcactgttctatgttgtttgtggatatttttttagcattcactgcatgcctggaatgaataggctgtgtttctccccaaaagagcacaaattaatatacaaggtcaggttaaatagttaagtctgctttcctatcccttatacagaagctatccattcaaaaaaaaaaaaaaaaaacttytttttactttttttaatttttaattttggtgcatacatagtaggtgtatatrtttgtggaatacatacaracatacaatgcataataatcacatcatggtaaatgggtatgcatcacctcaagcatktatcctttttttatgttacaaacaatccaattttaccctataattgcttaaaaaacatacaataaattgttaactatagtcaccctgttgtactatcaaatattagctcttattgattctayctaattacatttttttatacccgctaagtatcccacccttccctccacgctaccctacctaacctccggaaactgtcttctgctctctatctccttcgtttgttttaatttttagctcccacaaaaagggagaacatgtgaagtttgtgtttctgtgagtaacttatttcacctaacataattatctccacttccatccgtattgttgcagatgacaggacctcattcttttttatggctaaatagtactacattatatatatgcaccatattttctttatctattygcctgttgatagaaatttagattgcttccaaatcctggctattgttaatagtgctgcaataaacatgggagtatagataactctttgatattttgactttctttcttttgggtatgtacttagcagtgggattgctagatcatatggtagctctatttttagtcttttgaggagtcttcaaactgttctscatagtggttgtactaatttacattcccatcaaaagtgtaccagggttcccttttctttacatcctcaccagcatttcttattatttgtcttttgcataaaagccattttagctggagtgagatgacatctcacaatagttttgatttgcatttctctgacgatcaatgatgttgagcaccttttcatatacttgtttaccatttttatgtcttcttttgagaaatgtgtgttcagatgttttgcctatttttaaatcagattaattttttcctgtagagttgtttgagcttcttatatattctgattattaatcccttgtcagatggatagtttgcaaatatttcctcccattatgtgggttgtctcttcactttgtcaattgttcctttgctgtgcagaagctttttaatttgatgtgatcctatttgtcccatttgtccatttttgctttggttgcctatgcttgtagggtattacttaagaaattgttacccagtccaatgttctagagactttcttcaatgttttcttttagtagtttcatagttcagagtcttagacttaagtctttcatccattttgacttgatttttgtatatggcaaaagatagaagtctagtttccttcttctgcatgtggatatccagttttcccagcaccatttattaaggagactgtcttttcccaaagtatatacttggcgcctttgttgaaaatgagttcgctgtagatgtatggattcatttctgggttcaaaactggtattccagttttgttctttttgctcgggatacctttggctattttgagtcttttatagtttcatataaattttaggattttttttctatttctgggaagaatgtccttggtatttttatagggactacattgaatctgtagattgctttgggtrgtatgaacgttttaacaatattgatccttccaattcatgaatgtggaatatctttccatttttttgtgttctctttttttccattagtatttgatagttgatagatcattgtagacttttttggtttagttaaccctaggtacttaattttatttgtacctattgcaaatgggattactttctccatttctttttcagattgttcactgttggcatgtagaaatgctactaatttttgtatgtttgttttgtatcctacaactttgctgaatttatttatcagttctaatagtgttttggtggaatcttcaggtttttccaaatttaagatcatattttctgcaaatgggataatttgccttcttcctttcaaatttctttctttggtctgattgttctagcaaggacttccagtaytattaatatattgaatactagtggtgaaagtgggcatccttatcttgtcccacctcttggaagaagagtcttcagttataccctattcagtatgataccagctgtgagtctgttatatatgacttttattgtgttgaggtatttccttttatacccrattttttgaggatttttatcatgaagggatgttgaattttatcaratgcttattcagcatctgttgaaatggtcatatggtttttgtccttcctgtcttccttttagtaaaagtgattttctctggtggcgtgttttaattttttgctttttattttttgagaacctgttgtatattttttgatttgcgattaccaggaggcttgtaaataatatattgtaactcattattttaaactgataacaacttaacactgattgcataaacaaactaacaagcaaagggaaaaccaataaaaactctacattttaactttgtcccccsctttaaaactttctgttgtctttatatcttattgtattgtctgtatttcaaaaaatagttgtagttattatttttgatcagtttatcttttattctttctatttaagatatgagttgtttacatactataataacagtgttataatattctgtgtttttctgtgtatttactaatgctagtgagctttgttcctccagatgatttcttattgctcattaatatgcttttctttcagattgaagagaattctttagcatttcttacaggataggtctggtgttgatgacatccctcagcttttgtttgtttgggaaagtcttgatttctccatgtttggagaatatttttacaggatatactagcctgagataaaagtttttttccctttagcactgtgaatatgtctcctgccctataaggtttccactgagaagtctgctgccagatatattggaactccagtgtatgttttttctttattttttcttgccgcttttcagattctttcttatctttgacctttgtgagtttgagtattgaatgccttgagctagtcttctttgggttatatctgcttggtgttctataaccttattatacttgaatattgttatatttctctaggtttaggaaggtctctgttattttccctttgaataaattttctacccccatctctctttctaacttttttttaaggtcaataactcttagatttgcccttttgagactattttctaagtcttctaggaatgcctctttcttttttattattttttcttttgtcttctctttgtattttcaagtaggctgtcttcaagctcacagttctttcttctgcttgattgttttgtgctgttaagagactctgagacatttttcagtatgtcagttgcgtgttttaactccagaatttccgcttgattcttttaaattattttaatctctttgttgaatttatctgataggattctgaattccttctgtgtgttatcttgaattccattgagtttcctctgtctaaaaggtcacatatctctgtctctccaggactggtcactgatgccttatttagtttgtttggtgatgtcatgttttcctggataggctttatgcttgtggatgttcgttgttgtctgggcattgaagagttgggtatttattgtagccttgcagtctgggcttgtttgtacctgtccttcttggtgaggctttccagatgcttgaagaaacttgggtgttgtggtctgagttttgggtcactgcaggaatatctgcattagggagcactccaagcccagtaacactgtggctcttgcagaggtaccaccttagtagtcttggataatatccagagtcattctctggattaccaggcagagactcttttttctcttctcttactttctcccaaacaaacagattcagtctcagtctgtctgtctgtctgtctgtctctctctctctctctctgtgtgtgtctctgtttcctggatctgggggaggggtaacacaaatacccctgtggccaccaccactgggactgcatagggtcagacctgaagccarcatagcactgggtcttgcccaaagcctgcagtaaccactgcttggctcctgcctatgtttgctcaaggcactagggctctataatcagcaggtggtaaagccagccaggcttgtatccttcccttcaagacaactagttcctcctagtcctgggcaggtctagagatgacgtccaggagccagggcctggagtcagaaatcttaggaatctaccggtactctattctacggtgggygagctggcacccaagtcacaagacaaagtccttcccactcttccttctcctttccacaagcagaggagtctctccctgtggccaccactgccccaggcctgcgacaagtactgtctggctactgctgatgttcattcaaggcccaggggctcttcaatcagcttgtggtgaatgctgccaggcctaggaatctattttggggcagtgggcccacctgtaagccagggaaggtccagaaataccatctaaagccaagccctggaatcaggaacccctagaacccctttggtgctttaccctgctgtggctaagctggtacctaagctgatttttggttcttatgaaggtgcatgaaggtgcttttttgtgtggagagttgttcaatttgttgttcctttgggaggctgctatttagccatatggctccacctccctctccatccaaaaagaaaactttaaatgaaaatatacatccaaagaaagtgtttttgaaataaaaaataaatggtcttaattccaaggaaagaaccaacatagtaaagtaaaaatgcattttttccaaaagttacttgtttgatcacatattgtattttattttaatgaaatatctagaataggtaagtccatagagaatacaaaacaggttagtagttgccagggaatgtgagtgtgcagaatgaggagtcattgcttaatggcactgttttcaagagttacttttgagtacacttgcagtctggtatctaaataattgaaatatttgaaagtcgtgattcctagaataaaaacagtgactaacttttaatgatttcaatgtcatgtgcacaaaaaaaccatgtccagagtaataagtttacccattctaccattcttttcaaagaattgcttaaataagttttaaaaaatttcctattgagatgttacttaaaatacgatttgtttagttctcaaggttatgctttccccaggttatgcttcatttgggtaatctaagtttaagtcctaatgtaagacctagggcatggtacttaacttcctgtagacctcagttttcttgactgtgtggtggaagaaataatagtacctagcttgtgagtttgttttaaatgttaaatgagagaacatgtggaacatcttacccagtgcctggcacatggtgagcaatcaataaatgggagttcatcctgtcatcttcagatttctcttctggagccagccaggcttgagttctgacctggttcatccactgaacttgtaggggaagcacttagtgcccttcggtcctctcatccagtacatggatatacagtcttcatgtggttgatacaaatacgaatgtgctaatgcatctttaccaaaaagagaggtaaaagaaaggaaggataatcctgccagagatacatatgcaaagatctgaaagtaatcgagagtgaggggttgcagattggacaacacttagtagtggctccagataaggttcttaaagactggccaggatgcagccttttcatccagagaaacagccatctcattcatagacagtggtgactgattggcagattttataagatgacacaaacaccctccccattgtcctgccaaaatgtggggaaactcttcctggaaaagttatttctttgaattgagcttccaaaaggttcctattagaattcaaatactctgtctgggttgaatatcacattgcataatagtttctccagattaaggccatttttcctaaatatttaacaaaaaatttttcgcttcttatcaatgatgctggcgttggttcagtgcctgcataagacttcttccagtgtatttctttaccctggcaaccagttcctttttctttgggagaattttttttttaattataacactattgtaggaactcctttttggcacagaaggcatctaaagtaacttttagagatagaggcttatgaaaaacaagaaagaggcaagactcagtttttgaaatctaattccagccatgaagcaaatgccacaaaagggcacaggaagaaaatctgtaaagggcttatctaccaccgttgaccaaagatttattctgctgttaagcaaataccttgtaagccagatattgtgctaggtattctgaatacaaagatgcagaagcctcattccctgttttctttttttttttttttattatactttaagttttagggtacatgtgcacattgtgcaggttagttacatatgtatacatgtgccatgctggtgcactgcacccactaacgcgtcatctagcattaggtatatctcccaatgctatccctcccccctccccccaccccaccacagtccccagagtgtgatattccccttcctgtgtccatgtgatctcattgttcaattcccacctatgagtgagaatatgcggtgtttggttttttgttcttgcgatagtttactgagaatgatggtttccaatttcatccatgtccctacaaaggacatgaactcatcattttttatggctgcatagtattccatggtgtatatgtgccacattttcttaatccagtctatcattgttggacatttgggttggttccaagtctttgctattgtgaataatgccgcaataaacatacatgtgcatgtgtctttatagcagcatgatttatagtcatttgggtatatacccagtaatgggatggctgggtcaaatggtatttctagttctagatccctgaggaatcgccacactgacttccacaatggttgaactagtttacagtcccaccaacagtgtaaaagtgttcctatttctccacatcctctccagcacctgttgtttcctgactttttaatgattgccattctaactggtgtgagatgatatctcatagtggttttgatttgcatttctctgatgaacagacacttctcaaaagaagacatttatgcagccaaaaaacacatgaaaaaatgctcatcatcattccctgttttcaaagaaactcacagcattatggaggcccaggtttctatttgggcctccataatgccttgtgctctaccaagaatggtaaaacaatcctttccagtaggagttcctagttagtggcttatagttaaccaaatgaagagaggatgaccatatggtgctgataaattgaaagaaattaggatgaacatctagagatttgcatggccagacacctaattcagattgcagagcagcaggatgggaggcgtagtcctgatttaactcttgatcaaaaagaggggtaaaagaaaagaaagataatcctgccagaaatgcgtgtgcaaagatctgaaagtgatcaagagcaagggattgcagattggacagcatgttttctcatttaatcccagaggaaycctgggaggattctaggtgtgcatattgtccttattttgtagaagaaggtactgaatcttaaagagataatgtgttttcaaagcttacagagtccaaatcgatagctaaacartgtctgtgggatttgaatccccctgtgatgttcactgtgtgttgccatatactgcaaatgtgttataaaataataattataataaacaaaattaacctgagatattcccagattgaatcaatccaaggagactgaacttctgagtttgtcttggagttagttgggctttactgctacttatgctagatcttgaaggcagagtaggaaatatacttagcagggaagtsggagaaaggtgagaggttccccaggcaggggaaacaaagtgagcagatttggggcaaggtgtgtgagattgtgtggttggcaatatagggtgggaaaaattagttatcaagggcaaagctgaatagcagattgaacccaaatggtagaagtttttatttaacacacaaaaaaggctgaaattgatcctgtaaggaatatgaagctatagaaggtttttcatcacaggctttgacattttaaggtttgtatctttgaaagataatccaaagataagagaaaaaaaccttagatgtgtaaaatagaagtcaggaaaactacacaagctatgtgtaaagggagtcaaggggacaggatccaaaggaagacaaaagcacaaaccaattattttaaatcaaatactagtgcagtaacatatatttttaagttttaaagctgcttttctccatagcttattgattactcttttaaaacttatttttaatagcagatattatttattgattccttaccattttctagatactttgctaaggttttacatgtcttttttagtcctcagaaaattctcttctatctccattttatagctgaggaaactgaagccagggaaggttaaataatttgtttgcaatcaaacaactagtgattggtggaatttggatttgcaaccaggcagtctgactccaaaggcctcttcttaacttgatcctacatacccttcctaaatagtaggcgtttttctcagagcagctgttttacattagagaaaacttatttgtaatctgtgatcaaggagaaactgcctgagttgcctggattattttggcatttttaatatgtacaagaaaaatgttatcaaataaatgtaaawttaaaggtcctgatgagmgtttactttctaataaaacaattttcaacatttcccattacatcagaaactaaattattattaaaacacatcttgtgttcatttatttttgacaggctgcttttcacatctttttttttttttttttttttttttgagctggagtttcactcttgtcgcccaggttggagtccaatgacacgatctcggctcactgcaacctcctcctcccaagttgaagcaattctcctgcctcagcctcccaagtagctgggattacaggtgctcgccaccacacccagctaagttttgtatttttttagtagagacggggtttcaccatgtttgccaggctggtctcaaactcctgacctcaggtgatccacccgtctcggcctcccaaagtgctgggattataggcatgagccaccgcrcgcagcctccaatcttattttaatgaaaatctcaatttatctcagtgttagaaactagggcttcatttggcaatgtggtctttccagttgtttcatctctttcaaaagtcttttaagaattattgaagtaagttaattttaaatttttgctttatcccttgagattggtatatagagttaggaactacttgattaaatacaggaagctactataaatttgaaataagaactaaagttataatgtgaccagactgggtaagcactgataacatttgtatatatttaaacagaaaaaaaatagttagaagaataatttttaaaaacacacaccagatgttggtaaaggcaaagatatttttgctcttgactttgtctatgaaagtcaagtgaatactttgaaagaattgatgatggataaggcaagtacattgatttctcaaggtgtgaattgttatcttcaaacyttgtgcttccataattgttttttctttaataatgagacatctagaccataactggctatgtgattctgaatctacctttacaacttaatctttgtgattccmctatataagatatctagagtagtcaaattcatacggacagaaagccaaatggtgcttgtcaggggctgggagaagaggagaataggaagttactattaatgagtacagggttgtcgatttggaaggatgaaaaagttctggagatggatggagataatcgttgtgcaacagggggaatrtacattacaccactgatcagtatacttagaaagggttaaaatgtcaattttacgtgatgtgtattttaccataataraaaatacttaatatttacctatgcttagagagagttgacatatagtcatttgataaataaaatttgtaaatgcgtatgcttagataaacatagaaaattgttttaaagtagaacttatagatttctagctttaaaactgtggagaaacaatcttcctatgccatttttttctttaaaaagtcactcaaaccaataattagtacaaaaaacagaaaggtacatttcatctttgaggaaactgggagatgtctgtgactctaagccacaatacataaagatagaagtaggaagagaaaaggtcaatgacttaaccaaatcagagaacaatactaaagtgaagcaaactgagctgccccagtcgcccaaaacatactttggaagatggaagagttctaaatatagcaggtgtatgaacatgtatattatatacacttctccataagccctcactctttttcagtgtagtcaacatattttgcatccctctccatggaagacagagactttgggatactaagcaaagagtaggagaaggatggctgtatgtttaactttatttaggacaattaaatgaatgtctgcaatgtgtcagtaagaccttcagcgtccttctcctacccacaccagaatgctaggaagcatatttatatccttctctagaaaaatagagataccccagaggaaaaaatctcttacaaatagtaacatttggaagaggcaaaaaaaatccccactgggcacttgatgatactgcagtaaaactcccagtacacaagcctcacccatgcacttagaacttactgtcacctttctagggtctcattcttgtgtatgaattgggatcaggaatcaatgctggagtttgaggatattacactcattgctctttgtttacattatttacatgtatttctttaataaaatttaaatatttaattcaaaataatgttaaatttgcagagattcatttaagtttagaataaagaagaacaagaaatgtgaaagagggacaagaggagaggcagaatgcaaaggaaatacagcagcacttagaaaattttaaattagatagtttttcttctgaaatccagtattgaattagtgcaaaattctgaaagtcaattacaaaattcattttatgtcaacattactgactccatgcacaaatgtttattctagttttaaaaactagtattctgtaccttttaatagccaatgtaatttgttgacaaatattgaaatttatacgttaccagaggtctcacgtattgttaccttttaaaatgatcatttattaaccagtattgcctaatgaggcaatcaaaatgtcatctgttgcataggtaacaggaaactaccattactcatgttgtgagatggtcaaagaccttatcatattttatggctaacaaactcatgatgttgtcatatatgccctcatcacagtgtttatgatacctaaaagttagtgcctaaaaattagaaacaaggacagtgaagttagattgtttaatcctgcatatcttaaagatctaacaytttctagctgttaaatatgtttatcattatactagtaatgtacgtgcaccatttttattatattaattcattgccactgtacaactaaagaggatggatgaattttaaaaacttccaaaaacttggtagcattttttaatctctttctcttcctcttttctttctgtcttccacacacacacacacacacaaacacacacatacacatacatacatgcacacatacacatcatgaagagcaagctttggaatgaaatatacctgggtccaaaaawtttgaacaaattgttgactttctttatgtatgaaattattattatcacatctactttggagggatgttgtgatgtataattaagaaagtatagtctacttagcatgtaggtaattaataattagtagttattattattatcctaacctgacagtttatgaaagaggtaggaaatctgaagataggaaagccttcaaaatataatactccggacttctcctttgggaattaagraatgtagctccaagcaaggttcatgccagtaggaaagtccttgaatccaactgtattcctagtaagtgtaataaaataaaagaaacctctagaaattgcctcaaaattcccctccagataaggaaaataacacaatatttctcaataatgaggaactgctacaggagttcagtgtcttattctcattaaygttagagtacaatagagaatagcaggaaactgtaaaaactgcagtcccctggtctttttttctaaaaagttagtttgacatatctggagtactgaatttcagcatatttgagaggcctgaatatttagttgatatataatatggctctaagaaatatgctcatgatagattggaaagtatagaatatctattgtaatctgaaaataggaatttagagaacagaagatttgatagtaggcagagtatttgaaaatagtaatacttgagaaaacytgagttgtatagtaaaattactccgtaacacctcattcagttggcttcatttaatgtttaatgtttaatccatggataaatgtcataagtctcacaagtcacgctcaccattggatgataagagaaagggagatcacattttaggtgcgcacaatctacctgtatgcaattgacgctttccatgtaagtgttgccaagttgtatcggggcaccattagtggtatgagacagactttaggagttattttggactcctttttttctattaatatatcttatattttgggggcaaattataccagtatattaaatctatttacagaataaatataaagttaccttttatattcartttaagttttttwaaaaagtgagtcaattaagaaaaatatcaaatcatggtatagatggaatgctaatatggaaagaattatgaaggtggtgttatgactgaagtttcagaaacatcaaatgacatagtcatttgattcaacaaaacatctacagatggatgacccaatggatgtatacatctatggtacagtctattgaaatgtggtaacaaccagaaagtaaaaggtccatacattatacaattcagtacaacagggaaatactgagaaataatcgcagcttctggatcaaaagcatgggccacatggttcctaaatccagtctccccatattcaggcctcctcatcagcctgcatgccatcatatgcttgcatgctaacaggaatttcgagggaaatgccatatcttttccatttggggaagcttttcagagggaaaactacaggatgcttagataacaaaacattctttcagaaatgttcatgtgagaaatggtcttacaagtggataaaactctgtaacatcaaatacatactttttttttattctgtcactaccttaaatattaggagtagaagcaaaacttaaatttaaatctcaatggtcttacaacatagcgcatctttctttctctgtaatggcaaccttgatgtaccaatccaaaaactttgagtattctggttagttccatacattgtcagattccccacttaagtttgtttttgccaggggagagggacgatttcttagtcattatggtactattatacagtctttagtagatgcccaataagtgtgttaggttttcagagaaagattcttggaagatgtagaatgttgggcaagtaagcaaggaacagcacatggggctgcactaaacttgtgtgtgtgtgacagagaagggagtagcatcaggctaaataagctcattgtaacatggatctgggggacggtagaacacaggctaattatttctggagagttgaaaactcaacagtcagacattacattctctgatcattgtcatttgctttctgaaatggcaactggaagctatttggtagaccttacatggagggaacagtgtttcaaataaatagtagttgcctaattttacttggtttgcttttgttctttcttttcccacatttaaattccaataagaaaaaaattaaacctcttcctctaaatcccctctcccctaaaaataattagtctcacaaaacttttaagtttccaaaaaaatacatgattaattaacctgctttaaaatgccagcaatatactagacatgggacagtgctaagaaagtgtgaatgtcccctggcagtcataaggaaactgaaaagcttaaggggataactatgtggaaagcaatttattggcatttaccgtaagaggcctgagagtcattgaaagaagactaagtcacaaatgcaccttgaagtgtgaccaggggagcagatgaagggtttgttgtaagaagcagccagagcctctggcggatgccgtactacattttccaagttgtttgggtgggtcacaactgcactccaacatcctgtctgcaaatgctaaataaacaccaagttcacgtcagactagagaaccaacgtactagctaatgccatttaagcaatcagaatgcttacattattttcacttggtaattcacatccaaaataattgaagttggcacacccagaggagtatatatcctctgtgtagatgttcagagagataggcaggctggtcaactgttccttctgttgggagcarttggaatcagcttagattatatctactgtaatagaaaatattttatatttaggaggtgggaaaggttttggccttcgaaataataagagatattgacaagatataaagcttcattccttactgaagagctgttaaggattagcaaacccaagtctttgtgtgtagagatgaatgaaatttgcatttttttwaaaaaaaaataaggtttagaaaacattgtgcaagggaacagccttaatacgtgcagccacttgtccaggaataatacattcaatttttcagtttaaaattccagtatgttctgatccaagggtgcctgttacactctgctgaatttttaagaggtaatttacatctctacaaccaactccaaagcatgacatttcattacatccgctcaaaatgaacagctgctaagtcatcaagttctctcaactttgcttctaaagagaaaagtttagttttagtgcttcagtgaaatacttttttgaaagaatgacttttataaaattcatttgtttattatggtaaataaacaacttaatggcaaggggtgtgttccttgtaaaggtgatcacggaatgttacccagaataacacagacatctcatttcccagagaaggaaatggttttataagttttgtgaggtctcttgtctgcttggccggtttacagtgctggtctctggagctgatccgcccctttgctttgtaagtctcagcaaytgacgaggctaggctgggcgctgggcttttctttttttttttttttttttttcctttctcactgccctgcggtgttttgaactgccttcttacagacgtcatacagcccttgaggaatagtttctgcctggtgagattgaatgatagttctcattcacaaaaccctggattctaagcagggacacacagaaattactttcgcaggtaaatcagcccacccagccaaagtgtggagagatttgttccttggctgacttctttgctccacggagaggagtgttttcctgtgcttgccctgaaatggaacttccttgacagctctcccgtgttacagtacctcccggtcattttctttttctctctctctacctgcgctcttcgagtgtcagaaacctttaaagctgttactatggaattgcaaaaaagagatcaagtgactctttcactatgctggtttcccttgtgacccagatgaagaatcaattcagaattcagttcctcccttggcattgcaagacacagaagaaactgtcacttcctaacagcctagtactggagtaaattcagtatgaaggaagaaagcgctcctgcgtgttagaaccttgcccatgagctggaccgaggacaggagatggactccaggaaaattggatttcttcaagcagcctcccttggaaatggaatatctttaaaatcttctttgcagaaagacagttagaatgtattaatcagaatagttgaagacttattttcctttttattttttttcaaaatgagcattattatgaagccaagatcccgatctacaagttccctaaggactgcagaggcagtttggtaacgttcttttctctcatgcttttccccttttctcttttaagattgacgtactccttgagtatttagtaagttgtgtgatgtcgaggctttgtgaaagaaggcagtattggcggctcttttattctttattttgttcccaaactcatgtgctttaaccaaatgggtgctgattttttttttaattcctcttggactgtaacaatttatctgatgataatttttaaaggaggaaagaaacttgcagatatgttgggagttttgaaaatgaaaacttgtcatttttcagtgtttgattcagttgcttgttttcttatcttctttgcttgctgcaagcaggctggtggttgacaggctttgcccttgtctttaaaagcaataccctcacttttagcacagatgtgttagaaattaataatgttatttatatttaatcatacacatgaaacaaacttgaatttaactatgtggctaaatgtatatcaagttgcttatcattcattcatctcttatgttttattttattagaaatgattcctagtaattatatttttggttattttaatgcttttactctgatgaaaaaatatgtcagtttcaatgtattctaatgttctattatttccccaatggtgatttgatatgctaatcagcatatggcatggcccttaaggagtattttccaacaaagtaacttttttttctacaataggtatttacaaaatacttttatggctattttaggggttagtcttattttgtttttcttagtgattgattataaataactaagctcacctctttgaaatggaaataatcatacctcasactggggaaataaaagcaatgattgaagtgaggtggttgagaatgggaggaaaacaggccagcaaaatatgcattatcatgtgagcaggcaaacacacatgtaaatactcaaattatttgcgtcaggaatttagcttgtgtttttgtggataggttagcctttgctgttattgtagtgttttacagtcaaccagaaacaagaattgccccatccgcagtatttctgtgagttttaataaattatagatgaagattttgtctcttaacgttacttgccatttcttacaaaataacacgtgcaataaattattccttgagtttatttaaagaaaagattgcatctgcaaacaaatttggagagtcctgtcctttttttcctcaaacaataaatactggaaaatccttaaaatccttgtatgaattaccatagctaatataaatcaccaacatgagtaaacagaatttataatatacatgaatttaactcatttataatttataccattcctatgtgaaaagatgttactactttaaaaatagtgtttaaccaaactatttctctttttgtctaaactgccaggagatgtattttcaaattcaggtttcaattggaaataatttgttcatttcaggagatgagtaacattgacaccctttacctctctgagattatcatagtctatttttatccacaattattatattttttgttttaaattgtatgggatattttcataagtcaagccacaatttaaaatgcatttttaaatattttgatttgttaatgtgtgtatttttccatttaactaaaaatattctccatagacttggggatagaatgatttctgtgtaagaaataaatctctctctatatatgcatgattcttagatttaactacacactatagaaacctctccagttattaatcttacatctgacttaataatataaccgcttgggtatatcactgcagctgccaaaaaatttggcctgagggtataatcagctgtagtaacagttttgccattttattatccgtctatcagtcaartattagacacatctatwatatttatttatttaattacatgtataaaatcaatatagattatagatttggtatrtagagaaaatatatgtttgtgtgtatatatatgtatacacatacatacacacacacatgtttacttgagcattaaaaaaacccaaacggcctctcttcttgtgcctctgcacataaaggccacrggcctcaaattgctcagagggacaatgttttctcaccagtgttgctgtctgcatttctccaccaccaccctaccctcattccttttcagttgacttcccatgagagagacctaaaactttgccatttatctctttttcagatgtttatttgtttccaggttgatctccaaaatactttgttcttgggacacatctttctggctttaccatcttcactctgattacataaatctattttgtgttccattggtctactttctccaaatctgtctactgtcctccgggattccctaaagccaaacattacgtttggaagtttgttgtattgtgcaagaatccaatgttttggattacttctttacctttttctatttgtttctctccaagtatcataaaaagcagtccacactaacttgtccttacagccttaattaaattgctatgagatattcacattttaaatgggatttcatggcaaacttgtattttatacccttcctcttattaaaggtcagcctgttataattaaaattttattaatttcaagacaaaatacaaataaccttaaaattaatctatttgtctctttgtaacataggtgtccaaatttaggktttatttaataaaggtgtatactaggttgcttttatttaaggaacagttatttatatgccacrttctagcagaaagtgattatagtatttattcttaagcattattttaaaaaaatgtgcctgcatgaaattgagaaaaactttatatattttcttatgctcataaagctaataaaattagcagattcattgattgcagaattgtttgcctttcttgcatatcttaaattmagatttagtcagttgttatatactatgaaaatattaccttacatattccttgatatctctttaacacttttataaacatttataaacatttcccagggatacttctcattaatgtaattaagacttgtgatttagtttaagtaagtaaaacattattagtcttacaaatataaatataaagagaagtttagtcaatggaagtggacttttttctttcctgctgacagaacagtgtttaggatttatgtgttacatgtaagatcattcattatgtaatctgaaaataaaagagatgctactgttcaaaatatgactgtggttgtttttaaagcaaattttaaaattggttattgtatatgtaatagtacttatacttttcattataagtattattatgtaataagtatacatgtaatacttaggtttgtagatgcagaaaaaattctggaagactctgtccaagcttttggtagtggttattttttaggagtaaaaaaaaaaatggtaggagtgaaggtaagggggactgcctctcttttcttcactgtatttgcatattgtatgtagtttttatcaataaagtattatatatgaaartttaaaatattaaaaatatacctactatatgtattagcaagctcatctttatatatgccaatatctacttagacattaaaccacaatttgctcaggttatataatatgcaaatgagtatttcagtactggttggatacaattttctgaattttcttgcaactctgaccaatggaggattataatttttttattagctcttttctcttaaggttgtaaaaatctagactggcttagcattcttattttggcctcatgatcacagtggaaagcattcatataagctaaaatgtccaattttataattgagaatcaaaaagatggaataacattaatatgttggaaggaaaataacccattaaccccattattccatcctcagttattctcattttcaacttaccttacatatcttaaatagctgtaaatactatttctgtactctgcttcttcatttaacatatcaatatttttctatttttggccaggcggcgtagcttgctcctgtaatacctgcaatttaggaggctgaggcaggcagatcgcctgaggccaggagttcaagaccagcctggccaaaatggcrcaaccctgtctctactaaaaatccaaaaattagccagagtggtggaacatgcctgtaatctcagcttcttgggaggctgaggcatgagaattgcttcaacccaggaggtggaggttacagtgagccaagatcgtgccactgcactccagcctgggtgacagagcaagactctgtctcaatttaaaaaaaaaaaaaatccatttttctaatacttatagctttcattttattgagtgtcttatgaaagagctctatcaagaattttacatatatattatttagttcttattacaatattgaaaagaaggagttgttaatcctaattttacaggtgagaaaatgattccgtgagatgaaataacttgagcaaggtcataggctggggtaacccaagtctgtctacctcaaagaacgtgctctggttcttcagcttgttgccttcctctactgtggatataattatctttttaatggccataaaagtgttcatgttgtgaatatttctagatgcattacagtatttggcagttttcttttcggaagtatggtagcctatgaaattcagggttgacgttgttggttgttgaaaaatagctttgtgaaagactgttggttgttgaaaaatagctttgtgaaaggctcttgcagcttgtagaccattatattctctactggtagcaaataaggtcctctggtctttataacagacaataaagaacaaaaggccaatgcctcacaattttgaatagattatctttccaattctattaccaagtttttctgttctctgcaagctctgtaaggcttcaggttggaaacaagtagtacatatcagattttgtatgacatctaagatcagctttgaaaaaaatatgcaatcttccttcctatttcttctatcttagaaacttgtaaatacgcaaacaaatggaattctcatattttctgcctgtgcaatatatattatgatttggtttaggtatgtgactactgtcaaagttggttcagggttttgagcatgaggtaaactttttttggtcctattacccaagttagtgatgtatctgttatgaaatatacttaaagatatacagcttttagaaatgattaagataccttgaaatatttgatgtatttaaaacataactagaaagacacagagtggatmacagataggtttactctttaaagtcatgaagtatgagattccctggaaaaagccatttgtccactgtacttctaacatgctctgtgtccctggaggagtcacctagtccctctgaagccaagtctactgtcctgtaaaataaaaggggcaaggcaggtcaatggattttaaacacgtttatttcaatgggacattttttattaatgaaatgtgagttgaagttaatataaatgaatatttatactgtaatttttagatataaaatcatatataaattcaatatatagatataatttttaaaaacatagatatgtgtgaaatatataagtaaaaagtataagcacacataaaacaataaaacagccactgagtttgtacatttaccccccaccccaaattcaaaccctctccttaaaatacctctaaagactttaggattccaaggaatattgtttgaaaaccactaagctaatgactgttaagatcacttacagttttactctctgcagtgctgccttaccgcgggagagtcatttgtgtattctgtatctctatatggattgggataaactcgtaggtaatgtagcagttcaaatacctctgccttataagaccttgaagttatgtaacttttcccacttctgagatatcacagaagagttatcactataatagttaagatctattcattttatttagcatcttattttttacaagtttattttaggctcatctggaatgagaaaatcatgcactaaacactgtatgatgcatagctgataattcaggaagtgagtatggttgttggtaaagaaatgctgaattggtatgaaattcttcagaagcaagacgcttcttttggtatttcaaaatggggttctccaccctctttttctatcatgtcaactggctgtggttatgtgtgcaataatacttagtcctgactgcaactcttttttttttcttccccacggatctgaggcacaccatggttttggccttatcattaaaacttgccttttaggagaggtaaaggaatagctcacttagtagttcctctgtcaatcattccaatcatgtagtgaattctattgaatcagaagggatgatgacatgaaggtaaccatgagtatacgaatggttagtcatggatccacccaaccattactagcaagattgagaaaagtagattctaagatgaaactgaaggggaagaatattaatgaggcctttaaggagtttttaagctttttagggaaagatgctgagcgatatgtataaatattcccaataatactaatactaaacatatagaattgtcaaagtttagataaaggtawagagaatagggcctgagggatattagctaggttggtaaggaagatagtcacaaagaaagcacagtcttaataaaaaatcaatatagattttcttggaagcctttccagaggtgatccaatatctcaaaatataatacaggggttgaaggtatattagaaaatggacagaagtaaggtatacttcagccacaagcaccaaatctctccagggattggtgcctatgggaagggctggggtaccacatggggcacaatgacagcaagcctgggtgagacactgttaaatataactgtgtacaggtaactaactaatgagagccygtgccagtgatatgtctcagctctcaaattgcctagttctttgtcaagtttgacctaaattagaaagcatttcaaaagtatggaaagtaggaagaatgccagaacctatggatgcagttttttagcatgacaggggcaatattgtaagtatttattatctgtcctaagccttctaaggggattggctccctaatgagcatcctgggtgatggctgaggatgcgaattagagaagctaacagaagggtgaactgctcttcagaataagagttagaaaaacacaagggaatatttcaagagaagagctggggaagtgtggcaagaaaaaagagattatacagagaccaatatggaagaattccagcccagtttgaactaagcatccaccatctagcaccctaccctgtttaataacactggcaacctctgggcaaaagctgccattaatgaaactcagtgtagaggacatttgccccccatctcagccctaagaatttctgccatagggtaaagggggtcacctgcaagcccttccatttccctactacacatgaggaagaataagaaattagaaaactagaaactaggtgtagaatgtatgcacaccaaggattgcatcttccaaagtacccttataggaagcagtcctgttgttttaaacccacagagttaggaagttttctttatatctaatacaaatcttctttgcttaaattctaacccatttcctcttagttgtcagtagatataatgagagtgaatcaatagataaaccaattcttctttatggcctttgaaaactgctagtgagtgacttcttggtcttttttcatttcatattgcaaaatattcattctaaattgtaaaatagatggcaccagtgtgacttgttaaaataaatgtttcattaaacataatttcartakgtaattgttttcagacttcctagagaaaagtgctcccgttgtatctaattctctttcttgtttaaaatacatcaaagatgagaaattgagctctttttagtgaacttgcttgagacattcatatggaatacagaaaataataattcctaacattcaggatgtcattccattgcaatgtggcacagagttttttctttgcatcaaggaatttatatgactgatactattttagtcaggataaattactgtaaaatgtgtccacttttaaccaatggcattctaacatgggataggcaacagcrggctgtgatttttgctctgatactgcaactttgttatagaatagcaagtaactgattggcagctagatcaccagctagctggagaaagcagcttctaggtctatagtcatagttggagtcataacctcattaatgatagctacaatgtattgggcatctactctttgacagacaatgaacttagtactatatacagttgaagcaactgtatgaataaactgtatgaataaaacttgaagtcgcacagcttataaaattacagtgctgcagaaaaatcttggtctgtcgaaactacatcccatatttgttgttgttgttcttattgttttgtttgcttttcctcactatctaaactgctttggctacacatagttctgtttcatggtattagaaaagtagtcaacaagctgctacttatacttttccttcctgtcctagactgttcaagtttcttcttttaatcttatgtatatcaagaacatgtttgcctatggtatttgtctgcctttccccccaagatttgtatacaagcctccaacygtgagccctagagatatattgagaaatagaacatggactttgacacggctccattccttggagatctagctagttcctgactcgttcagcttattgactctcttcctctggtcagactataaattgcagttttccttctctctggcatttgaccagttagtagcaccataaaacctttgaaataaaagagaccacagagaataacctataatctgattttccccacccctaaccccaatgtggagctggaaacattttgctagtctttaacatttccagtcaagtagggtcaagaaaaactgttaaaaacaatgtcaatgcttaagtggtaaaaagatttgttgaagaatatatatatatatatatatttagagacagggtctcactgtgtttcccaggctgaggtacagtggctatttacaggtgtgatcatatgcactacagccttgaactcctagtctcaatcctcctgccttagccttcccagtaactgggactacaggcatacaccaccatgcctggctggagaaatatttttttaacttcaaaaatgaagtttgagctgaaaaagagagctaaaaattagtctgtcaggcaaatgtgtgaaagcagttctattataatttgtattgagctataatgtaattcctaaacttatgtcatatagctaagtaagtagctgtaattcgcatcttgaaattttaaatttacttctttcctctcaatatagtcttcatctgaattaaaaattgtggcaatttgtatttattgtgtacttaactatgtgccaggcactgtgctgttcacttgacctaattatctcattagatcctcatgatgaatcctagacagtactcattagtcttattcctcagactgargcctaatgaagtaaagtggcttgcctaaatttgagtggcaaataagataatttcatgattcgcatattttcttaattataaaatgttacctttagcaatgatgtatatgttaatatgttcaatgagttgatctacctgaagtgcttagcacatggctggctccttgtgagtgaccaggaactgttagcttatattatgcatttttgaagtttacacattggtatgactttctaaataatcaagaactctaaatgtgaaagctgattcattttgtaagggtttcttttccataaggtagtcttttttaacacagtcagaattaagcatttatatagagctaggtattccagataaatcacgttaatagtgtgattcaaagaagacacactgctatctaggtgggtcaaagaagtaaactacttagtggaggtggcaaaataagaagtggtcagtgggaagctaaaccacctctgatttagttatttaaaactcaatgagaaccctctaaggaagcacaactaggcaggggtttcatctgaaaggaatggtcagctacctgagcattatctctaggtgcacctttgtaaagactttctccatgtatctttcctactgggtgccaccctgtggcttggtcctacggtaatcacactgccaggcattctctacctctacaaatcccttactcttctagtcctaaggtgcattcctggttgtgtaattcacagattattatctccctggagctgagcctcatcatctctatcagaccagactgagaaggactcctttttcctttgtcccgccatcccagctcagtgcagaaggcttaagatgctttctccatcatttctaaagaacaacagacaaaaatagagatctggttaggtctgttcttgtggcgtgaagtgttaggatgagctgaacagccacaggggctagaaatgtcaagaatgcaatacgttagagcaggcatttagcattcctgtctctgatatctactattttattatgagtagttaccaaaacaaaacaaaacaaactgtaaaagcattattttgttataattaacaactgcacattggattaagtgtgattgagggtggagttcaccagcttgggaaaaaaaattaaccattaaagattccctgagtgttttgctttaaaaagagatagcccaattacttttctgtgtttcgttaagagtctactagtatatgaatcagtaagagcttctagggtaatataaaacacacacaaaaaagcaaatttgatgttagcagacaactttttaaaggtattcgtgtaactgaaaaaatcattttacgtacataggaatgaaattttatgtttacctagaaatatatgtgaaatccctccattattgcaagatctttttcatgtaaatatcaaaagaattagacagtctgcattgtttaaaaccaagatagctagtctttttaatctatgggcaacttgtaattacgaatagcagtagctgcctggaataatgtactgagagctgcgttggtctcagagaaaatgtgctgtgatccattggtgatctctgccagacagaagagggacatagtgtggctgcttgccatttaaatggccttgatgatctcatcataactctatatatctaatctcaccattaaatttgcatgcaaataaagtcattgtagcagaaacaggttttatgcatacatacaaatacatgtgtattttttgatatgttttgtctatttgtcacctatgaagaacatataaatattgtaaacagaaaaactctttttggatgttgcaaatgcaaagaagaaaaataagtaattctaattttcaaaggtcacccctgtaatcaccacccagattaaaaatagtaccagcagccaaaagtcacctttatgcccctttaagcccctgcccccacctactaaaaataatagtgatcctgattttgaaaatcacaaactttttaaatttcctgcttttgaattttatataaaaggaataatatagcatgtactcttttgtgtttggctgtttccctcacccccttgcaaaattatgtttgaaagatgatcccttgttgatgcggatatggttcattcattctcacttaagtataggtaattaagcaaacttttgtttgagatacaaattcagggtaaaaatcagattttctatttaaataataatttggtatatatgactatttgagcattttaaactgttgtcattttacaataattattttagtatgatttaatatccaaattctgttgcttagattcaccctcagtggacatttcttctgaagggccttcctagacttccccaattagaattaaaactctcttctctgtgctgtcatgaaaccttgtacatttctctaactcttgaaggattacaattattgycttctgtctcacgtmcctctcctgtgagcatgttttggagtagactgggtttgctcatctttgtagagcaatgaacccctgttcccagcaccatgcctgctccatcatgggcattcaacatctgtcctttgcatggaaagtagaacagtgagttcttccatattacaaagaatattacagtcaatttttatttttaattttcttttagtagatggcacttttcaggagattgtactgggtgagttgtagacacagtagttactctttatggcaagagttgtatagtatccgggaggatttttgcctcttccctgtggctttctttcacccttagtttgccaccaccactggcaattctaatctaggcacaccttccattgcctcctgtgtttcccattctaaaatatatacttccaagttttcctctatattttctgactgctcgaatgactcttctcgtgtcataaactagtaaagagtagtgcatatagaaatgctgataaatgtgttgcacatggttatcacccgactgacatgctgaccttctgactctatcaatgggtgayttttatatgaagccaagaaatctgttggtggtaagtactaagaccaccacttcaggctcactctaacctcattgtgtgcatcttgaaaccccacacagttgtcacatatgagcagattccacaggagggatgctgaaccaaagtgacaagcttgtcctggagccctaacacagggattgaccccygaccttcaaagtcagggaacaacttagggttggcttaccttcttgtattgtgaacttttccgattgtgaagccagcttttagctttaccacactcccagacttaaatatttggaatggcaagaaattaggcttaaaaaaaaagaaggaaattaaggcttaatccttaataatgaggaagtaatttgttttagtattgtacagaaacattttctagctacctgatcatttagtctagttctatagcttaaaatatatagtccttaaagaaaagttttatttctgtgggtctattagttacaaaagtaaaggtgcattttttattgctttatttaagtgtttattaagcttgttctgccacaggtaccctgctggctgttagagagacaatggtgaaatatacagcactcggcttcataaaatttatggtctagtgactttctgaagtatttctatagggcaggagacttctatttcaccttctactatatccttggaatagtttttactttcctggtaggagtgtgcatttatataagtgtttcagttgcttccagaaatccagtggtaaacaacataattttaaaacctccctacttgaatttggggtggagtaatataaaataaatctggaatatttgattttttagaccaaaatactttccctgggttagagagatattttcttttcttactggcctggaaatccatgccattttaataagagatatttttattctaggtaaattgtttacttaatcacctcctaacaaggctgtgtcagccaagttaaatatttaaatttatttttatttaaataaattttaaaaccaacagatttctttctcattttaatgaatttagcctttgagttttcaaagataaaatatacagagtagaacattttaatgtatctgtagagagggaacacaaaaagggcacatcaggaaaaaatagttggaaaaaagtgaattttatacaaaattaactcataaaatgaatataaggcattatttcacttrttgccaaaatctgtctttacagataatcttcgggagacctttatttttataggccctagttaaaatattttttgaatgcttgaggctctatttcactaataagagaaataaactttttctttctataaataactgctactagcttgtttgtcagctctctaaataaactcattttactattactatgcttgagtgctgttatatattcctttgttactgtgcataatccctggctataactgcattaataagtaaggccattacatcaaatagggatctaacaaaaactttcgaatggactatcaaagaccagattcaatgcaggaaatcagaaggaaatggcatttatgtcctagtgtagttcagttaaaaggcctgcccttaaggattacaactgccataaaagggcaccatgcaagaatggaaaacctgtttacaacaaaatatcaaattattatctgactttcacaatgaaccacattattctatgactgccagtcatacatctggactactataccatttgtgtgcagttacagcagctccagttctatatggctagttttgaacttagtctgactttaaaacccatcccatttactatcctctgctttttttttttttttggtgtatattgtgggaaattccataaatgatttttataaactttarccagtaatcgggaaaaactgtaagattttgtttgtaagctttataaacgttacttrtaagattttaattgaattctaaattaatttctratttgaacctctcccttctcttagctttatatgcttggtcatccctccttaagtaattagcttttttgaagctttgttttttttggtttttcactgtttctgttatattgacgatttgactttcttataaattgttagtaatttcctgaataaagtacagaagtttatctttcaaatttcccatggatcatttcttaatagtcaaacaattgtctaaatttccaatacacaaagaaaagttttagctaacttacttcaataagatggataatttgttcaaagtgccaaacacatttgctttcgtaattcatgccatttgtgtgttaagtgtataaaagagatagagaaagaatataggaaatgtaactacacatgcaatcttgggctttccaaaatgtttaaagtaccaaattcccttggtgccaattgctttaggcatttcatcttcactcagttgcatcctaaatatagcgtaggtgtgacataccctgtaaatttcaaattcacataaagaagtcccagccttcgaggcaagtcttaattgaatactaaataaaaaccttagtgtcttctgaaatgtttctgaataaatagttgctttacagtctttgatttctatgttcgttagtgtccaaattcagaatgggaaccaacttggggagaaaaagaaaaaaagactctcaggacaatctttttaaaggagtaacagataatctattttggctaagacagggtagattcaggtagwcagataatagaaaggggagtcccttgtgtatcaactgatgctggaatttgtgaaatcctataaagttttgtagaaaaaaatgttaaattcatggaaacttgtttggtcataatcctcacagtttctaatttagtataacatcctgaataaattcattcagaccgacggagagaagaaattattatttgcaatatgtgaatttctgactaataggagtaatagaaaataattggtcccttaggatatttctgattatatatgagaggcttggggagggactctgtgtaaccgttgcttttaacccttgtttttgatgggtaaatagaacattaatgctacatgaaagatacttactctggcatcctcaagagaaagtaggttcttttttttctcagttatccaagaaacttttaacaattctaaagaaagaaataaaaagcacttagttttcagaagcatgtttcagcttcttgcatcaggagtaggccagatggccatgttctgtatggctttataaatattcctttttgttccatgtaaaagttaatggctagttttaaaccttggtatcatttcgaagtcagaccttatgtgcttaacttcattcaaagtatttctattttgttaggctgtaggaaaacatagagctgagctattaaaattccagggcagtttggaattgccaacaatatgtactggagagatgggggtggattctgaagtcaaatgaatttggaactcatcttcttttacatgctgggtgattttggacaagggggaaaagctacccatagggtttctgtgaatgttaagtgaaataatacatggaaagtgcttgaagtaatggtagggacacagcaaaccaaaaaaaatgctagccagtttattattagaagggaaaaactcctattaatattttcttgtttatgtttgtgttttcatgttagtcttaaaacaagttactgtttgagaatgtragaattttaaccatttacaaaatggtgtatgatatgacatgtatatgatctctcacaagtgaaatgataatggaaagtttactgaaaatgtcttaacagttctaggtaaaacttaatttttccttaatttgaaaattaayaaaagtatgaattagatttaatctaaatttattattctgttaaagtcacatgaatgtggaaaaaaatcagtatcacttctaactaaatctggccttgaaacttctttgacatagtcttcttaaaatatatatatcttatattctaaattgtatattatttagaaatatgctatttctaaactgaaatgtctgatatttctaactgatatatatatctatatatgatatgatatatgattatatatatgttatctatatgatatataatatatgatatatatttctaactgatataacaatgtatctcagttcttagagatatgtaaattatattttaatagtagcctacaaagatgatacaagaagataagaaataaatatacttttatatataaaatagttcaacagcaagattcttatttagaataattttctacagttttatttagggtagtttctatacagaaaaaatacatattttatctcctktctgtgctaggctctggagatgcaatggtgcctccctcccttcctggagcttaccaagcaaaacaaattcactaaataaaattattcctaattgtgttttaagtccagtgaagagaacacaggagggaccgagttaaacagtgtgtttgtgtatgtctgtgtatgggtgtgtgtctgtgtctgtgtgtctctttgtggctgtgtgtcctagagatgtactttagttggagtggtcagggaagttgagaactgaaagaaccagtcaaacaaacattggggagaaggggattatagcaggtacaaaggtcttgaatatccagcagatatgaggagcagaaaggctatctttttcaatcacttaaaaaggaaaagaagtgaaagattgctgtcttaagaacttaaatttatatggcactcatgtatagatttccagtgaaaagttggacaacgtgaaatgatgggtttcctacctacaagtctccagtgtttgtctttgactggggtgttttctgtacatatctgacctgatttctgttgctagcctgtcttcccaggggccttggtgagccgaggtcagagagagtggacttcacctaggaaaaaaggaaaggcttctgacataaaagtgcccttgaaaatgttctgctgctgtaaatcccttctctttacacaaagtttaagaccctcccaagagtttgacttgctaaactacaagagcatttttattaggtgtaagatctcactttgactttaagtagcaagtgacacaccaggcaaccctcgctgaattctctcttgccataagtgcatagatttcagtgttctaatgcctctctgagctaaatttgcctctgatctgagttctaaatgtaattggatagtagatatatgtgagtaaaaaaaaattctaccaaatggttggaatagttttcccaaagaatgtaatattggccttcagctggtaataggatgtgcctgctggatgaatgacatggttgatgcaaaagacagatgtaagccgtggttccccaaactgcagtagggatgagcatgacagccacacatatcaaaggccaggtactgatattcttactggaaagactgctcaggatgtatgtggtgttctttttcctggccacccttaaggagtttatgaatgggttccatcagcttcaaacagcaaacacagtttggcctgtatgaactgaaacccatcacacatcattgccacgatcattttcctcatgtatgcaagttctcaagtatatttttggtcacaaaacagcaaaatcatgacaaaagcaacaataacaaccaaaagtaactaaatacgatttttatttagtatgaaatgtattgcattgtaattatttcaacatcataacatttattaaagaygtatgtatcactttattattctatgctcatcccccctctttatacaaaatggagcataatctgcacattcattgttctgcagtttgtattttgcacttgacagtatgttgatacaaagagaagctacttgtgttgctctggaagaactttattgagatataactcgtatgccatacttttcatctatagaggttatataatgtattgatttttagtatatttacgtagttgttagttaatatctaccattctttgaccataatgaataacagggttttctctgcacagatatgtccatttaagtaaagatgccaatgcagctaaatagaatcactcaaaaacaactcsaaaatgagccagggagagtggagggaaggaaaaggaggaatgcatccaaacatagccctacgttccatgaacactcagtaacatcatcaaaacgtgatgcaattaaattttaccaggtttactgctgtcctgatgctttccaattttttttgacaacagttttgcctttttcaaattcaaatggtataattggggcttggtagttgatgtttatcttaattgaaacagattctcttcatccttttgctctgagactcccactttgaggctgaaaggtcattttaaatctgcagagcactcgagaagccacataatgaattcaaacaaattcatgcctattaaaaggaggcttctctttctcaacttccagagcttacatagaataaaccatttggtttttgtctgactttcttttaaaaggaagttattgtgcttcctttttaatgctctaactacagagaatggggaaatcctgttttcatttattcttatcagaaagaaagtgtattttgctcagtaattgcaataaaatactactggggttacagctactatacttgtcaacaaatttaagggatattctttagctgcattactttaaggatttcttgtctatcttttatctagcaacttcattttttaacatttactctatgtacttgtgtaaaggtgcaaaaaatatatgtacaaaaatgttctgctggagtttttgtaacagaacactggagaaagcctaaatgtcaatcggtatatggctgattgaacaactgatgcacaactataagacaatactgtgcatctatgaggaagacctctctagtatgacactatctccagatgacatttactattgtattatttttatactttgaaaagaagatatgcacactcccatgtatccattttcactagttttctttgtatatactcttagagtttatgtaagtgcaatgaaaacataaattctattctcttcctccctttttaaacaaaaagaagtataatctgcacattcattgttctgcagtttgtattttgcacttgacagtgtgtcaatacatagagaagcttcttgtgttgttctggaagacctttgttgagatataactcacataccctactcttcatcaatacagggtgtataatttcgtgatttttagtatattcacacacttttgcaaccgtcaccaaaatcaatgtagaacattttactaccactataagaaaccccttaccttatagttatcaccctccatctcccccattacctgctccatatcacctgcctcccttccaccccacagctctaggcaacggctaatctacgtttttttcctctataatttgcctactctgaatgtttcatataaatggaattatataatatgaggtcttttgtgacttgcttctttcacttagcataatgttttcaagtctcattcatgttgtagcatatatcagatttcattttttaggaccgaataatattccattatatgaatataccacattttgcttatttattcatcagttgatagacacttgcgttgtttcactttttggctattttgaaatgtgctgcaatgaacatttatgcaaaagattttgtgtgtgcatatattttcctttcttctgggtatattcctagtagtggaattgctgggacaaatggtagctctaagtttaaccttttggttattttccartgtatctgcattctcatgtttcttacagcagaaagttattctcttgaatggctgcatcattattgatgtagtcaaggtgtatttttaagtggaaaagttaaggcacaatgttcccagttatggaaaaatatgctaagactgtacatacataaatatgtttcactcaaaagcatctttctgcgtatgcacttaaggtgatggtagaagttgctagctttgaggaagaggtggctacacgtttggaatctgaggtagaagggggctgagtactcaccattttaaacttggggaaattttactatgtgtgctaattaatttttcaattgaaaatttgattcattaatgtaaagaagaagaaatgtaaaaaataaaaaagaagaagaagaagaaatgtattttcctggactcctctgaccaatgttggtcaggccaggggcttcttgacctgtgctttgtttgagtcatccggcaccatgaggtgcttagtgctgtacaagcactcttcttgccatctgctctgcttgacatcatttttagttattaggacaaaaaattaatgactgcttttctatctttaagccaagacaccatttaaaaaacagacatttagctcttactctaaattagtgtttcttaaatgttttattcaaatcaatccacatcaaaagcaaaataggagggaaaactagggtagacatctgagtgaaccttgggattgagaaataggagggtggtatgtgaactaatcattaatggtattagcaaatagagctgggcagtctgtctgaagtgcttcccagttttttgtacattcttctccaagtatcatgtgttggtgactggaagagggagtctttactttccgcacagtttccatcatgtagctctggaagggctttgtgtttgttctcatctttgcttgagaatcagctgtcttattttgggcttttctattttttaagacaaaacctacctatagtggttatacatgaaacacaccagtagatttgatttctgcctttggttaaattagtttgccttattaaatgataggaaagaatcaaaattcgtttgccttatagatttgttcattcttatattcactcatgtattcattaagcatttatttattcaacactcctatgacatcactcctcactgagtgatgattccttctagggtgccatagagggcttgatttccagctggaggaagaataatttaatatcctttttaatgatcaaaattctaaccaaacccaattttgaaaaataacttgactttgcctaaaagtacattaagaaagatatagaaaagagattctatgaaaatgaaatttaataatgtaaaataatttggttttatcagaaattcataaacagactttacttagagttaaaagtccctttgagaggagtaaaatcattaatgaaaaaaatgcatacattttcttcaatcatcatctatatcccatcgtgataatgaggagtacgctgtgtgtagtgmctgtgtttgcaggtggagggagtttgagtaatggaagtaataaagatgctcccagaacaagtaccgcatccaattagcttgccaattaacaatctattcctgaagtatttgtttatgaagatgattttaactagagagaagtcatattttattttgtttatatataaagatatgttaatcataaaatgtattcctttcaaacagttatacatttttcctttggcagcactattgtttattttaaaggaaaagacagtaactaatcacagcatttttaaagaaacaaatagagattatgctgctgtaaagccagcataaagccatttttccaaatgtcaacagagttaacaaagaattttatgttgtaaaaacctcacagttgcctagtttactccctcatcaaaaaaagagggggcaagattctttgacatttttatgtataatgtgactagagaatgtgacttcagtgatgatgatgatctaattgcaatgctaagaaccatggctgggctacgactgtgtgtgcacgttgttatgctggggagcaagggtacctaggaaagaaagcaataatgaaagtatcacttgggtatttgtttatttctggatcttattctatctgctccatattatcactttggcatttaaaatctagatgatggctgggtgggtgcagtagctcacacctataatcctaacactctgggaggccgaggtgggaggatcacttgagtccaggaatgtaagaccagcctkggcaacataggaagaccctgtctctacaaaaaaatatttttaaaaattctccaggcgtggttgcacacacctgtagtcccacctactcgagaggctgaggtgggaggattgcttgagactgggaggtcaaggctgcagtgagctgtgattgtgccactacactccagcctgggtgacagcaagaccccatctcggggraaaaaaaaacccagatgatatggttaaccatattcagtcattattcagttattagaaaataagatttacaaggcatccatggaggggaaaacaattacacacctggttagttgggctgaggcttgcagagakaaaatcacctgcacactgttgcagagccagtgctccaacctagacttccggacaccaaagcctatggccattaagcactctgctggactgtatcttggatagtttgctttatggggaacrtagtacaactttacaatacaactttaaaaataaagtatagcagagtagcagtttgtccacagtcaaatatgaaatatgtaaacatttcacaggttctttttttaatttttattttaggyttgggggtacatgtgaaggtttgttatatgggtagactcatgtcacaggggttggttgtacatattatttcatcaccngggtattaagcccaaagcctaatagttatcttttctgctcctctccttcttcccaccctccctgatcaagtagaccccaatgtctgttgtttccttctttgtgtgcctgagttctcatcatttagctcccacttataagtgagaacatgcagtatttggttttctgtttctgtgttaatttgctaaggataatagcctccaggtctatccatgttaaaagacatgatctcattcttttttatggctgcatggtattccttggtgtaaatttacctcattctctttgtctaatctgtgactgatgggtatctaggttgattccatgtcgttactattgttaatagtgctggaatgaacattcgtttgcctgtatctttatggtagaatgatttatattcctctgggaatatgcccagtaataggattgcatggtcaaacggtagttctgctcttagctctttgaggaattgccacactgctttccacaatggttgaactaatttacactcccaccaaaagtttgtaagtgttcccttttctctacaaccttgctagcatctgttattttttgtctttttaataatagccattatgactggtatgagatggtatcttgtggttttgatttgcatttctctaataatcagtgttattaagggttttttcatatgcttgttggccgcatgtatgtcttcttttgaaaagtgtctgttcatgtcttttgcccaccttttaatggggttgtttgttttcctcttctaaatttgtttaagttccttatagatgcaggatatttgacctttgccagatatatagtttgcaaatattttctcccattctgtaggttgtctgtttaactctgttgatagtttctttggctgtgcagaagcttttaagtttatttagatcccacttgtcaatttttgcttttattgtgattgcttttggtgtctttgtcatgaatctttgcctgytgctatgttcaggatgggattgcctaggtcatcttccagggtttctatagttttgggttttatatttaagtctttaatccatcttgaatttttttgtgtgtatggtgaaaggaaggggtccagcttcaatcttctgcatatgggtagccagttatcccagcaccatttattgaatagggagtgttttctccattgcttttctttagctttgtcgaagatcagatggtcctaggtgtgcagttttatttctgagctctctattctgatccattggtctatctggctgttcttgtaccagtaccatgctgttatggttactgtatccttgtattatagtttgaagttgggcaaggtgatgcctccagctttgttattttttattagaattgccttggctattcgggctctttttggttccatatgaattttaaaaagttttttctagttctgtatttcacagcttctaactacattctattgttggacatctttatattttatccaaataggaaaacattaatttaaaattcttgtcatataatctacaaaatatttatattcaaggcacaatgacccttacatattctttttttcttttctttctttctttttttttttttcgaggcaggatcttgctctgttacccaagctggagtgcagtagctcaatcacagctcattgcagctttgacctcccatgcttaagcgatactcccasctcaacctcatgagtagctgcaacaacaggcgtgccccaccactcctggcttgttttttttaattttttttgtttttttttttgtagagacagtgtctccctatgttgcccaagctggattcaaacaatctgcctgcctcagcctcccaaagtgcttggattacaggtatgaaccaccatgcccagcccttaaaatagtttttattataaaggcaatttatgtgcattctaggtttctttaaaaacctagcaagaggccaggcatggtggaatgccagaaatcccagcactttgggaggccaaagtgagaggactgcttgaagcctagaaatagagaccagcctggcaacaaagcaaggccctgtctctacaaaaaataaaaaataaaaattatttttttatggtgtgtccctgtagtaccagctctcaagaggctgaggtgggaggattgtgttcagggtgcagtgagccatgattgcaccactgcactccaccctgggtgatggaacaagactcttaaacatacacacacacatatacacacacacacaatacgacacacgtatagaaaaaataaaaatacaaatataaatttctcataacctcaacacactcccaaataatcactgctaattcttagttattttcttctattctttttccaagcaagtatgatactaatagcaattacctggattgtacagttttaatttctttttttaatttagcattttatcatgagcatttttccatatcacttaacattatttcaaacattacttatatggatacaaaatgtttcaccctaaaaagattttgtaacttatgtatttgccaattattggatattcaggctgtttctagcttttcccaattattaaaattatcagcaaggaacatctttgaactgaaacattggcttatctctgaatatttccttagtaaaataactatgtcaaagaatatgactattttaagactattaatatatgttgcaaaaaatacttctctaaaggttataccaggttacactccaagccacactgcttgagagttctcrtcttactgtgctgctgcaggaaatgtttttcattaaaaaaaatctttatccacatattaggttaaagtggtatttcagtgttgttttacttaacacttttggactactggtgtgaataaaaatggttttaatatttttattagccatttatcttctgttaattttctgtttgtctcttcgcttattttctattggggttgcatagttttttactttttgcaagagttctttatgtattagatagatgaaccttctccagctcacatttattgtaattatatattccaatttttagtcccctttttacttttgttcatggtgttttatacagtcaaatttattgattttttttcttttgtaacttctttctttgctttaataatttgagggcttttatcttaagagtagataaatgtttagctacattttccgtatttgtgattttttaacctagctcttaatctgtttggaatttatcttaatataaggtagggatacaagtttattttttcccrctatacgtctcaggaccatttgttacatgtgccctactttgcttattgctttgtgtcacagataaaattttatgtatcatctatcatgtgtagacacctcagatataaattacattttacaaataacatctcaatagaaacaagtagaaaaaaaagaactctggtgcaacccattgagagaaacatactacattacaactataacaatgatgtaactaaatttctatttgccttctaaacctttttattgcttgtagccatttgctaactcctgaagaaacttttaccttttcttgtcccagggagttgattatttaattacagtagcataagacaaaatgataaggattggaatccgcaatgagccctttcactgggatgaagcagaggctgatgggactgggtggtaggtgggtaaggtggcagatagatgcaagagcaggaaccactcaccaggcactaggaaaagctccatctagccaggcatattggcaatagtgtgccctgactagtctttgggggcaaaacataacagtctcctaaaaagtggctcagaacaggtaattcctagacatatgcccaggcgtgaacaggacaacttattgaggtatggaaataaaatcttatattttttcttatccgctcacaaattttctttttcttgtattttgtaaaatagataatattttgacataatagtgcaagaacataacttattgaaaataaatatacgtaatggaggtgcttgcacttttttttttttttttttttttttttttactaatagatacggtatccaataaaattggtaatcactkgtctggatcatgtgacttcaggaagctctatacaccagcttgcagttcatggatgggacaggaagagagtatcttaagcctatgttggaaggccaggtggactggagtctcagggacggaagataagcacagggaattaaagcagaagccagtagtaatcagagataagacgtatgttcaagttaactgcagcaggatggtgtggtgctgggctcctgaatctgtttctgcctaaagtcatatctgtaaagatcaaggaggaggagccagagcagcaggtgwggttcaagtgattaataacactggaaaggagaacaggttgcagaaactatggctcaggctacctattcagccattttcattttttgtaatgcaagtgcctattacataatcaagggtatccttagtaacatatgaagcctacattctatttccatttttaaaaagttcaccagtaaacaattgtacagcaaattttatcaatgtaaaaagccattgtactctatccagtcaaaccatattcacctctcctaaagtgcccattacggaggctctgggaaattgaagttgcccttaatcttgagttacaatgggcagggcctctttttttctctaaattttactcaataaatgcaggcttcctatgcattaaatggtgcccacaaacattgaaactactagctcacctcctgaaattcagcactttactatgtgtctttcaatgtaagagcattcactaatttaacaagcattacataacatgtgtcattaatgagttcagttagctaggccatggaatagrtattcctgtaaatcaactcctttacagttactaactgacttagtttcatggcagaggcatttatttcaattagactgtggttcctgttgagataaaatgagatcaactatgtgacatgattttgaaaaccatattatattggtgcatgaatgtatatgtgtgtgggtgtaggtagtttacagacagaatgtgtaacataggcatgtggcttgtaactgaaacttttacaaaacctagttcattctcattctataaaagtgtgtacacacatgtgcatatacacacacacactgtgataatgtatctgtgtatttgagggttataaatatttagttgtagagttctgacaaagyagtaaaatagtctcacttcatctggataaagatcaccatctggaactataaaaattgcaatgattccaaattgttgaatagttggattgcatatttacttttcagtagtatgttggcatgcatgtagatccagccttcctttcaacaaagaacagtggtggaagattcccttaaatggttactctttcctcaataagagcaaccatataaaaattatagaactattagtcatcatagttgaaagtatcgcataagattaacagagtccccatctggtgatatgtttttacatcagatttattaagatcagagcgggttttaactagagcaatgacactgctattattaaataagagayggaaggcctaatacataattgtctatttctttctagacatttatgtgtttttattaggataatgaatacagaattatcaacatcatgatcatagkttttttggtttttaagtagtatctgtaatggcaagctcatttttattttataacctacccacacacagacctacagtgaagcaaaacagatgctgaaatatgtttgttgccattggctttgaagaaacctcagagaggtttgcctcagtattttaaaagcaaaatggttggtacctttctgaatagatgtcattgtgtccttcaaacaaagctgacactgtagaaaagaaatggattgccttgtctttttaccagtgaacatcttcacctgaacaaaactyatcaggaaaaataaaggattttcgaagtgtagttgttgtttaagcagatactagttattccatccttacaaatattttatatataatatatacatttatatataatatttatatgtatatttcatcacacaccaacatccacagacacacacacacacttgtttgactacttcctctattccttgaaacgcttttgagagacctgaaatatccttgtatggcaagaggggaatggaatcaagctgatttttccatttttacaatgtgcctgggattgtgctttgcagtttagtggcattttctgattcaacctcacagagccctgcatggtataatattgtctacatttaagatragaaaagcaagatgtggagaggctaggaaatcttcccaaaggcacgaagctcctggcagaaccaggatttgaggccaagtatcaaggttacagtacagatagacatacatacactcaattataagtaaagtttttatgaggctgggtttgacagcaacatgataagtagaagtttttgatttggtaagatttttcraaaactcagagagtttattgccaaatttatttttctcctagaaacatttttgttgttgttgttgctggcatggacagttataaaaataaattagaagtaaacagataacagtttcctggctgccttcatgtctgtgagcctaacacggctcccagaaggaaaaaatatgcctcaaggaggcttatatgatwttgcttatttaggraacctttgaccacttatttacaatatccagttacagctgtgctactttcctttttgggcaaaagcacatattcgcttgaccattattttggaggaagctgatattgcctgtcacttccaacatgtccttgtgtaccctagctcataattgcagcatttaagcttggagctcccctaacaacacaattattgccaaatttaccatcgttgggaacattggtgaggcctgcttcagaggcctctttgtcagcaagaagcatgttgcagatatgcttcaccttgcatcataaatgcatttctaaaagtagtttcctattgaattattttgtaataacatgtttttctaactacaaaataaacacatgttcattgtggacaaattgggaacttcagaaaattcccaataaatattccaatatttattaatattttataaaatacacataacctgtcattgcagcttccagggatagccatcattaaaacgtgttggtttatttcctgaataaacctttaaagcatatacacacataccccacaaacatgctcacacacacacatatatatatatatatacatttttatggtcatatatatcctattatgtgccagatgaaatcaggtcggtctctctatacacacacacacacacacacacacacacacacacacacacacagacacacacacatacatacatatatmtatacatatatatgtatatatgtaaatgtacatacatgtatgtgtatatatgtgtatatatgtatatatatatgtgtatacatatgtgtgtacaygtatacatatatgtgtgtatatakagagagagacctacctgatattcatctggcacataataggatatatatgaccattaaaatgtatgtatatgtatatatatatatgtgtgtgtatacatatattatttcyaaattttkaaaatttttatttattattttttgagatgaagtcrccctatcgcccaggctggagtgcagtggcacaatcttggctcactgaaacctacgtctcctgggttcaagtgattcttgtacctcagcctcctgagtagctgggattttagttttgccccaccacacccaactaatttttgaatttttagtggagacagggtgtcaccatgttgcccagggtggtcttgaactcctgaagtgctgggattacaagcatgagccaacatgcccagcctgtatatatatataattttttattctgcattcttcgcttgacatttttaagaagtattttctcgtgtcatttaggattctagaaaaatctgatattctaatggtgacataggaatccattttacatgtaataaaatgatttattcaatatttagccattctttcattgttgggcattttaaattttcctcttttttctttattgtagtggttcactaagcatctttgtagaagaaatgttaatctgtatctctggttaattactttggcaaaatttttggaaatgctattactgggtcaaagagtttaaatggtgtctaaacttgtcaagacatactaaatatacttccagatagtttttacaacaaattttaagcctacatataaaaaaacagttccggtggctcacgcctgtaattccagcactttgggaggctgaggcaggcagatcacctgaggtcaggagttcgagaccagcctggccaatatggagaaaccccatctctactaaaaatacaaaaatcagctgggcatggcggtgggcacctgtaatcccagctactcaggagactgaggcaggagaatcacttgaacctgggaagcagaggttgcagtgagccaagatcactccactgcactccagcctgggcaacaagagagaaactccgtctcaaaaaaaaaaaaaaaaaaaaaaaaaaaaggttattttaagaaattgtatagtgaattctcttttttaaaaaagggaaaacattwmtatatttattaatatttaaacctgcagttttataaaattttgtctagtccgacactcttgttttacaaatgggaaattgaggccccagttccatatgagagacaaatacaaaaatctgccttctaaagctggtcaaaagcagttatatctctatgatcaattcagaagttgagtcctctgttgaaatgatttcaatagttgaggtgattttactgtttctctttaatgttgtgatatattttctctcttatacgactctatagtaaaaacgagaatcattttactcaatctggttcatgtagcagtatcaggctgtgaaattcatactgctcagacactggttctccaactgtgatgtamgtaaraaatactgtgcctgctgtctcttaaatgtagagtcctgatcttcatccctaagaccctgattcatttgctttagataacactgagagctaatcatttttagcaagcatcccaggtaattctaaggccatattgtgagaaaagccagtataacgatggagaattcttatgttgatgctctgacactggctctacatctgtccataatttatttaactcctctctgcctcagtttccttatctataaaggaggaaaggaaatgccagtctcttccacctgggattcttgtgagattaaatgaaataagccatgcaaatgatttaacacagtctacagcacacagtaaatactcaataaatgtgaactcattatcgttactgttgtcattggtattcatattgatatcattattcctgcattggaaaatgtaaatgtacaattttaagtgattagcattgctggtggattattgattgcaatttgtcctgctgtctcttctgacattgctaaatttcatttacttaaatatttcccttatttttctcttgttcccacccatgcaccccagtggagttgaaattgagttgagatcaaatgcagcaggtgttgctcagagaatttggtaagactagttgaaaaaagatcagtgaaactttatcaaaaatagaatagtgattctcctggtcacctgcttagagaacccattaagaagtgtgaggttctccaggccaccatagagctataatctgcaccttgtatcagccatagcaggtatttgcacagtaaatttcccctcacctagtttattcataggtctgatcatagcacactacagactcaaactcctgggctcaagtgatcctccaatgtcagcttcttgagtagctgggactacatgtgtgggccaccatgcctgaccatggagttcttaaaaatggatattgacatacatatatagaaaattcattcaataaatagttatcactttcctatacctggtgtgagaattatgctagatattggaaatacagaaatgaatatattaatattaaagtcacttaactaagcttttccctgtgataatctttctgaaacaaagcaaaatgatacagaattctttaagtactattcaatttgtggctatttcctcctaaagatcagtgtatctgaacttgctggctgctagatattttagtcatttcaaaatgtactgatttggctaaagaatctactttgaccaaaataggataccttaaaatacaacatcagcaaaatatgtgtaaaatccccagagaaaagccctcttaaatgcctacttatttcaagtcaaatttagttaaactacataacttagtcccctgagtgtcagtggaatttctcccagagctgtgacttcgtcaagtaaagttaccctctctcttgacctttggaaagagatggcatttgttgatagttttgtgtgtgtccttaagctgggcgcttaacaaatattctctctaacaaatattctctcattaaaacctgaaacagccttttcttacacctagaactttgtaaagaatatgtcaggaataggacaatcaccttttaaggctcagacagccaagaagctgttttctttttcagtcaagtgtagagagcatccatgactgccaagttctcagccatggctggtacaggcgggtgcagtaggaggcacagttgccactcctcagaaagaacagggacatggctggacccattgtcctacttgctcagggccaggcagggtagcagacctagttgttgaatgcccttttattgatagttatttaacttcaataggatcttgtttttatggtaggcagatggtccttaattggtttgaactttgtcctcttttcatagcagaaattcttaatctgctgcccacaaataagctttggagatctgtaactcccttaaaataacaaaaatgtacaaagcatttagtaagtgtcatacagtgtgctgagcacttcacatgctttatctcctttaaatctcataaagactcatcacataggtactgttttcattcccatttttaaaatgaaatttaaagagactaaatgacttgaagaaggtcacaaaactaaatagcagtagggtcattattttaggccaggttatctaactccaaagcccttagcttaatcactaggctatactgaactttatggaattacatccaaaagggrtgtgtgtgtktgtgtgtgtgtgtktttgtgaatttttccgaagactcacatttccaaagatttataagtcatgtcgttctcaaaggggtctctggtctccaaaatttgaaactctttgcaacagggtggctatgttttagaatgacataaacagatacaatgttctccaragtccagagcagggtctaaacctattgggatactatacttgtgttatcaactgaaccacttggttagttcactaggaagatctgcaggtcttgagctgagcttagtgttttacagacatgtgccattcattcatcacctacaccactcatcaaatatctgaagaactatgaaggctgaaggaaaataagtgggtgagcacaggtgcaaakaaataataaatttggagcattctatttcgtgttatttcttgctaaaactggcatattaccccaaacatcaattgcaatatgctattcaacaagagtttttaactagtttataataggaaaattgctcttttttaaaaaccagggttaaagtcacatcctttctctcctctgacaaagtcactgtcacataaaataatggtcctagagtcaaaataataacagaactttgttctgatggagactgtaaatataccaatactcccattaaaaatataggtgggctgcctgaactgagaaggttgtgtcatggctgttagttttaataactggaaggcttgacagagataattgcrttagtgcttcactggcctcaagatgcatgcaatgagtaaaattaagaccatcttattaaaataccaaagcattgtataggaaactcccatgtattcaaaggggaaagaagaaaaaggaatttcatatttacrgagcatgtactattttcaaaactctgttctaggtgctttcacattcattaactcattttaatatgtgagtgctttgtaatcctttttgagtgttgcaggctcagagagggtaagaagctttgcttaaggtcccctagctggcaagtaacagaacctattcaaattcagatctgatttcaaagtgcatgtagtttttgccacagtacgatgcttggggagctaaatggcatttgggaacctagagttaaagcatcagtattttttactaaggggccattggatcctagagaggcaacgaattataatggataaaaatacaaatttcaggcaagttacttctcttagcaccattgctttatccggcatagtaataaaaatcaaatgagacaatggatatgaaatgctaaaaatagtacattctctgttgttatwatctattgtgattattgtgttacccttggaaaaaggcctgtagaatagyggcagctgggtcccctggacagtgaactaccaacctaaaaactgtctgggcaggcttgcctttgggagttcttgtatatcagctctaattctgtccaggaattcagaggcagagagcagggttgaggagaatttcacaggtggtaagatctccggtgaggaggcatttcagcaacgtgatcagtgttgccaaagctatgaaagatgttgaagaacacactttctacctgagatatcaactaaagtttgaagcttcaggagaaggcatagttctatcaacagacagcagtacagcaccaatagttaaaccctatatggtagatttaaatgctgagccttcaaaatcatttgcctgttttactttagctccagcaaagggatagagaaacccttcttctgtcatccctctcccatgtttgctgttgcttaagcagtatttattttggtaacaagaatacctggccttgccacttaatctccaccattccaaagaaaacctttctgagatcatcttaacgttgtctctaggcaataaatatctctggtttctagttattcccaaggacactgacctcacatttcttactgtcttaaagtcaaaagtacctttgtccttaactcacaccaatatgtatgagactaggatatgagagagattgttacatcttgcttgatgttttgacattwtaggtagtgtaggttttgttattacagtttgacttttgaaatgcgtatgagatttctcaggtgaaatagagcctttgatgtggtactcaaaagggataactatgactcagasgaaccatttctaaaagatggcactctttctccttccagttctttctgttcaatagtagggctggggaaaggcagaggcagtttttgttatttcaaatgacagcatcaaagatagtaatccacggtgctcaacaaaagtcgaatgaccttttttccttctccattcataaatacataagagctgatgcttcattatgtttaaatacaaaatgcacactcctactttgttttcctatatgtgagttctcatgtattcttcaaatgctcatctaattactgttacctactattccaaatgcaaatgacaaggtcccagtttactgttgatcctatattacaagagtcatcaattttggttgagaaacacaaaggacaaatatytcattattgtgctaaccatgcctattattagttttgtgcccccataacataagtaatagccccaaatacatggcacttatcacacaccaggcataattctaaatggcatgttctccatgttatggaagaagagactgaggcatggagagagtgagtaacttggccaaactcacaaggctacaaaggcagagaatcaggttttgaactcagggctgcctagaccctgtgttcttaactatcatcatatagtgtctctcttactgtttctcactgaagatgagagaggattaaaatctcaggaataaatgtaacctccacaggtaggcttatgcataaaattcagatgcaatgaataacaaaatgactgcctcccacaaaattaagaagyaaacatataatgaggacttactctgtgcacacactggtgaggacacgttacacatttcatatcacygagttcacacacacacacacacacacacacacacacmcctatatgagggcagtatgatttccccatgtgataaagaaggaaagggaagctcagacagattagatatattgtctgacattgttcagatagcaagaagcagattcaagatgcaagcatagaccagagaccattatttgagaccatgaggccttttctcaccagttattcattcacttaatattaatcacttaatatgcatttgctgagcacctgtcratgtcttgtaaatcagtgcaggaaaatcataagatttgaaatcacagcatctaggttcatatctcagcttcatcattaaccagcaaaccagtaaacctccctgtttgcagtttcattatcaataaaatgggttgacaaaaaatttatttaacagaaatgttatgaaatgcaaataaaataatggatgtaaagaaattggcaaatggtcaagcaaaacatgaatgttaattttatgatgattaaagtaaatggtatggagacccccaacctcaaatagctgggaaggggtagttgataaggggagaaatgtgtttaaagccagttgctttattattttaaccctgagataatgctttattgacagtgtgaataagatgtttggaattgtggaaggaagaactggaggtcatattacacatttcttactacatgttgagctttgaaaagtgagaatgatttcatgaggcagaaattggttgggtctaaaacttcattatctgtaacacatactccagagagtgagaacagtatgaccagaagtatctttggaggggctagagacaagatttgaagggaattaggacaagattttaaagtaacctaagtgccgtgataaagaatccacttttataggcaaaagtagttattcaaggaagtaaaataattacattttctagccactgcaagctatctctttttccttccttttcttccttcattccttcttcctttcttcctgcctttctttccttccttccttctctccctctctccttttttcccttctttctccatcccgtttaaccacacacaaaatcccaacagcagcgtagaaagtggtgttgaagagctgggcatgtgggcagggacaccaccaaggaaggtggtgtaatatagcctggtgacgacagctttggctcttctcaccactcccgctcccgagtaagcacagcatagaggaatatgagctgagttcagtgctgtccagttggaattgggaatgttaaagctagaaggtcagcaagtccggtgttctcaacctgacaacacatcaaatagctatgacagccttttgaaaatagagattcctggatccagcttcagctttaccgactcagagtatccaaaaggaggcytaagaatctgtatttttaaaagcctctccaaagtgatatgtagcagtaattgaaaaggacaatctctttacttcattgatgaaatagctaagtcccagagaagtcaagaggcttgccaaaatcacaacgaggtagtagcggggtcagaactcaaactcaaggctcccaattctcaacccagtagtattgcccagcatcagttcttatctttgcgttataaatacattcctgcccatcaacagtggattgcaaaagcagggaggaagagagggtggcaagggtcaaaaaatagctatcaggtcctatgttctctacttgggtgacaagataattagaagcccaaacytcagcttcctgcaatatagccatgtaacaaaactgtgcatggacccctggatctaaaatttaaaaatcaataaataatacaaaagaaatacattcatatttttctgaaatattcttcagaatatcaagtgggaatccctttgttttgcaaagctggtctgatatgtttaagtaaatttaaccagatagttgttttctgtatctccctctaagtattaacaaacatttaccatacactataaagcattacaatattgtyaggatgattaacaagagtaccaaaatgaaggactcttgctaaaatccttttccagctttttcattctactatttacagacatgtaagcacatccattcatttcagcaaaatgtaacattccacacaaaggttttgaacattgtgctcggctagagaatatttctagtgagtgctcataagagacattaaaataagcatttgtctttcattcaagctttatgaaggattaaaagtaatccaattgttcaatccttcatttaaatctttagtccaaagaacaraagatttgggattgagtcgtaatccagccatttaaatctatgagactctaggcacatcattgccctccttcctgagcctcagatttttcttcagcaaataaggataaaaatctacactcccaatcccatcacttattgcccagggtcactgtgtgaattccactgaacaatgcctgtgaaggtgctcagaaacaacctgcttgtgagggcataagaagcacaggaggaaaaggcctttgggaataattcttttgtctcacccaggacaggttatctgaccatcaggggcacagatggaactctttttggacatggcaagtgggtaaagcacccaaggtgccctgagagatttttttcatgtggtctgaagggccacatactttcgtgggattagtggcatatgtggtatggaaactcataattacattgcaaatttaaaggacagctctgtaggaagaagccaagagcagaataagcatagatgtggtttggattttatttttcctcttgtcaaatttaacttaagttctgaattctataaaraaagaaaaagagtggtgaaacagtcatattttaagatttttaaaagtcttaaagacatggaaaaagcaaagacgatacctacactgcttatttaaaaaaaaactcgatttgagtttcatgaagtactggcatttgctcactctgtaattctcaaagactattttcaaaatttggtcaaattaaatttcaaaggtcagcaaagtatataatcatgtttgggttcttttttcccccaagtttaaaaaactgacatctatcctttttttaggctatctgaatgtatgaaaaaagagtagaagttattttacagcatatatttttctgtaaaagtaactacatttaacattaaattatttaccagtggtattcattttatataagcaggctggagatggaggttctatttacatatttccactgtcatggtacagtatagtactaagtattttacaggccagcaatcaaaagaattacaattgctactaggaaacactaaatctgaggattctgtcatgactatgtatagctggttagaaaaatctttgctgaattgaatggctttctcattacagatggccttgtttacactgtacttagagttctgtgtgccattttggactcctcattaaaaaagcataagtcattttttaaaagaggataagtgggaaataaaatgggagccaagattatatcgaataaattctacaaaaaaagaaaaaagaaagacaaaatacacataattgaatatcataatctatctagaaaatagatgaagtggcacaaaaatggatgaatatattcaaatgtttgagaaatattacttcataaaaatgagagaaattttaatggctggagaagtaaaacttgattttttatttgagaacatagttaatgtcaaaacaaagaaagtcagcaatgaacattgcttctcaacttgaggtgattagagaagaggtcaaatgcctttagaaaacagctgtgcatttatcttggctgtggacctggcaagtcaacaggatttatgaatagcctcaccatgaatttggtcatcctgaggggaaggaaaaccccaaattaattttggagcagaagatcagtgtaactactaccatccttacgtcttctcaatgagcttcattattcctcccagagtggctagagtaggtagttgatgagcatttgtggaatggataggtatctcttttctatgacctactctatcaccctcaggatctattaatcctttgagtttgatctctaaggtggcaatgaaatatttcttayaccagaaayacactgaaactcagagaaagagggctcaaatttgaggagagtgctatactggcaagaggatgccccaggtaatatcctttccttcttctagagaggaacatttggctctagaaaggcatttagcctatgagttcagaacaggaatggtcttaggcatctgattcaacctacgacattgccagtctgaaccaactcatccygatcccactgcaaatgagctaggcaacagtgaagagtggttctagtctgggtttggataaattgtgaaatatttctagaatttttctatagactctgaaccatttccccagaagtgtgcacattcaaaatgtcattttgcttcagaataacattttgaataaggcaagcctaatttttgttttttaacagaattttaaaataattaattcacaatatttgtacataggataatgggatattttgttacataaataggatgtataatgaccgagacaaattatttagggtatccagcaccttgggcatttatcatttctatgtagtggaataatttcaatttctttcttctggctattttgaaatatatgatacattattcttaactataatctccctattctgctatcacacattgtaacttatttcttctatccagctgtatgtttgcatacgttagccaacctctcttcattcccctcctcctggtagctatcattctattaccttcatgatatcaactttttttagcacccacttatgagtgagaacatgccatatttgtgtttctatgcctggcttatttcacttaacattcaggtcaattcatgttgctgcaaatggcaggattttgctctttttatgactgcatagtattccattgtatgtgtatgtgtgtrtrtatatatatatatatatgtattttctctatcggtttgtttgttggtggatactttggttgattccatatcttagctattgtagatagtactgcaataaacataggggttcaggtatccctttgatatacagatttcctttcctttcctttagataaacacccagtagggggattgctggattgtataatagttctacttttagttttctgggaaatctctatgctgttttccataatggccatattaatttatattcccaccaactaagaattcccttttctccacttcctcaccagcatctatttttttttttttttggtcttttaataatagccattctaaggtaagatacctcactgtggttttgatttatagttccctgawgattagtaatgttgagtactttttacatacctgttggtcattttacatcttcttttgagaaatgtcttcatgtcctttgtccactttttgatgggattatttgggtttggtttggttttgtttttgctgttaacttgagttcttggcatattctggatattagtccgttgtcagatatatattttgcaaatattttctcccatttaacatgttgtcttttcactctgttgattattttctttgctatgtagagatttttggttttaatatagtcccatttgcctgtttttgtttttgttgcaatgctttgacgtcttaagggaagcctatttcgatctggtacttctgaaatctcattggctcaagtgaagcacgggtgtaaatcctgagtgtttgttaatctcggttctgtgtgtcttctgtaatccagagacaaattcatgtgtcaggttcacacttgagctgatcctctgtaactttgctgattgttgttaagacagaacagaaccagactggctttcactttacacaacaatcacaactgtgtgtaatgattatagacttattctctaacatctcttaagcacttaggtaatgagaaatgtcataatgaaaatatctgttaaccgaggaagatcaagggaacaaaacaaaaaacctaaatgaagtgtgaaggtggtagaagtaaagacatagatggtttcacttgggccagagatagattgaatgtgagacatttgaaagtctaatgtactttcagtacgtactttccagtttactttgatggaacgcactgtgttgaatgttattgtgctgacaaataagcccccaaattaaatgacttaaaaaataaactcattcttcatcaagtagcrttctrggatggtgtttaggaggatgtggcagctctccttgctctcagtcacggaccaggattctcccaccttctgtttctaccatccttcacgcatcagcatctttagcatccagctggcagaaaaagaacatcaagataggcatgtgggaggagctatgagccagtcctgaaagtggcatgcaatatttctgctcacatctagtcacttggccaaatctaattgcaagggaacgagaacttcttttatgcccaggaacaggcagagaatggaatatggcagacaacaagcagaatttcctatactcacagtcctgattattgamttctatgctttcccaaggtcattttgtcttcagccagattccatttcaaggaaacatgaaaatgtttcttcactctataaaatcattgttgaagtagatcctgctacctctgtggtagcccatccaacatcttaaaacttttaaaagataatttgtaaccatacataattcacccaatataagaaatcatgagagaaagctaatctcagtgtacttattatacaatgagacacataatgagacatatctttttttattctccactatatattttaaaagaattgaagaggcaagtgattgtttatggccatcgtaagataatattcttatcattgctttgcccagtaagattgaaaaaattgtctgtaattcaggccacacaaccctctgaagcccttcgccattcattcaagccccattaaggcagaaaacccatctgtttggattgttgaggttggaaactgaataatatcacttctccaaaatagatttaatagtagggctggtgaatggtttcctgacctgtttgatgsagagtgcaaacccagaggaaaaacatggtatatgagttttcgtatccattagtctaaaagaatcagaattcggttatattttaaaggcaattatagtagaactattacttttttgttttctgttataatcttacctagacttatttaacatacttaacacataatattttaaggctaagtatttctacaaaggatttatcattcaatcattcttatttagtcaataaaatcttttggagattaatttttagtaagcctaaatacccaaatagccaggaatgtgattgaggatcacatttttaaaacccatccctcaaaaagaaaattgtaatatcttgagagacaggtatggtttgaagatcacccctcttcaaagtgagttcaatatctgacctaatggaatcactccccattccccaggactaggtgacactcactgatctgggaaaaataaacacgtgcaactaacaagagaaattttgagaattatgagtaagctttgaaaatttgggtactgaaaatagagagggagggagagagggaggtgatagggagggagggaaagaataaaaaggaatgaagaaaaaactaataacaatttatctcttaagaaaatagaaggygcagctgggtacggtggctcacgcctataatcccagcactttgggaggccgaggcaggcggatcgcctgaggtcgggagttcgagaccagcctgaccaacatggagaaaccccaaatacaaaattagccaggcatggtggcgcctgcctgtaatcccagctactcgggggcctgaggcaggagaatcacttgaacgcgggaggcggaggttgcagtgagccgagatcgcaccattgcactccagcctgcacaacaagagcaaaactccatctcaraaaacacataattaattaagtaatgatataaggtgctaaatttttattttcacccatccagtttcttttcttattctttcctgatatgtaattacctcagatgcagatctgaggtgaaactaatgaagatcaagctaagagcttctcactggcctggttccctttcaagttgtaagaagtggtactagcagctgcacgtagttttaggttttgtraaattcaaaaaactaagatttttttgtattatttttctgaaagcagacccttataattgtataatcttcgtgtaccacaaaaccttgatcccacccctgattgcatggctgactgctgttcaaacagaaggatattcaaaataacccccgttaaaatgccttcttagagatgttccagattatttcttcaaatgtgctaatcaatctcattaacctatttctttaaataagtgaccaaytcctagctaaattaaaaaatagttatgaagtttatttaaagtagaactacacagataaccatggtaaatgataaccggtatagaaaaagtaccgctgcgtctaaagatacccatgtattcacgatacaaatatttattgagcaactcgtacgtgtgaggcactgttgtacctgctgggggacacattaacgaacaaagtagatttttaaaaaaaaatctctgcacttgtggagcttatattctaatggggtgagtaagatgataaaataagtaaaaaacaaagttcatcagaagctgttaaatgcgatggagaaaaattaagagtaaggaaggttttttgtttgtttgttcaaaaaaaaaaaaggttaggaggttaggggtgccagttttaaataggccagtatgggaatatctcatgaaggtaacattgagctgatatctctagaaagaatatgccaggcaaagagaactgcaaatccaaaggccctggggagggagtatgcacagtgcttcaaggacagctagggaccaagaggctgagcagagtgaacaagagggagagatgtaggtaaagatgagattagagaggcaccagggaccaggtcactgagggccttaaaccattgggagaacgtagtattttctctgaataaaataggacaccattatgggataatgagtaggaacttgccgagaatgggcttacattttaggaggatcgctctgtctgcaatataaagaataaatgtgggtgggtggctggagaagtagcagggcacatcattaaaatatcaatgtttcaaagtcggsttattaaatcaattttacttgctctatgtcatagaaacaataaataaagacagaaacaccccgcaacactaccttgggtatttttctttgcttgcttgttttttttttttgttgttgttgttaatattttaacttttattttaggtttagggttacatgtgcaggtttgttatataggtaaacttgtgaccccgggggtttggtatacatattattttgtcacccaggtgctaagcatagtacctgacagttagtattttttttctgatcctcttctctcctcccaccctccatcctcaagttggccccagtgtctattgttcctctctttctgtctgtgtgttctcattatttggttaccacttataagtgaaaacatgcagtatttggttttcttttcctgcattagtttgctaaaaataatagcctgyagctccatccatgttcctacaaagaacatgatctcattcctttttatggctgcatagttttccatggtatatatgtaccagatttttctttatccaatctatcattcatggacatttagtttgattccatgtctttgtgattgtgaatagggctgtaattaasacatgcatgcacgtatctttatggtagaatgatttatattccttttggtatataccctgtagtttgattgctgagttgaatggtagttctgtttttagttctttcaggaatcaccacactgctttccacaatggttgaactattaataatttacattctaaccagtagtatataagcgtttccttttctctgcaaccttgccagcatctgttattttttgactttttagtaatagccattctgactggtatgaaatggtatctcactgtggttttgatttgtatttctttaatgattagtgatattgagcattttttcatacacttattggccatatgtatgccttcttttgaaaaatgttcatgtcctttgcccactttttaatggggcggtttggtttttgcttgaatgttcgtttaatttcgttgtagattctgggtattagacttttgtcaggtaatacaatttacaaacattttctcccattctgtaggttatctgtttactctctgttaatagttgtgtttttttttcctgtgcagaagctctttagtttaattaagttccatttgtcaatttttgcttttgttgcaattgcttttggcatttttatcatgaaatctttgccagttcctatgttcaaagtggtatttatttggttatcttccagggtttttatacctttagcttttacatttaggtctttaatccatcttgagccccactttgttaacaagacgctattcctctttggactttagcttgatgaagccacattttgagaaagagtgcattttggaaatatagcatcttagaagtgatcttagaaagtgaaagattggtagtaacctgctgtgagcagtacaagraaaataaaactgagttattcctgtgggactacagstgactctcaggtccagcctggcctggagagcatgtgcttttctgctcttccctccatactcttagttagtggtcagcacatgataataggatgtaagggaagaaataaatctctacttgttttattctcaatcacagtgacacctgcatgaaattgccagagaaattaaggcctcccaatgactaccaaaaaaaaagacactttccgcttcccattgtcagcacgtattctgattgaatgtatatgtttactacttgaagttctcatkatttctaggtaattactgcaaatatggacctcatactgctactgcaggctttgcctcaagagtccaaataccatggcctcatgttagggccatttgagatcctttttgaaaaagttgctttattgtgctaaaaacaaagacacataatatgagatctaccctcttacattttaagtgtatagtacattattattagctgttagcacaatgttgtacagcatatctctagaatttattcatcttgcatgattaaatgatacacattgaacaacaactctccatttctccctccacccaggcccagcaaccaccatgctacttcctgcttctatgagttcaactactttaaatccctcatataagagggatcatgcaatatttatctttctgtgactgacttatttcacttggcataatgtyctcaaaattcatccatgttgtagcatatgacaggatatccttcttttaaggctaaataatattccattgtatgtatataccacattttttaatccattcrttcattgatggatatttagattgtttccacatcttggtattgtgaatatacataaatgaatatgggaatataaatatctctttgacatgctgatctcaattttttggataaatacccagaagttgaattggtagatcatatggtagttctgtttttaattttttgaggaacttccatactgttttttatagtagtggcatcactttacagtcccaccatcagtacataaggattccaatttctgtatgtccttgccaacaggtttttttttttaataatggccatcctaacaggagtgaagcaatatctcattgtggttttcctttgcatttccttaatgattagtgaggttgagcatcttttcatatccctgtttgccattttttgtcttctttggagaaacgtccatttctttcattgggtttttttaattttgaggggtttcaattgggttttgggggggttttgctattgagttgtaggagctcctatgtattgtagatattaataccatatcagatatatggtttgcaaatgttttctcctaatctgtaggttgtattttcactgtgttttctcccttgctgtgcagaaacattttattttgatgtagtcccacttgcctatttttgctttttttgcttatgctttgatgctgctgtggattaggaaacttaatattgttaaaatgtccacaatgtccaatgtaatctccatcaaaatcccaatggtattttttatagaaatagaaaagcagtcttcataagaaaccacaaaaggctgaatagtcaaaacaatyttgaaaaagaacaaaatatctggagatctcacacttcctgatttcaaaacatattactaagtgacagtaatcaaaacaatgtggtactggcataaagacagacataaaaccaatagaacagaatagagccaagaaataaactcacacatacacagtcaactgatctttgacaaggatgtccagaatatacaatgaagaaaagtcttgaatggtattggaaaatggtattggggaaactagatattcacatgcaaaagaatgaaactaaacctttatcttaaatcatacacaaaaaatccactcaagacttaattataacacctgaagctgtaaacctagaagaaaatttagggggaaaatttcatggcattggtcttggcaataatttgagatgctttcttagagagagtttcagttaagaaaatttttcttaacagtcattaaaaagtaatgtataaacttcaagtaaaacaatttttggttggggctttctggttgccttagtcaactcaggccgcataacaaagtaccctagactggtggcctaaacagaaaygttctcacaattctggatgctgagaagtccaagaccaagattggctgatttggttcctgttgagggctctcttcctacatacagatggctgctttctcactctgtcctcacatggtgaagagagaatgctcttgtgtctctctctgttcttataagaacaccagcactattggattagggcctcatccatatggcctcrtttaacatatgaattctaggggaaacaagatagatttaacctcaacctcaacctcatgtaaccattggtgattaaggcttcaacatatgaattataggggaaacaagattcagtccataacactggcctaataaatacttttcagaaaaattggccttttatcatatcattgtgtcaaaagtgtgctaagcaagtccagcttatcctctttcatttatagtccagacatcaaactcatgctatcatttccatcttgaatctctttattgccctgtgttacttgggagtgtcactgacaagccagaaacatatgttgtatatttccagtaccacctaatgttttactcataagtaagcatatacccttcatctttgtaccagtgtgtgtgtgtgtgtgtgtgtgtgtgtgtgtgtgkatgtgtgtgtgtatgacaggatctcactgtgttacccagactggagcgcagtggcatgatttagactcaytgaagcctcagcctcctgggctcaagtgattctcctgcctcagcaccacaggcttgtgccatcatcgtgcctgacttttttttttttttttttttttttttgtagaaacagggtttcatcatgttgcccaggctggtcttgaactcctgagctcaagcartccactccccttagcctcccaaagttctgggattacaagtgtgagccaccatgcccagccctgggcttttgtttataaaaatcatctgtgaaaacaaagggtaaaacgtgtctgttaaatatcttaactctgtgcaaatatatatattatacaagctaacatgtgtagtataatttagctgtgtaatcttgtaaagtagctaaatatcatgccttctccgggtatcctacttaaatttaatatgcagttttatgattgattgggaaagattgccatctgtgcatatcactgtaaaatgctagtttctacagtctcatctccatagataatcagagaaaagtaaatattaaaatggtgaattttgcaaatcattattttgtttacttcagagaagctatttgacctgcagggaaattttcaatagagaagtatcagtggcattgattagaaacgagcttcataaccttgtgatattgataacaatgggtaaaatatttagtattataaagagggaaaaatgtatgtagtcatccagttacagttactctccccttaagctcaagggtaagcctcccctccccttgagggcaaagcatcaaaatgagttccaatgtgttggctaacagcatgagctacaatacacaggggagagtggagtacaggaatataaacatcagtataattgtgacctgaggtccccaagctacaccctgtgtctggagacctgaggtctgaaggactgtttctgctcattatattcagctggagccccacctaggttgttgggacctccaagccttccacacttcctggtaggaaattattctttctcctcagtgagtaatatctagaaaaaaatcagcagtctccaccctccccagatgttatcacactggaattatggagttgggtggagacataaaagcagctgaaacttttagagcaatctggctccagcatctgtcacctcattgattgcaagggctgattcaggtgatttggccctcagttctcttcctctttcatctctccctttaggttcttcccaaagccatgtgttcaaataaagttaaagagaatgacctagatgaagatctccctgggagaaaaagagtaataaaaatgaaaaacaatagctgctaaataatgggagtgtactagctgccaggcaatgtggtgaatgctttccaaacattttctcttctaatccttataatggccctagagctaggtattgtaattatctttatcagcagtgaaagcctagaaaatacagcaacttgccctagagcacccaaataggaagtggctgaaccaagatttcaaatttaacctgtgttttctaactcttaaataaacatcttaacaggaacatttttggtaggtcaatattttctatgtgccattgttcttactatgtagtgaaaaaggcagctttcagatggtcctggcttcagtgatggctcccaggattcccagcgacattcagcaagatcttccctgtgagtggccttcatagatgcttcggtaatggaggctgctattgatagaggttccttagcagctgctccactgaggccctcattgccccacccactttgggcttcatactgggggtcagtgctaagtataaggtcctgatggctaggatagatgaggaaagctatttactcagcacagtagcaggactctggctcaggagagggcccatatcatggtcaaaaataaattgggaaaagtttaaactagggaagcagtgtctagcaaaaggccaaaaagatgagaaatgaccttcagcagacaaacaattacaaggtcagtagacacaaagtatgcgagcagttgagagcgtggatgaaaggtagattggaactgtattaccatccagtaattccactgaaatggaacagtgtggagaactgggagtaattagttcattcgtcagtttgtccgacttctctttgtttcttgkagggggctggttccatagaaaaggatgggtctgtggagtaaatggtcatgagtagtgctagccacacacattctttaacacttctgaatgcagcaggccagctggtcattactgttactgccccctcatgggagaccaaatatagctatatcattcctcctccaaaactgccttctggcaaaagttatctcttttaagaattgtgtgcattcttaaattgcattaagggaagcaaacatatggaacaagaaagcacctcacttagttccatttgctaagcccttttgcagacccactgacccttccttaattccaaatgaaatctcaaatgctataaagaaacccgccaaatgggttacagcaaagacttttttacaccctactgttatgttcagaattggaaaaakctggggatttggcaaattccaaaatgttgggtcatatgaaaacttttttttttgagacagagtctcgctctgtcgcccaagctggagtgcagtgacgtaatcatggctcacttcagcctcgacctccttagttcaggtgatcctcctgcctccacctctggggtagctgggactacagataagcaccaccacacccaggtaattttaaaattttttgtaaagatggtgtttcaccatgttgcccaggctggccctgaactcctgggctcaagcagttcaccagccttggcttcctaaagtgctgggattataggcatgagccaccacacccagccccatacgaaaatttagtctcagaattagcctttgcatgcgtcacctgtaagttaatcagaatgttactttcaaaagttccmtgcaggtgaggaagctaaaaggtattcttgtatttttttaaatgaaacttcataatagaggtgtaaacagagtccattctccccagccttagaatcagacagcttgagtttaaaacccacttatgagcttgagcatactactgaacatagagtcacttgtctatgcctcagagtccccatggtcgaatggaaaatacagtgcctacttcaaagtgttattgtgaggattaaatgagataatatatgcaaagcacagcgcctggaacatggaaagtgctccagaagttttattgttattaacattattattattgccaccatcatcattaaacttggtaatttttactctccccaatcctttagttactttttcaaacttctagttttttgcttgggctccatctaattggctgtgagtcaaaagagaattcaccacatccaagtgttttctaaagaatgtctttggaaaattcacaactgatcattttgataccagcatctaaggttagggctaccttatccttcatcaccttcttgttttattcataacaccacgatgtggactattgataaaattatgtttcaaagataactagcttatttgaagccatctataatttcagcccaaactgactaattaggctaactttcagaaagttaagtaagtgtctaattctcagttaacttactacctactgagtaaaaatgtgctgccttttaaaatccacaactaacctccctactcaaggcaaaccccctagttctaatatttgaagtatttaatgaacaagcctttttgggggtcctcttgtagttaaaacatttatttttctcctttttttttttaactctgttttttgtctttctttttttttttttttttttttttttgagacagagtcatgctctgtcgcctagattggagtgcagtgacacgatcagtcactgtaaccttgaactcctggtctgaagcgatcctcccacgtgtgcctctaaagtgtcgggattacaggcatgagctactgtgctcagcctctactctgttttctaccttttatttgttgcaaaagcaacatgtttattttaacaaatactggtcttcctcatcttactcccctgagatttcaatgttaaaagttgatttgtgtgtttccacgtaagtctttataacaagcttctgctgacactccttggcccagctttccataaacacatccatccctacctattaggttgaactgtacaaaattgccatttttataggtccccactattctttaataccaagcctcaaatttagccagacactaaatgtcctgttttatatacacgccttattcattccttcttggttttgtttttgtggcttcacttttgctggatggcctccacccccaaccccagctctactctggctggacattttttaactctccttcaaaggtgtacatcctgcaacttcttaaattccctttacattcattgtctacatcacatagtctgattgcctatataatacaatttcgtgttttagtatttatatgctatttaatacagatgccacctgttttgctgcttttattttctctggttgcttgatgttctattaccttractagactttagtgctttctagaaaaggacaatgtgtagtatatctgtacttattcaagtgctgatctaaggacataggatgtaatgtaaaagtttattcaatgactatttcaaaatacaaagtctctctttgtataaagtcattcactaatactgacattggctgatacttcagactggagattctcggtaatattactttttcttgataattaattttgattatamgaggatttaatatcatggaaataaattatgcaaatgaactcagaccctaggttcacttcccagaacaaaccgtattctgagaatacttgtggtgccaaaatttagagtgaaaccccagactrttaatgatgctcaagttactttactccaacacaataagtactcagtgatttgttacrgaaattcaattaagtcttctcaagtattttttttcttttcttttttttttttaattatactttaagttttagggtacatgtgcacattgtgcaggttagatacatatgtatacatgtgccatgctggtgcactgcacccactaactcgtcatctagcattaggtatatctcccagtgctatccctcccccctccccccaccccacaacagtccccagagtgtgatattccccttcctgtgtccatgtgatctcattgttcaattcccacctatgagtgagaatatgcggtgtttggttttttgttcttgcgatagtttactgagaatgatgatttccaatttcatccatgtccctacaaaggacatgaactcatcatttaagaaaaagtccaataaaatatcagtcactatttttagatcttcattctcaatgtttgtaaagctaatactaatattagattaatgkaattttatcaatattgataattacttagtatacattgtgaactttgttttttggatgtcatttaaagggttattttcatgagttcctaagaaataatttaggcctttaaggttatttaacccttcagtagaaaatagtttccttgtttaagaaaatgatctccatctagtggacaaatttttatattacagtatacaaagaaaaatattaaagcccctagaatatctcatatcaagcacttcctgacctattaataaatgttttggttttagtgctaatattatggcttaaaagttgtaagatttaaaaatatcataactatctaaatgacttaaggtatttagcaatatttgtttcaaaacttatagtggagtgttaagacttgcttgatttaattggaaaaattataattaaagaaaaaattactgatttatacaaatttggtgtttactcagttgaactgaaaaaaactaaaccaaaactcacacttctgtatctcttacatttctgttcatgcacaggaaggagggggtattttcttttttaaagtgtagcaataagaatatcttgatattaaagggaaataaacataaacatttctacaggcattcacattactaggtcctcctcatgctgaaaagctgccatgactatcttcttagaagagaaatctactttgccaaacccccactatttagaagtttttaatgtcttccagttgtgtactaaataccttcaaaaaccttcttaaatactactcttcatgaaaacttctcagatatcccagcctgagttagtcattcatcctttatttttgtatcttaatgcactcatattaagtgcttaataaatgcctatttaagcatatccaaggagagtttgccaaagatccctaatgtatgtctaytgaatgattagagaccatcctccccttccagccttcctgggaattgacaaggtttcacatacatatgtgcctatcctattctggtgaaacagatgtcccctgtttgggtgccacatatatttgtggtttatataatcatgcagtagagctggaaggactttaggaacaatcgatgattcaatgcagttagctcagtgactggtcaattaacttttctaggacctggtatcctcgtctgtaaagtgagtctgttcgacttgacaatctctcattgtccttcctgaaccaaataaatatatctataaagagacacaattctaagaaaattttaagttggaaaaacatatttacagctgctcaagataatgagttttccctcttctgtttatttgatggattatttcggagccactgttatttgatcacagattcwaaagtgatccatgaaacatcttccaatcttagagtcataactctatttattaatgactccgataaagaaaataaaggaatgttttaaaatgagctagttaatagtttgaataaagattctaatggggaaaatattaatgacagcaaaacttgaattcacatgtttatttattctttcaacaagtttttctttaaaaccacacacctgctgggctatcataagctatcaccctcctctcctaagaacacatgaaagttgactttattttaatactggttgatgtttcactagaaaggttctttgtggaaagtttatctagattataaggactatgacgttaagaactgtgtgtgtagattttttcccagctctaaaatatgtattgctgagcacagtgccttttattcatttaatcatttactcaagacacttgggcacagttttcaatgtgccaagaatacgctgagtctccatttgtagagagctcacaatctaggaatggagaccgggtgaaaaacattttcaattcattgtaaattctgtcattagggagtgggaaagtgtcttgggagcgtagagaaagggcctttcataaagctctgatgtaccagggtagcctttcaggtgcaggctaagtctcaaggatgagtgacagttaggcaggggaaaggggatttgattatttaggggagcaggaggtgaggtggtgatggcctgtgagaaggagatagtgcctcaatatgagttgagcaagaagtacccaatagctgaggatggcaagttgaggctgggggcaactaattgcaattgagagcagatggttagactggcagtctggcaaagaaattttgacttcatcctgagagcaatggtaagttactgaagggttttaaactgaagaatgacactggaaaatggattcaagacactaatataaaggttgttataataatataggtgaaatttgatggagacctgaatttaaaatattggtagtagggatggaaggaagtgggtacaatagaaattaatgcttggatggwtgttatagggnaggagtgtggagggagaagcccaggtttgggagaacagcattaggcacaaaatgggtatttgttgaatcgaattcaaatatttgatgaattactgtgtatttgttattttccgaaaggaattttgtacttagaagattatgttttgcagagtgtttcccttttaactgaagtagagtttggaaaaacctgtatcttgtatctggtcagttaacaacagtatccaggagaacaagaatgtgaagtcaatgtgtttttcttttatgtatttcaatattatcatatttttatggcagaaattagctgtaattttcattcctgctaattccactgtcagttcctcagctgacgctaaatgctttttgaaaatatgaacatgtgaatgttcacagcaacataattccttctcyttcctttacagttttgatgtggacaatggcacatctgcgggacggagtcccttggatcccatgaccagcccaggatccgggctaattctccaagcaaattttgtccacagtcaacgacgggagtccttcctgtatcgatccgacagcgattatgacctctctccaaagtctatgtcccggaactcctccattgccagtgatatgtaagtacaagggcaggcaaagagagagaaaaccgagtaaatttatatctagagctgatgacataataaaactaatgacttttgttcaactgtatcactctyctccaatgtagaaagaatatgaataaaattatacaagctagaaatgaatggtagatttaacctgagtgcactgtcactcttgattaacacacacacacacacacacacacacacacacacacgcatgtatttattttcccagaaaatactttataggaaaactgagaattaaatttttaatggaaactaacacttaaatcattagcttatatttatgtagagcctgagttttagctacctaactacatggatattttctaatattttgaaaagctttcaactccattgaaaagtcctgtgataatagactgtatagcattttgaatatatttcaattaatgtatgtacagatgttagcactggtttgccagatcatttaagaaatctttgtgggactttgccaaaattaaaccaacttttaaggatcatgagaggcaagcacagaaaacattagacagacttgaatatcatttaagatatagtacagcttgaaaaacaatgaaaactgacaagcaggtttgcagatcctgtaccatcactagctcattttctcagtgcatttcattcttgtggtagtgtgcatgtttttctacataggtctttattctcactcaatacctatactatcattcgtggcacatctgcctctgtatagaatcgatcttcatctttctctcttggtctatacatttgtccaataacattcaccatcttttcatgacacccatctcaaaaactcataacaggctgcaatttatcttataagaattagtctgtatggaacccctgagtgtctagtgttattcttgccattctaacagagcatcagttgtattgcaataggtctacatggggttctagaaatgaaattatatttcactcatttttacaaactatggttgctattttagcagttgtattattgacgtctacccttcttcatctctaaacaactttctattcctagtggccctatttttacattatttttatctcacttccttagatttgaaattcatgacacttacttattcattcacacataatgagaatgcttcttgagcaaatatggtgtatttaaagctctgaatctgtggagyagtgaggtctggcattttagaccattgtaataaaatatggtgagcacaatccttgaggcatttatcatgtactgmaggaacagagagaggagatggagagttttccacccaagggaaagatacagaaaataccgggctaagggaacaacatttactaaatgtgaggcatggaaaattatggctgaactaaggaatgacaatctgcttgatgtgaatagcgaaacctggcaagagagaagaaaatttcaaatacagtctatgggacctgagagccacagaggtttttagctgagttttggcatgatcatattcttgtttttattgcatcttgattactctattgttgaatgattgcatagcgaagtcactacagggaagtatttcatgtcgaaattcacagaagtaaggcaggctaaatatgatgaagacctaagtcaagggagtgatggcagtggagcaaagagctggtttagatgcaagaggcttatagaatggttgtgtgtgtgtgtgtgtgtgtgtgtgtgtgtgtgtgtgtgtgtggaagtatgtatgtatgttgggggacagccagtggagaaggagartcaaagagagtgctgatttttgtccatgaatgagtacgtacatggtgatgtacgtacatggtgatgaggaacaaagggcagagagtagaaaacatgacagataacaggtgatgaattggtttgtacatgataaggctaggggaaacaagacaacagttaaagtactgggacagcaaacagaaataacagtccagaggaccaggagaaatagaacagttaccttctataattactaggtttttgaatgacagttgagtggtgcgttgtattcaggtaatagcattaggagcccctgggttaaggagtgaattgaaagtggaaatgtgagcaaatgcaggcatctctttaaaaggctgatgggtggagtaggaagaaagaactaaggctgcctgacagagaattaggttcaagcggaatttttttgaattcaggttacttgagctgagggaaggctccaggagatagaaagagactaaaaattcaaggggaaagagggtttaaagatggagctgtagttgctgacaaaaacatgatcatgagccaaagtaaggaggctatccttggaaaagtagtaaataccagaactgtattctttaggaaggacaaagaagacctgccttggcaacatagtgagaccttgtccttactaaaaatccaaaaaaatagctgggcatggtggcacatgcctttagtcccagctactctggagaggtaggaggattggttgagcctgggagttcagggttgcagtgagctacgatcatgccactgcagtccagcctgggtgacagaggaagacaagactgtgtctggaaaaaaagaaaaaaagaagaaggaggagaaggagaagaataagagagaagagaagaaggagaaggagaagaagagtaaaagaagggaaatgtaaatttagagatggaggagtaaaatgttaagagatattagccatgagttctctaaacattttactcctccatctccagatgaatgaatgtaaaagtagaaggtacagccatcaatagccagaggagagagggatggggcagcttgagaagaaagggaaaggcttaaaaaagccactatgcagatcaaaaaagggaacagggtaaaggtgagtagaatactgaccagccccatagataacaataaacaatgttaaataggcgaatgacagaattgaaagtcatctaatgcaacttcatcaaaggtgagtcaggcttggtattgacaaaagaaagaggaaaactcacagtgagttagtggagtccatttatgtagttatgtgttctacctttttaaattgtagtaaactgagtttgggatagattgtttctttcatacattctactccagttagtaaatattaaatatatacatatattttatgaaaagcttatagcatttcatatttaaatatgaaatgcttttatttcaaaatcaaacttgcaaggatacctcattttgctgtgtgcctcaagagttctttatctgatcagactcaggtaggaatgatgagtttaatcagaccatgagtcaacactatattttgctgaaaagtaatgtgttgatatgtttagctttccattctccttggatatttacattggagcagtaagatattcctttgataccaactcctagaaagcattctttctaccaaggagattaagtttctgtggaaggaaaaggaaatagaataaataataactatttcaacatttaatctgacacgacacatatcttccaccataaaggactgtgccttctcttaatttgaattctcatatggccatgtgtaaactttaattttctcaccttacctagttcacaataatgctatgaagactgtctgatgtgtataattcaactgcgctttatagagaatgatgttatatatttaattacttgatgatttcttattaatagttctagttaagctttcctattgagaaattttcttagaaatttcaaatacaaacagtacctaatgaggataggtacctaatgaagggtatttaaaatgaaggtttgtggttatctatttaattgaactgttttggaaaacctttaaatactctttaagtttaaatataactatttactctattgggaaagtgagaagaaggaagataatcccttcctagtagataggatatcgtcatcttatcctctataaatagaaaccaatgaaatagctgaagaacaaaacagataaagatggtagtaataataatcataacatacatggtgtgtgtatatcatcaactttcccaagtattttcacaccagctatcttatttgatatactcacagtccttttgatagggacattgttatgccattttacaggttagaaagccaaagtccaatgagcttaatcttttgaaaaaaaagcaagcattttgattatttctaggagcacataatttgataatgccattgtaaacaaagtactttatactactacagcaaaaactgctgagaaacagaagtaattgttgaccaaattcattaaaccaatgaaatacatagcagtatcaaaatttgattaagaataaaataaaagctcaaggaggtacaaagtaaatatgcagccaactcttagagaatgtatacaagtatatagcactaggctaaattcagaatctaaaaaattagctcatataaggcagaagagaagttcctgaccacttctgctcagagaccgtcacacaatttgttaaatatagatgatgcagtagcaacttaattcttaagaaaagtaagaaaaagaaaaatgttaagtattagcatgagtctagtaaataaatacatgaaaataaacttgcattaccattaatagtaaaaattttttataacagtagaaacaactagataacaaaaggctggttgcccaagtggtgtcatgaagtaacatgaagaaaattacagcgtaaatagacaatatttttgtcatcttaatatttcagcatctgaataacaatcacttctgtgttttcacatcatccagtaatatagtatctgtatttggaaacacataaagttatgatacattgcaaagattaagaggagaattagcaatgacaagataagtagaattaagtcacaaaactatgaatttattaagtataagttacctgtcaaactacttaagttttaagaaatactcaattcacctggataactaatcctctattccccatcctctgttaaattaacaccaacacatagaatgcaaagatgatccaatcggctcttcactcacattcatatacattgcttctacacacagaatatggggtggggtgaatgcattcagagggccagtgacgaggaagtgagtagatttgatataccataaaaagctggggcatatttgggaatctagctaagttatccccaggcactatacagatatctcagacctcactgatcaggccttcggggtgccccattggggcattttctcagctagtagataatactctccctacctcccatgtcaaactactgtcctttctttagcaattaacaagkccctcaccacttcttgggcctctaatgtgtgttttcagtcacagccactcctctctactacttttgcctgctaagtataagagtagtattgyttccagtcctgagtttgaaaaaggaagaagaattccctttatgtcaatttgtatcttttattccagattattaatcttccctggtctcactaggaagaatataaataaaaagacacgttgcattacaaaggttctaattctcactggatctacatgaaaagtttgtagtcatctcttacctagattgcaagataatattacactaatgaacatttcaaaagcatatcaatttgttatcttgaaagctttcttccattaaccacagaaagaaagctaccatggccaaatcatctcttccccagttctgggtttttcccagctggggaggtatcctcacccctcaccctgtggtgtaggagtgatgggactagggccagagttctcaaaatgtgtcctgaggcaacagagggaatgtacatgggtgcaagcgttattttaaatgttcaagaaaaacacgaaaacatctgtcaaccacctggaaaactaatagcttggaatagttcccagtttccaattaagaccatgatattcctttctgtgacaccatatctttgcaaaattgggttttcagcagttgctggataaaaatgaagtgctgagcagaaatcaatgtgcaacaaaaaataagggaggcaatgtccaatctcattccaaaatgagaaattgacatagtgctcagtgggtgctaaattgttagaacaaaaccttattaagttatttggacttaactatttaataattggaactattatttattttggccaatgtgttgctgttattaaaaaattgagatattaagggcaccatgtactgagaaagtctgaaaatatttggattagttgtttattcwtatctgaagaattagagctaaatcaggctaggcatggtggctcacatctgtaatcctggcaatttgggaggccaaggcaggcagatggcttgagctgaggagtttgagaccaacttgggcaacatggtgaaaccctgtctctacaaaaaatacaaaaatttgctgggcatggtggtgggcgcctgtagtctcagctacttgggaggctgaagcaggaggatcacttgaacccaggatgttgaggttgtagtgagccacgattgagccactgcactccagcctggatgacagagtgagaccctgcctcaagacaaaaaaaaatgattaaagataaatcagatctctatgtgagactatttgagagaattttgttaggagttaaaaaaataacagtttccaagctgtgaagtatctgatgtgctctagagtagagaatttatctttttcttaattctgttaggatcccaggtagccaaaatctttttttataaaatgtgatattattttggtaatgacctagatagaccaggctttttcttccattgctgtgtgctggccactgttactagtattattcggagtgttgatgcaggcattaatactagctattaaatctcaagaagtttattggcaaaatatgctaaggtcatctgctactagaatacctttttactatctttttgtttaaaaattctgctttatttggtgccatttattcaatcacttaagtcattttatttctgatttaaaaaaatgggagtttcatgaattgtaaaataagtcttataaattagctaaacawgtttcttcaatccttgaactgggggatttaaaatattagctgaataggcattttatattcctaatctcatactttcaaaaaaatcataaaaatgaaatcctgatgtttagacattttaaatggtaatgtttttaatgccacagtataaaaataaagcattgattttaatgcactgctacagtgagatggtgccagcacctctaagtatcattgccagtgctctaacctttaaaataaygaattaattgagttatatgtagtaatatatcttggctattactgccaaagtaatagatatatactgaagtcttaggagagatagagggataaatgttagtyataaaaagttgttaaagcagagggaaaaagaagtgaaaactgaccaaacatatacgtaattcattgtttctatgacaagcctgctgcaattcgaactctaggactttgtgctaatatttagcataccattttattttctagatttcctttatactcactatgttcctcagtatttgcactcacttcttttgtttgtttgttttgagatagagtctcactctgttgcgcaggttggagtgcagtggcacaatctcagctcactgcatcctccgcctcccaggttcaagcgattctcctgcctcagcctcctgagtagctgggattacaggtacctgccaccgtgcctggctgattgtgtttttttttttacttttagtagagatggggtttcaccatgttgaccaggctgggctcgaactcctgacctcaagtgatcctcccaccttggcctcccaaagtgctgggattacagactgaactcacttttaaatcttttaaatgtgaaaaaaaaaactctaaaaatcatgtgagtttttctcactcctgtataaaagagaaagagtgtgaaggtgaattatttaaacttataaataatgattatataattatgcttatacatcagatttaatacatttcaaaggataatatctactttctttaaaaaaaaatgcagggagaagtggtagtttaataacaagagcaattattccacaatcctatgagacactgaattcctgccagaagaaagtaaactcagaattggcctcagtcaaggaagattagcctatttttcagtgcataccaaaagaatgcaatctctaagagcacattatgtgtgaaataaactaaaataaggaaagtttgaagaacattttgaaagaaaaaaactagtccagtaacctggatagtgctctcaatgaaacacggcccctagatgaaggacccatagttgaaaattactgattcttcctgcctcttgaaattccaagaggcaaatggccattacaggagagatattggttcacccagttgtggatattgtacctagaggtacactagtgtactctcactttatctcaaccctcttccctctgtatattaaagaagactaaaatcaaaaccatgctccagtgtattgtaaaatagaaatattttgaactttaatttttttttcttttcttttgagacagagtctcactctattattgcccaggctggagtgcagcagtgtaatcacagctcactgcagccttgagctcttgggctcaagtgattctcccacctcagtctccctagtagcccaaacacaggggtatgctaccacacccggctaattttttttaatttttagcagaaatgaggtcttgctatgttgcccaggttggtctcgaattcctgagctcaagcaatactcctgctttggcttcccaaagtgctgaaattacaggcaagagccactatgcacagcctgaactttaagtcttgacggtggggcatatggtggcaggctgggaagaagaagaaagttgacttctattggagatraccaatacgtgttttccaccacattctaaataaaggtgtgtattaattgatgtgcatttttgaatgagtatcactgttttactcgtttggaaaataacagtagcacctactccatgcyagggtatcatttgaagacaccatagatccatgaaagtaagacaaaaaaattgtttggagcatgcattcttgtctttatttaatttttaaaaattcttgatacaaaaggagatgtttccagccaacactgagattcccatatgaatacttgttttcacttacacatcaatcattttaaatatttacttttgsttgtcagtcttagcttcttaatgaattgttctcaatgtctcctttactgttttctgagccatataaggaaaaacagtcacactgctggaacatttatgtgatgtgtttcttgagataagatattccagggagtattactaaatcatactgtctaagcccttgcaatatgaatcatctaaagatgtgcttctataaataaacagaaagaaagcatcaagcagacccatggtttttctttagaaaaccaagtaaggaatatcawccactgggctttgctttcagattcctggtaatctgtggtatgattcacaccaggttcacagaggaaacaaccccaattattccgtctgcctachgcagcatctcctaggctttgtgtccacctacggttaattgccttgagactttatggtttttcctaaccttgggtcaagaaaaatttgctgacattgaatactggaaagttgtatctaaacatatataatgtgtcaattcctgcaaccctctctttaagacgcagggaacttcagagcagaaagaaaaagaataactgctcacccctcaacaaatgtggaaggttgtgatgtgacaagaaatcatttcaccagttcagtaaatgatgttgtctcccaataaatgtcatgaatgatcccaagtccaaaattttttaactcattgtttcactcccaagggagaacaaagctacatgcagatctcatrtttccatgtttcaaaattcattttttctttggtgcttacagaacttcaaattgaatttgttataaccaccaagatcagtttkgtttttgtggattggtgtgtgtgtgtgtgtgtgtgtgtgtgtgtgtgtgtgtgtgtgtktttagctagtggatagcatattagacagcaccgagagtcttgcagaatattctgttgcagaaatagaatgttgcagaaatattctattggacagtgctgttctagagtctaaaacatttacttctatgtgccttcagaatagtctaaatccatttgagcatacagaaagcggcatggtaaaaacaaaacagtatttgaaggcctgggctcaaatccagctacactgaacatttccatgccttgggattttatgacccagtaaaatttctgggacactgacctagggttactaactccttattttgccaggtaaagaacattaacaaggaattacccatcaatatatatgttaattttattttttaaagacattttcacttcagtgaaaaagaaagagcataatctcagaataaaagaattttccaaaggaataygtatagtttaaaaaaaaaatctcactgcatggtccatgtacactctgactttgacaaggaccactgagcattctgttgggcaagtaccagatcttagagtggcatttggaaaccactgagttctgtcagcttgtcaagggcatgactgccratgagtaacttaagttgtcagggcctagttccttatgytagaatgggaatatgagcatccatttaatgcagagttgtcaggattaaattcagcmtgttggtagaacaccgtgtctggtgcctagtaggcattcataaaacacattgctctcctctctgtttgatcaagggcttccttttaatctattgaatcttttcaccacatgcagacctttaaaattgttgcactagttgaccaaaaatcttttccctaggatcccattctggtgaaaaaccaaaagggcagggccactggcattaagaacaagcctgccaataagataaactgtgaaagaagatcccgttcctagaacacaaagtgagagcacttgtgaatccctgcccatgtactcaactctttcgctgtctttcttccctccatggaagtcagactctcagctttgtactcaaaccttctggtgataatttgggacatcagcygtcctagaaaagtctctctattgtattggtttttrttaaacaaaataacctaatatgcttagtgaatatgtctacacacatgtgctaaacatttgtttaattatttaacttggaaaattttggtgtatcatttctaacagagatagtctttgtgccatcatataactaacaaatttgaaggcattcattggcatcatgtattttctctaatgagtcctaaattgttttctcatgacaaataaagagattccattttagactagattattttttgcttatgttgcrtaaacttcagtcccatctgctttatcatcagtgcctgtcctccacaagtgatatgagcacacatgagccaaaaattaaggatttttggttgaaagattttttttttttttttggtcaaagatggggccgggctctaattcttgttttaaatttatttttcatcaacaaataacaaattatatgcatttattatatacaaggtaatattttgatatatgtatacattgtggaatgattaaatcaagcaattaacaggtccatcacctaacaatttatcattttttgtgatgagtacatttaaaakctactctcagcaattttcaggtatactatgcatgattattaattatagtcaccagcctgtacagtagatctcttgaaattgtttctccttctaactgaaactttgtaccctttcaccaacatctcccattccacatcctcccattctcccccaggccctgctccagtccctgggaacaactgttctactctctgcttctataagtttgattttgtttttagattccacatatgtgtgagatcacatggtatttatctttcttgcctggcttatttcactaagcataatgtattctaggaacatccatattgtcataaatggaaggatatcccctttttaagcctgagtaggattctagtgtgtgtgtgtgtgtgtgtrtataacattttctttattcatctgttgttagacacttaagttgattccatattttggctattgtgattaatgctgcaccaaacatgggagtgcaggtatctctttgacatactgatttcattttctttggatatatacccagaagtagaattgctggatcatatggtagttttatccttaattttttgaagacccttcatactgttttccatagtgactgtactagtttacattcccaccaacagtgtaaaaaggcttccttttctycatgtcttcaccaacatttgttaccttttkttgattaaaaaaaaactattataggtgtcaggtgatatctcatcatggttttaatttgcatttcacttaagattagtgatgttgagcacttttacatatacctgttgacctttttttgtaggtcttgttttgattttaatttttttgtagagaaggtgtctcacgatgttgcccaagctggtttcaaactcctgggcttaagctatcctgctacctcagcctcctaaggtgctgggattacaggtgtaagccactgtgtcaggccattgttttgagaaagacctattcaggttttttgcccattttaaaatcaggttatttgtttttttgccattgagttgtttcttaattcttaaaatattaataagatgtgagcaaacagtttaaatttcagmaaactaaatatctttgaaggtcactgtactagtctgttctcatgctgctgataaagacatatctgagactgggcaatttacaaaaggaagaggtttaactggactcagagttccacgtggctggggaggcctcacaatcatggtggaaggcgaggaggagcaattcacatcttatgtggatggcaacaggcaaagagagagagcttgagcaggggacytcctctttttaaaaaattagatctcataagactcattcactactatgagaacaacgcaggaaagaccagaccccctaattcagtcatctcccaccaggctcctctcaggacatgtggaagttgtcggagttaaaattcaagatgagaaccccatctcaaaaaaaaaaaattctaacctgctttaagaaataaaaatagtggtttgcacttgtaattccaactgcttgggaggctgaagtgagaggatcacttgagtccaggagcttgaggctgcagtcagctgtgaattgtgccactgcactctagcctgggcaacagagtgagaccccacatctctttaaaattttttcaaaatatttaaaatgatcaaaacgggcgaggcgctgtggatcatgcctgtaatcccagcactttgggaggccgaggcaggtggatcacgacgtcaggagatcgagaccatcctggctaacacggtgaaatcctgtctctactaaaaatacaaaaaaattagctgggcayggtggcaggcgcctgtagtcccagctactccagaggctgaggcaggagaatggcgtgaacccgggaggcggagcttgcagtgagccgagattgcagccactgcattccagcctgggcgacagagtgagactccatctcagaaaaaaaaaaaaaaaaaaaaatgatcaaaacaccagaaaagctgcatacacagatatacaaacaggtggcctgagtttggcgttgaaaagtttcaatttggaagatgttacctcacacaatactagacagctttaatgttactcatatattaatttacattttctttgattctcagtaaaaggttgctggacattcttgccaaattgaaagttttggtagttgtgatttttaatacaagtttttgtgttaaatagattattttaattctaagtggcaatagcttcaaagaggaaaagcacattcacttgtaactgaggttggctttattatattaggaactttattccctagggtttcataaatagatgtactgcttaatttattttgacttaaatggagctagtttcaaattaaaaggccaagcaatacagaggatccatatcctcaagtatgtctaataccaaggaaacagtttttatgtatttttggtattgttttatttactatatagattacttagagtttataaaaaaatctaatgcctcctttataagtaattttaaatcattcattatattcttaaatttataatttgtcagagtgaacattatttttggaaaaacaaatcatctcttttaaacgctatatggaaaaaataatttggttttgcaaaattttcttggtagtcacattttacagaatttttgttgtctgaaattagagtttcatgattttaatttaagcaggtagcaatataaaatacttaacattcccatgaattacctgtgcagcccagtttctcatgtagcattttaatatttacctttgtcttatgtatatttaattaaaataagcatgtttcctttaataagtagctttttaaaaatgaatgaatgataaatgaactgaaattcgtctgaaaaacccatatgattattttttaatttatttaaaaatagaatcaatgcttacattttaatacatttggattcacataacttgaaaaattttagagattaccgaatatagattggaatcattaacaatattttaaaagaataaaggcatgtataatttttatggttcattaatgtttaatgctaaaagcaagatatacagttgaatatacactatgactctaattctataaggaagtatgtagtccataatagtcacatactatattgcatacatgtgctcacatacatgcagtgggaaaatgttatcaatagttatctttgaatggttctttaagttgttctatatctcccaaagtatgtatatgtatgcatgtacttcatatgtgtgtatgtatatatatacatacacatatgtatgtatacgtgtatctrtacatacacrtrtgtatgtatacgtgtatctatacatacacrtgtatgtatacgtgtatctrtacatacacgtgtatgtatacgtgtakctgtacatacacgtgtatgtatacgtgtakctgtacatacacgtgtatgtatacgtgtakctgtacatacacgtgtatgtatacgtgtagctgtacatacacgtgtatgtatacgtgtagctgtacatacacgtgtatgtatacgtgtagctgtacatacacgtgtatgtatacgtgtagctgtacatacacgtgtatgtatacgtgtagctgtacatacacgtgtatgtatacgtgtagctgtacatacacgtgtatgtatacgtgtagctgtacatacacgtgtatgtatacgtgtagctgtacatacacgtgtatgtatacgtgtagctgtacatacacgtgtatgtatacgtgtagctgtacatacacgtgtatgtatacktgtagctgtacatacacgtgtatgtatacktgtagctgtacatacacatatgtatgtatacktgtagctgtacatacacatatgtatgtatacgtgtagctgtacatacacatatgtatgtatacatacacgtgtatctatacatacacgtgtatgtatacatatatacatacacgtgtatacttatatatacatatacgtgtacatacatgtatgtctacatgcatgtatgtgtgtgcatacatgtatgtctacatacatgtatgtgtgcatacgtgtgtgtacatgcatgtgtgtgcatgtatgtatatgtgcatgtatgtatgttgcatgcatgtatgcatgtgtatatatgtatgtatgtgcctgtatgtatacatgtatgtatatatgtatatatgtgcctgtgtgtatatatacatgcatatatgtatatatgtacatgtgtatatagatgtatgtatatatgtacatgtatgtatatatacatatacacatacacacacataaagatcaagtaggttacattatatgtttgttttatatgtccatacttctatgaagatgggtctagagagttgtgagtagacgtggtcctcctatagctaatccttgggtgttgtcaaatagtctaggctcccagaaatatttttatattcattttaaaattagaacatacttgtttctctataattctaaaagaagttgtcaagggtgaattgatagatggatgatagtttttaggctgaggaaagaaagatactaagatttcaaaattatcaaaatcttggactttaaaatatatttcaaaaatattattttaattttctatatgtttatcaatttcctaatcctattgacaaacttcagaggagaatatctttctagtaagagtgagtgaagcacagaagatgaaaaaagtttgcacaagattccattcggccagcgcggtggtgcacacctgtaatcctaggcaccccatagactgagacaggaagatcacttcagcccaggagttcaaggccagtctgggcaacatagcaaacctccatgccattgaaaaaaaaaaaaaaaggattagattcaaacgtaagccccagcctgtgactccttcacagtgctagttcatgcattcatttgtcatgctaaaatttgcaatgtgtgatattcaaaagcagtgggtcttacatggccactaatgctttaaatatagtaggattaggggtctttgctccataaagtaaaaactttcttctaattaactgtatctccttttccttatgatttcgtaatagtaaaacagataaagattgccacctagtgtgtttaagatttcaaccaatcatgaaatgaacttctataggaaattatattttcaggtgctgatgttggttgaacttatttttttaagatgacaacaggctttttcatttttaagtacttgaaccatatatggatctcaacaaagtcaccataagagtgtgggcatttggatttcttgcttttagtttcttgcttgtttctgtttccttattacagaaagaaaaagggtagaaaataacgtgataaataatacagaagtagaagaaggatgggagggggaatagagaatagaagttcctgactctactgtcatttctcttgtgagaaaaaaaaagacaatagtatactgttgagccctgtattctcctgctttcaacagcgctggctcaggactcagcaagtctttctctttgggagagacaaggctcgccaggactagtgaagatgactctggttcacttcctggtaaccagggaaggtgacagagcatgtggcacctccttggacatcatgaaatttaaaaccaatgtgacactgactcccacagtgacctacagtggctcatcctggctgttctagaagtttctgcacttgcattctgctgtgactgttaccttggtaccaatctcatctctcacatacatacatatgtgcatacatacatacatgtatacatgtgtgcatacatacatacatatagacacgcagtgtcaaaatgactttttttctgagccttcctatccctcattcattctccgcctgtcctccatgaacactccagttcttttttttaaaagagctgtattttccttaaaacagatcacagctgttttttgttaagggttgttgttgttataattgtttttatttaaatgaaagacagtattgcatcatcctcacccaaaattcacattaccaggcggtacaatttcaaaatgtccaggcgatattcactgtgtgactttgaatctagcttttcagtcactttatagagaccctaatagtctcttcccatctcagaagagactcagaaaaatatttagccaagtaggcctaggaagccccaatttattacattgtattgtaatccctcccagccccactttacgtggcaaggcgctttaaaaagcttctgtgggtaaagttgttcaggtgcaagatttcagaattattttatttcataggatttttttgagcatatgtgattattcagttcattaaaacccacacatactttaaaccaaatcatattcacaaagtgaatcttctgttgatcttaactaccagatctgtttttaaatgattataagcaaagtgtaagacacaattcaaagatatgtttgtattatatttattttcttctaaccacaaataaaaataggttttacttgccttattctcctagtgacagtatgtctgaaaagatctgttttaatattgagttgaggacttagacaaagattttaaaattatatgttaggtatatattcaaagataatttaagcatgacatacttttgaaaataaatggataggctataacctgccgtttatcgaggacatctgccactgaaatgctaggtatcattttactgttactaaaatgagaccatcttgagatatttggcagaaacaatttctgggcaatttattaaaaagtaatatatttccttcactaaaatgataactgtctttatgctttcatagggaaaaaaggctggtaaattatcataaatattgtaaagtgtattacttataatacttataaaggagatacaaccaaagagaaaattaaatgttttaataaatatgcaacccttttgagttttgaaagattcaaatccactgyaatctatataaaaaattaggagacatatttccatggattcatttcagattgatgatgtgccttgtcaagatgacttagtcctgaaaaaaataaactttatagtaggtcaattataaagaataaaatgaaagaagagactatagcttgggacaataagaagatgtcatattattttaattttggttatctgaactgcctctcatccattttacaatacaatgtcttcagcttggccatgcactgaagcagatgaatagtttatcagactggcaaatcaagtcggcataggtggcatgtcttttctccttgtgtaatatacctcccattatggaatttttaataacattttttaatgtcagaaaccattgaactatcttgaatgcaatatatgtagtatatacacctattgaaaatgttttttgtcttcggacttctaacacactacacagtttactgatttgtccaccactcccaagaatgtttggcttcaaatgaactctaaaggtgcctttatgtgtgtagaaatttgtcaaatgctgaagtgtttagctctggattttgtcttcatgctttttaaacactggtgtatctgtaaatatttctcagttgttttgtgagagttaggctactgtttcaaaataagtacataagagaaattgcagccctatatttacctatatgacacagccagaagggaaagtcagaatgatgggccaaggaagaaatgtagctggccaaccctggcatcactttgtaatttgcatttattgggccattttcctagagctttatttttaatctttttaagctgttccataggaatcagccaatgcatatcacaaaaggggaccattccaggtatggctgtgcagcttactacctgcgtgtctttgtgttaaatctcttaatcaatttgagctacaattttctcatctgaaaaatgggagtaatgtcacctaccttgcaacattgttgtaacagctgatgattgtatataaaatacacttgctgtgataacattctttttacttttgtaaatgcttgaaattttcatatctttttttccccagaactttttctttcccccagagcttttaatgctgtcatcgtccctctctctctctctctcaactaccactgatttagtttaggtcctcatctcttcttttctctacactggtctccctgcttccatttttgcccctttaaagccctcaatcttttatagacctgtcacagggtctcaagagtccttcttagcgaagtatcagttttctgagtctttgcaatttcctgactgcataggaaagcaaaaatcattatgatttaaaaggttttactactgctgctaattattattatagaaatgtttattgaacatttactgtgtggtaagcacatttttcagcacttaacattattaatttattgaatcccaaaacatcactmtatgtatgtgctrttatctccattttacagatgaagaggccaagggaaagtgaagtttaataacttgcacaatttcacacacctagtatgtggcagagctgaaattccaacccaaacttccatcagagagtraaatccaagttcttgtacatttcatacaagggctctgtgatctgctgcctggctcgttaccacccatgattctgaatttcctgccttccatggcattctctagaatcaccgagcttctcgttgcagctctgtatctgcttctttctcatctaggcagctgctctgcctccttggcttcatccctctctgctggctcccaygggctcaatggcctccttgccacttcagtgcaccaggcctgctcctaccctgggccattgttctaggaaagagcctttctgggcttgacctcagaagaccttttttttttgagagtcaaggtaaattatgtaaattatttattgatgacagaagaacactatcttagtccagtttctgttgctataacagaatagcatagacagggtaatttatatagaaaagaagtttatatcttacagttctagaggctgggtagttcaaggacatggcatcagcatctgattaggatatttgggatgcatcatcccaaacaatggaaaaatggaagggcaagtgagcacatgcaaaagagaaaacatgagggkctgggctcactttataacaacccactcttatgataactaacccmctcccaccataacagcattaattcattcatgagtgtgaagccctcctgacctaattacttctcacaggcccccacctcttaatactgttgcaatggcaattaaacatcaacatgggaaaatacctttttcaattgacatcctgcctctaccacttattagtttttagaccttatgccctctctgaacctcagttgcctcttctataaaatgatcataaaacccaatgtcctaccttcttagagttctagagttctatgaataatctctacaaagagcaggtgccccttgaaaaacatgattctggaactaagggggtgtaaaataacacatgcttcctttacattgttttttccttcttctgcttttatttcccacatttttattttcaagatctccacatggtttgatgacgaccacagcacctattctagctattggtaacaatttattgagtaacatcatccatatgctccctgtgccccagcatgtttcatgggtgttgttttgggtcactcaggttgttttcagattgttcatgagtgagcgaaaagtttatttgcactgttctcagggccatgtccagggagctgtctgtgttgaataacagcattcacttttgatttaagaattttatctagctagatcaagaaatagctgatggtgactctggaaatccttgtctcaaattattcatgctaagaaataccacaaaagaaccctgggccccagtttctcactttcctctaactggaatgttgcacaactttccttgcccttccctgtccctccaagacacgtcatgctgacaccttgctcccataccccaggcacggtgtagctggggttgctgcagcaacagcacacaaggagtaacatttcccagtgactacagtggctgggatgagtcagttgaacatttcactgggtttttattagtgtatgatgcagtcccatgtcatctacagttcctagcctgtccaagacttacacgggatgatgtggaacactccatgctaatcaccttcaaatattagatggtcaagggttctctcactgaagtcactgcattgctggttccttccacagcaccccttactaatatctacagtaagaggccaaaagtaaaactcaggccccactgctggaacaccatttctactattgcatatcctgtgtgcctaaaaagcaacagtgaccctggctgatgatcaagaagcccctctttttacccagggagttggacaattgttaacatcccagaagacatatttttaacccagttgctgggaagaacatgtgctgaagtataaggatggaatcactgtaattctcyatgggaactcatgaaagtggaacttgccgtttaatattgaacgacactgagcacagagttattgatgatttctaatgygggatttggtttatttttcagacacggagatgacttgattgtgactccatttgctcaggtaagcacagcttggtgaatgggcaggtttctcacagatgtaaaaatttaatttggggaattagttcgggttattaatttaatttaattttaaatcaagcacaagtayaaatacaaattcttggttcattcaagcaattcaaaagcaatgctagagaaagtgactttggctatattaatctgtttcctataaacccatagtaccaaagagtgtctttgcttcaaataataaattagctaagggatatacttaattgggctcatactgacataagcactagaagcagaaggctatatcatggcttaagttatgtttagtataattaggtacatgatcagtgcttgaaattcaatattccaattcaacccaataccttatttatctcttttttacatatgccatttgtgcagagatttagctgagtgatgtgttgatgtttacttcttccttctaggcatacaaatcatgaaaatactttaaccacatgacatatgtgcaagcaggtgataacatgatctaaaatgtttgggaatataaatatgaaagagttgatgaccagatgttctatgtatagaccaatacttctcaaccctacctgcacgttagattaacctagagacctcttatcccagtgcccaggctgcagccctggtcaattaaatccaaaaatttggagatctgttacaagcatctgtatttgttaaaggccttagtatttttctagtgtgcaggagaagttgagagtctctggtatagacaactaagggcggaatgagataaaactgatttaacctggggcatgaagcaggtttaaaaccaacactgatgagtaagaaatgttaaatattaaaatgcaagtaatcctgagaggttgtaaaaattataatcaggcctatatcatacatcaaggtgctcttgcaccttggacaactcacttaaattttctgggtcctcttttttttcaactggtagagttaggggactgagctggatgaaagacagtcagatctagttaaaaccctttcaccgcctcttgccaactcaatggacttgagcgagtcactgaacttttccaagcctggtctcttcctctgttaaataacagttccaagagtacccacctcataagattgctaagacactgaaataataccacgcttataaaatgctaggcacaattgcttgaaaatataatattataaaaactttgtgattggtttaaatgtatagagctgaaaatgttctttcatttctaaaatgtcataagtattattttttaaatggataatagggtttagatagtaggattatgtatagttctactttttaaaactttccaaacttttattactgtaacttagacctataatataatcaattcataagtaacataatgtataatagtaactttttaaattaatgcaggcaattaaaaataaaatacaatcaccatccttttcagatggttaatatcttgtttgctgaaggttttgctggagattatgaattctttctagtacctgtatttctgtgtccaaaaaatttacacttgtatgatttaataatatgatgtgatagcaaaatcttataaagctgagggtttttaattgattactattgaaaacttatggccgggtgcggtggctcgtacctgtaatcccagcactttgggaagctgaggtgggtggatcacctgaggtcaggagttcgagaccagcctggccaacttgatgaaaccctgtctctactaaaaatacaaaaaaattagccaggcatggtgacgggtgcctgtaatcccagctacttgggaggctgaggcaggataattgcttgaacccgggaggtggaggttgcagtgagccaagatcatgccactgcactccagcctgggtgacagagcaagactctgtcaagaaaaaaaaaggaaagaaagaaaacttataattctatatctaagacctsagagagaggtgaacagacaaaatatggcataacaatgtaagtaacatcatcaaacatagaaccaatcattccaatttgagttcattcaagtagctattcttgtttctaaccaaatgatctaggtattattataagaaaaaatatatataaatatttaataacaaatgaaaaaaggtctgtgtatgatatatggtcttttacatcaagtaatatttattaagctgcaacaaatagattagtaaattggacttgaaccctgccatcagtgctcttaaattccaaggaaatctagtcttttacctgattagatattttctgtagtgtacctataatctccaaggaaaaaaaactaatggaatttcaagatattgggaaatacacacatatatgtaatttagtccatgttagtaagctatttaaataaaaaagatgtgtacttaatatacttgaaattagaacttggaatataaatcagctgtataatttataggcatatctgatgcctaaaaataatcccatagtatattaagtctttgcttatgattagctaagtgactcataacaccttgtagagagtggtcattacttgagaggctgccgattttttttaaggggcttcatcatggttttcacaaatggccttttactggagtataagacctggaaagccccactagaattaaaaacaaaacaaaacaaaaaactgttaagccctgaagagtttcaccactcttcatagagcatctgtggggaggggttaagagagaagtcccagtgagtatgtttgagtggccttctcttaaaccctgttggacatgattggcatgttttgctgacccaatcactaacttctcaaattttctttaatacaaagtaaagcacttaccacttaatggtaagtgctattttagcattaactatttaaaactaaaaatataagatacttatgtcacttgaagtgataccaatctaatttgtcctgatataccataattgctttcaccaaaggacagaaaacaatggattttagaaaagtcactcagaaaaatatttagccaagtaggccaaagaattaccctcttttctcagcatgctttgaaaattggaatttcacactaaattccagtgaaaaagctatgcttctcaaaaagacaaaacaaaacaaaaactttttgcataaaagtttagaaaaataataagaaaaagaaaaggaaaattttctaaaattccaaaccccaaaataactgctactgacattttattttatatcccttcagatttatttttctgtgcatattttctgtcccatggctcctaaaaatggccttcccctgtctaaggtgttcaaagatcccctcccaaatccatctcatcttctgcctcttcttgagaactcatttctttatgcctgagtccatctccaaaacacgaatcatggtttccaaatcatggtttcctttgacgtgaaaagagcaaaatcctaaattagaggagaatttaggaagccgtgcaaagatagattgcacttttttggccaggctaaagcctgaaacatcttggatagtaattttcagaaaggatcctatagtatctctmcatagtttatcccattgtctaaaacactgtcagggctagaaattcttgctggtgtttaacctaaactcttttccacctctgatttcttatgctttcccctgtaagctcagaatccctttggtcctcagaaaaagtgacagctttaaatatttttcttatttcaattgttaaagtattctcttgtgtttgtgttgaaatcttttggtgtgggtgtttccttagcacgaaggctagagaggaatcccactggagtgcacgcggcaactgacctttttttcttggccagagttcttgggggccaaggagcactaaggaggcacaatgctgataaactgtaggaaactcttctctgctgtcagctgcctccgggctcagtgatcccaggatttgtgacacaactaccctgtagtaaaactctaagttgactagaattytcatgtggaagtgygtaatgttaaatgaagtagactctgatgaaagaaagagaaaacaggaaaacccaagcattatgctggatccctggagaaaccctcacttcattcagactraggagatatccctgatttgaaaatacagaggcgggagaataacttgaacccaggaggcagaggttgcagtgagccgagatcgcgccattgcactccatcctgggcaacaagagcaaaactccgtctcaaaaaaaaaaaaamaaaaaaaacaaaaaaaaaaacggggtaggaacaactacatctctttayctttactctaaccaaaatacagcacctgggatacttctaggataaaaatgcagtagttattaatactatagaatattaccatttagttggtaataaaatataaccaatattctcatattcctgcctgtccctcagccacttcacccagcagcaacgatcttgtggcctcatcaccatcctcaagcttgcagactgtgctaggccctccctgccaggctatgaaagaagatagtcacctcgtttcagtcggtgctaaatttttagcttttctttagccttaattaatttaaattacaactactatcttctggacatctaagttctttttaagagcgaaccatataaaattgtctatcaaccttttctggtgtacaaaccagcaatttcatagggtttaaacaaaacataacctggaaagaggttttcttttcataaaaatgacctttctattttgtaaataagcataacttgactccagctttttccggaggtaaaaccgaagtaatgaatctctcccagtgcgggtcgccgcttcctccgccgccagtggcacctcaacctcatggtctgtgttttaccgccatctagtggtaacaagtgtatatggttatgaaaaacaatcctcgaaaccatttattttcctctttttttttaggctatgatgttcagctgtttaagtgttaaatgataaccgyattttcctgctattttcagtgattcttattgtttaataaatgtttagaagcacctaagaagatccgagagtagtgtacgtaaataacattgaatccttccccatgggctaatacatgaaccatctttgtctaaaatttttctgtaaaactaccagtrtttccttcctaaggaatatatatttctcatcattcccaatgtaattttgacattgactggctatacttctgcttggtggggcagaagagaaagaaatgaccttaattttctaaccattgagctctgtggaagaaacgtcagggatctttttggttagcaagcattaaggagtaaggacaactgtaaaaggagccttaaagctttgactacagttcttaaagagtygaattcaggggaagtgagggctgccctgaacaaaagcaaagaacaatggaactttaacttaggggcttcagtaaaactgtttatagttctccccacagcctgcagtaacagatgctccctctttgtgccctgcaatgcaaagtgaaagcttaaaagactaacacagtgataacagtgatgacgacaccaagagtcagtcagcgaggcccaagacaacacccccttataagatttgtctagaaatgttatttacacttctgccaatagcatacatgtcatactgtagaagataatagttaacaccaaacataaaatttataaaatagtttgtcctgctgcaaaagaaaaaaaaacccacacacacacaataaataatctaatactggcatgcctaggaaataatttctctacaagattatttattgcaacagtgtttgtacaaaaacaactttaagatagaaaacctaaaagttgattgctagtggccaggcagctgattgtctgaaggagagaccggaagacagattccttttttcactttttattttgaagtatttcatatatataagggaatatagcttgtaattatgtaaaatataaagaataatactaaaatgaacagtttaagaaatagaacagttatcagtattttaatgtcccctgagtgtccctccccaggttaatctgtttctattgcgtcttttcagaagtaataataattttgatttttatcttaatcattgaaggggagactttttgctttatactcttttgtttaaattctgaagcatgtgaagatataaattatacaaaaatacataaattttaaactaaaaacmaagacaaaataatattaaattagattacttattaaattagaagtttattataatagaggcaaaaactcctctacagaaattttttctttgatgaactaatttttcttttcatgactgatgtttcccttcaaatgatcatagaaaataagttgcctgcatttctatgtctatttacccagctgtcaactgcaatgaacttaactattatgtattggaataaaaatctcagaattytagggttaaaaattttgcctaggaaggggatcaattagctggtgcaatgattttatcttaaagtttccattagtatgtttgatattcacttcttaaaacataaattaagcctgcatgatttaacgacagtggatcatttatccgatttacttctgcatcattcaagatttcatgcctaatgaaagacatcgtggtctgatgtcagcagtcggccatttgaatactccatcataggcagcgtgacctttcagagccgtgggttgtttatatgagataatgagccaggtttttccagtgactgagttaatcacggttggcttcttaggaagcagcattaactcctttaggggaaaattctctaagtcactgtcccaaggcgtacacagctctccattgacttacacaaatgaatgtcaatttcataaacagcaacaacaaaacagagtctgggacatttttgtcttagaaaaaaaattagactgattttagtctaggtctgtgccagatgaaacatttctgaaaacaactctggaaactttgaagcaattaaaactttggagactcttgaattaccaatgctaggcattaagtaaatttcccaagtgcatgccaagtcattaagtcaaaggtaacgctgccatcatgggctaatattggctgaatgctttctatttgccaggcactgttcttggcaccaaacctgtcattccatatactcctcacaacaattctacgaggtaggtatcactatcccagttttccaggttaggaagctgaggtacaaagaggttgcatatctagtccaagttcacacatttactacataacagagccagacagtctgggttgttaggtaatacctactcagacatttggaatctgtgttttacataaacttagcactctagctgtcacccaaatcacctataatcccatctaatatgggtttgaccctggggaaacttgcccatttcaggagaaagagaggagggaagaaggagataaggctctaggaaccttctcctaggctcacttccagtccsttggctactttctagttccaactggaattagaaaaagcgactgttagagatagtgacacctattggtcctgccttgtyatgtgtgtgggcatgttgtgtctatgtattcatttagtcaacaaatttttattgagtatcttctgtgtgccaagcattgtgcatgtacagggcgtagcattttacatragaaacgcatccctgagagcttcttacaatgcacaattcagataaccttaacaaaagaaaacaatgtctgcttactagctagagtagccatgtggcaaaggtagaaaaacagtttaaaattcacttcacttgccaacttattattatgagattcttcatcaatttttgaagagatttgggagtagggaattttttatccctaaagtgagctttattagcattttatattatactatttgaaatgtgcaaaaatgcaatcatgttatctgtgtattgcctggaatattgtcttggtgactaaggaacccagaaatactgtggaaactgctgctactgtcaccatgtgcatagacaatgtggagrgatttctggaaaatttctgcagtctggcctctctggatttcgtgtggatacctacaaactgcactaagtgttgggagattctttagtggtatatgaaactaagttgcaagcaatatcaagttttctcttaacaaaccattttcaagtgtatttaaaatggccttagctcaagaagtttcaagaatcctttcttgttgtaggtcttggccagtctgcgaactgtacgaaacaactttgctgcattaactaatttgcaagatcgagcacctagcaagtaagatatccttttttcccccctcttttttgctgaacttttaartaagttttctcaacttgattgagcccaaggcaatatgttagacttctctgtgttgttgccatgttgtctgtgtatactaagtcatatgatgtcctgttaattttctataaatacttcgtggtgatggttctaatatcagaaatgaagcagtatgacaaataaatatggtgattccatctgtcagaaatcacctggcatgatcagtcctccgcccagttatttacactcagggtaactttatagtttcggcttacttcataaattaaccgtgggtgaataatctcatcacaccttaagatcagctgaaagtcatcctctcaagacaacgatgatttggagaagcgccatatcatagcaaagatctttgattctcctgctgttactgactttcagatcagcagcattcatggagcaattaatagaattgtggtttatatgacaacagggaaagcatttgaaagatgggaaaggattatcatttcaggttcttgataaaggcaaaaaaatctaaaaagataaaagtaatttttcaatattaaatggaaaactggtttgctgttatttcaatgtccatttttttwaaaaaaaatctgctmttaatatgaaataaaatattaaaatgccaacttcaaataattttccagaaggaaaaaaaacatttaaatcatattaagaggatagtaaatataagtgtattaggaactataacttacctaagtgcataacatttcatagtagttactacttcttaaaaacaatgagaaatctgaactttacatttcatagtaataaaattgacctcccagattcacgtttttcattatcaaaaatagctctggccgttattcaagtacttcttgtgatagaaaaaagtttttaaaaatcaatataaatgtaacaatgcaagctattggaatggaacccattaggttctgtttttccaggtaatgaatttttgcagtcctattctctcagcctgaatacttctcatcttcttcttcctctcctcatctactgggataattgtcattcattcttttggttgcagcttaaataaaatttctcttggagcattgtccctgatgatacccaacatagacacacacccacaagccctaatcaaagtgatgtgcctttccatctctgtctgattgtaccttgtacttgattcctatgttagcacgtagctctctgtgctcctgttgcctgtttgtctgttgggatgctcctgaacactgtcagttcccagtgagtaggaatgtagtcggttcacatttgtattccctgtgcctagcataatgcagagtctatcagtctgcaaaggcctgttcgctgaaagggcaaagtagtaactcagcatgtaaaatctgagggcatgctttgaggtacctgttcattaccaatcacgttttctatgtaacgtggccgtgcaatgtcatactgacctcagcggcccccttgggctttggggatttggtagcttgtaaggtcaatcacctcccccttagaaagtctcagctctgcagaagaaatgaagttaactggttgtcactcccaaactttttagtctcgaattttacccaggaaactgagatttttgtctttaaaaagtgaacaagaaactccctttatgcttcctttacatgtggtcacctgggtaccagcatttawatctgtggcaggtaaatagttgatcagtcaggctccagagacgatctgaggcctgtttctatgcaagacagaagttttcagctgacatacagggatggaacagattgaaatggaaaggaggagctagaagaaaacagaaaatcatagcttgagcctgaacttcctctctgccttgtcaatgcccagggtgacatctaaccaaacagtattatctggcagactctaagtaaaggccactgtggtcttccttttggtcaatgcaaatttgtgcctccattactgattcaaaccaaatcggcttctttgggtatcagaatagtaggattcaatctattcacggctaaactcgattctgttcagtgagaacaaagtgctgtaactctgcctcatsacatgatgaccctgggagaatcagaacctttcctgctgggcactcacagagccactagaacatttccaagctcatccttggattttatggaaggcatgtgctcctttgcacaagccaccctttttatttgctgcagaaaaggagtctaggaagaatgcattccaaacccagcccctgggtgggtattcagatgcacattgctgacttgttaacacaytactgcttcttgtcaccttgggttttttgtttttgttttgcccttgagattttttattccagaagtgagttctggctcatctgtcattagagkaggtatcgaggcaaccatggatcaaagtattaatattttctgcttgccattacttgttcagatatcaagttcctgagtaccagttaattgtaggattgatagtaaaaggagataattagaattgagtcaaccatttggttttccaaaactgtagaagagtgtgaaaatatttatttaataccattcccagacaaaatcaatggtttctaaattttcacagagcaaggactaaaaaggagtaatcaggatatcaattatttgaatgataaactcttagccagaaggtaacagataacaccctgttacacacagcaagaccccatctctaaaaaaaaaaaaattaattagccaagcatggtggcatgcacctgtagtcccagctacttgagaggctgaggtggtggggggaatcactagagctcaggagttcwaggctgtagtgagctatgatcacaccactgcactccagcctgagcaacagagtgagaccctatctcaaaactttaaaaaaaaaaaaatttaagaagaagaagataattactggtatatagaccagagctatttcagagcagctgcttaaaatattaatattttggtttatcgagtttaaattctccccatttttcccccaaccattttattttataactaaaaaaaactaaaataattcagaagtaaaatttggtgcattttcaatcaaacacaaaattttaatcccaaatcgataccaataaycttaggagcaatgaaagggagccagaggctgagtggaaccagtgagaatttacaaaatcccaggctgctttccccaactttcccccaccctgctaagaaattcatcatctcagcaaggcatatttgaagagattgatgccattggcacatatgtgaggctgtgcatgcaggttccacaaaaacatctcaaactaaggcagcaaagcagagcatagaccctaggatcacattcgtttagttcaaatctcagcttcgttacttaaaacaagttcttcaaattctcaaagttttgtttttctcattggtaaaatgagaacaatgaaacttacttccttaaggcttattgtaaggattcaatgagataattcatttaaagtacttatttagcaatgtctgatccacaagaagtgtttattaagtgttcacccttggtagaggcaatatatatataattattatatacctaatatatatatatatatatatatatatatcagacatctttgaatgtatctaaaagtgttttttaatcattatattttaaaagctgtcagttacaagtaataactttataaagttatatttcaaaaatgttgatggatactttataaatgatattcttttcaacataatttattaagcactgacggaatactggatgcattgtgctaggctctgtagggaatataagttaatcagacagcatgctttttttttttacttcaaggggtttatagtcattttgtggaacttggcaaacatctgaaaacttagagaacacragatakaatttatttaagtacctttggcttagagtatttctaaagcttctatagtatctatttggacaagtcattaatatacctctctaacaaatatatcagaggtgtttttcaatataagaaaagaaaggaaaaagttcaaatagcttctctaattataagatagtttacaacaaatcattcacttctgataatgtacaggcaatcacgagaatttaggccaacaataaaaatttcttaaccctgtattagggaagacaattataaattgactgctttttcaaattcaragtctataagctctggcttcagcgaataaagtctgtaagaatttcctcttctctcatgtcccagtgacacttacatcagctttatttaccccaaatcaatcactgtgagatttaccagttttctttttggacatgtgtgatctgagccataatacaaagaacrcctagggacttgtctggctagtctgaaagaaatcatttgcgtgtccaaacttaaaaataattctttaaagtaaaatgctatatctgaaatgactcagagagtgatcaaatcaataagccccacatatttactgctttgtgtttttctgtctttgtcagaagatcacccatgtgcaaccaaccatccatcaacaaagccaccataacaggtaagaaagatctggagcttattcttcatgtgtctaggaagaaaccatttctgccaagagtcaatataacaccaacaccaatttcatgctgcaatttgaaaatgttaaagaaattctttcttctctacattatcatttctatcattgatctcacaaattgtctaagctgttatttggaacatttttacygatttacgttttttactgatgtacattatttttaaccatttaactatgtgcttatactcatttgagcattgctctgggcatttgtattttgagagatgatgttactttcaagtcrcttcccattctggttccacacatgtgttattagcatgatataatatgtcatcatttagtttaataagagtgaaggcataaataaaaggagtaacgtgttggttcatcaatatcccacttgtgtgtaggaagsaacattgtaccagtagtccaataaaggactgagagagctgagaataaactcagtttgggaggggagagaagttaatatacaatgcagaaaaagttcaatgagatcaaaacgttgggatctatagatgtttgggaaagaaaaataggaggaaagatgagaggagccaagtgcataaaaataaaattatctcaattcctattagtctgttttaggcacaggacttgaccccagctgaaccaaaaacagaatgcatgatctcattttgctgaacctgaaaccaaattgaactcttttgactatttcttgaaaccccaattgattcattaaaataattgcctggaaaagaaaacctatgttttctaaaattattaccagaagaaaattagcatattctccaaactaaaacaattcgtcattggattcaagtgtcttccttgagctccaacccataatgtgctgaggagctcttattaagttattagtgagtacactttgcttgaaatttaactttatcatgtccagacgtctgtctgtgtttgtggtcaccacattagagttgattctggaatcattgttaatgtcatcttttctgaatgtcatcaagtgaaacttgtatttcaatgaatgttaaattattgatctcttcttcatgtttctctttcaacatattattggtgatgacttccaattatcattttatagtacatatatggttaaccagttttgttcttgatattgatcaagagatgaacaatagggccaggagtggtggctcacgcttgtaatctcagcactttgggaggccaaggtgggtggatcacttgaggccaggagttcaagaccagcctggccaacatggcgaaaccccatctctactaaaaatacaaaacttagcatggtggcgagcacctgtaatccaagctactcgggaatctgaggcaggagaatcgcttgaacccaggaggcagaggttgcagtgagccgagatcgcgccactgcactccagcctgggcaacagagtaagactgtctccaaaaaataaagagaaagagagatgaacaataacaattcctatatgctaaaataaatactttgagtaactgatttcttctgccaaaattcaaattcaayataaatgagtctaaactgagttggaggtgtggaaccggatccctctgtttctatgcactttcctaagttgaggaatggacaggcctacatttatgaacctgtacctgaggcctctagtgagagaagccacatggaagctggtcttcacgctgctccaggcactaaatctgacccctatcaagaggaactaccctcaacccccaattttgcaataagcaagaactgacattgctatttgggcagaatgcagtgctattttggtccctggaagcttttttagcttgaggtcacatatgagctggcctcacaggtggagcagcattctcccagaagagcagcatcaggtaccagtggaaattgttgtggctgacaacagatggttgggtgctcagtggtcagggcagctgcccagccatcccagcagatgccaggcacagattaacaggagagagtagctacactcaaagggcacacacttgatcttaagcatatgtgacagacctcatagaagctcctagaaatgtatacatagtaagggggtcctggagcaataccagagggaattatgagccacagaaattaagaaattaaggtgaatatggcctcattcgtacccacaagctcctgacctgaggcctagggacaagggggacacagaaataccttatctagaaagggaaactaattaactgttgttaccacttagtgctgctgggctcctcacaaagcacaacaggaaatgaactgactaaaactgggaagtcgtttttcttgcccaagcatagcaaaccaaggtgggaacatggcatagggatggagggatgagggcagtagcaggggaaggttcccctttctgagcccattttgaaaaagtgggcccttaaaacctcagtgctagtaataataatgatggttgagattttgacattagtaagatttgagacactcagaaaaggcagtgcttgtgcctttcctccctctgcagctgaccactcaggccccaccctctaggctcactccccctgaagttggaacctggctgtacyrtggcagtagtcctgggaagggcaaagaagtattaaaaagagtcagtgaggcacccttaagatgaatgggtccctgttgataggggtcagacctagtgcctggagcagcatgaggaccagcttccatgtggcttctctcactagaggccccaggtacaggttcgcaaatgtatgcctgtctatccctcaacataggaataaggtctagagtaacagtgtagcctaacagttaagttcatggctgatccaaaaggctgctagagcacacagctccaagtgcctccggagggcaactccacagaacatcacaacatggtgcccctagaattataccacgtggttgctctgcctacccagcactcaaatcatgctctatcatgagagctttgtggccctgggcaggttgcataccctttctctgctcagtttccctacctataaaatagtgacactgcttcctgcagttgttgctggcttgaatgagtgaacacgcatgatgcccttagcatagtgcctcacagaaccagcacttaatacatctttttaaattccattttgttgttattacttggttttgtttctagggcccactgtatacatagaactaggggtttcttcatcaattcaggctgccataacaaagtaccatagactgggtggcttatagacaacacaaatttatttctcacaattctggaggctggaagtctgagatcaggatgccagcatggttggggtctggtgagagtcttcttctaggttgcatcagtgccctttgtaaaggcactagtctcatttgtgagtgttgagtgctccaccctcacgacctaatcacctcccacaggcccggcctccaaataccaacacatattgggttaggatattgaaatgaattttaggggcacacaagcactcattccgtaacaagggggtaatggaaagaataggacaaagacacaaacgaaggaaagggaacagtgagagaaaggcaagcttgcaagatcatgagaggaaaacttgtgggtccttaaattggccaaaatggatgcgcttgctttgtgcccatcaaaayggggtctcctcctgctcccagcactgtctcctttattctcatcacaattcacagacgctggtagctttgtgatagagatgatacactgttgttcaggatgaatttctaagtctaagaactcacttttgagtcatagttgtttgaaggagaaatattaattctctatcacttttctgtaaaccaactctaatttttaaaaaagaagagttaagaacttcagcagtctacatatcacataccatgctttctaaggagttgtcacatagaatttacaataccctcttcctcttttcaaggttattgcatttgacatgtattaaagccaggagaatttgatttttttttttttttcttgagatagagttttgctcttatcgcccaggctggagtgcagtggcgcgatctgaggctcactgcaacctccgcctcctgggttcaagcaattctcctgcctcagcctcccaagtagctgggattacagatgcccaccaccacgcccggctaactttttgtgtttttagtagagacagggtttcactgtgttagccaggatggtcttgaactcctgacctcaggtgatccacccaccttggcctcccaaaatgctgggattacaggcatgagccaccacacctggccgagagtttgattttatagcattagggttttaaagctaggtcactggccagtttttatttcaatatatagtaggtaaacatacaggtctaaaatgatctaacaattccttaaaagtaaggctttgaagtttgcatttataaaagagacttaaatagctcttttgctctttagtgtgatatgacaaagatgatgtgtggcatttggagcctgaatgtgaacccagtctctcctttttgcttcatttcctcattttggagatttgagtacctaacacttaggactgttgcaagaattcaaggagataagttatataaaaggatagagttcaagttgggcatggtggcacacccctataatcccggctactcaggagaccaaggtgggaggactgcttgagctcaggaattcaagaccagcctgggcaatgtaatgagaccctgtctcctaaagtaaaaaaaaaaaaaaaaaaatggaggccgggcatggtggctcatgcctgtaatcccagcactttgggaggccaaggcgggtggatcaccaggtcaggagttcaagaccagcctggccaagatggtgaaaccccgtctctattaaaatacaaaaattagccaggcgcggtggcaggtgcctgtaatcccagctactcgggaggctgagacaggaaatcgcttgaactctgagggcggaggttgcagtgagccgagatcaggccactgctcttcggcctgggtgacagagtgagacmccgtctcaaaaaaaaaaaaaaaaaaaaaaaaaaaagaaagaaaaatggatagagttccgaatgtgatgaggaactcaccaagtgtttcttcctataaccctgtcccaatgcctgacatttttttgttcctaaagctaatttaaaaactggtagaatagaggtaacagagaatattggtatgtcagcttctttggtacatttcatttatgattttgttttcacacagtcatggcatgacatttttagtaatccttttatcatttagagtaaggctcacctacatacgtccttaatgtgtggtgcacaccagaagtaaagagtgcattggaacatgagagggtggcaaagagtcagagatgcccaagccatacctgcactgggacagtgatcccatttttgaagtacagccatgtagcttggagcacagtccttccttgtaagcatttcattttcgaacaaccttagctcaaggcaagcattctgcagccatctcattaaatgttacatcttcacaataccattttcaatgcttctgaatttccatatttccaatatgtttatttaatcatcctcaattagaggattttcatgcaaggacacaactctaaagaaaacgtatttaaatatctttattttaaagatgaaaaaactgagacctagtgagagagggtgctgcttagtgacaatgccaggaataaacatgtggttcctttttcgagtccatggtccttcttacacctttataaagtaaaataamccattagattcgggtggcctttatacccaccgtggaagtatatgctttagagaaagtaaatgaagtattaatactaactcctgagtaatagatgtggcattgtattatttgtatatgagcttgaaaatttctcatcccaacctctcactggacatatctctgtagttatagctattttgattatatctactgcttataccccagaggcatagagaccagcascctaaagcaaaagacttctggattttgactttggaaaatacaaattcttctacaggagcggtgaaactagtacagctgcctgctctttacctgtagggggagacacatgatgcagtgacaagcatagaacagcacagaagtggttttagtccagaaaataaataaataagtaaattggtctaagtcttcattcctttttgtatttttttaccctgaagattcatggcttcattaaaaacagtaagtgcattctaaatagaatttagtcaattggcacgtagaaaattaaaaagtaaactatccaaataatgctagtctgtcaaaacacaatgagaagaaatttaatcttatatgtttgttgttctaaagcacaagcagtttctaagaattaataagggggaaaaacaataatgatatttaattgggacaattatttttttgttatctgggctaatcacttaatgctttgagcttatcgaatgaaagaaactaagcaactatttcatggtgacaataaggatgctggctacttacttagatctgccttttaaatctgtgtgtgtgtgataaaagcaagtagtatatatagttttttaaaaagaaatatagagagatctaatagatgggagcaagaaccatataaagaaggcaaaagggatctacatgagagaaatatgtaagtcctcaggagatactgaagtaaaacatgtgttgtgtcagtgtatagggaagacaagagacccagccattgccagagaagccctacttcctcatcaaccaccagcaggcagcagcttcatgctgtagttctttttttcctttaatagaataargattgtggccacactttaataattgccanaaatatgtgttcattaagctttttaagaaatgtgatcgaaaaatgctgatgatacattgtgtttaatagctttaataaaaaactgataaagcatctaatacatctaatgactgtcggatttcctaaatyttttaagctgaaggagtttacttttacaaaaatcctcattgaaaaagaatcttccggtaaaaacattgaactgaaagatttgcataaatgcatggagtattactatttattagttaaacttatgatcttttagagcagtaaaagtcagttctctttcttacaaatgaatttgttttggccttttatgcttttatttaatgagtagagccatacctattaatatataaaaagatcagatctgacaccgtggctttttgaccaggaattgattgaagttagacttgttttaagaatagtgaaaacaagggctatgtcctaattatgaggggaaataatttaattgtgtctctcttgtctgaatatctgatttggatgctttgttataactttaattgaaataattaaatggggctcatgttcatttagcctagcaaaaaggtgatgagctagcatatatgttaaaaacccagctttcctcttagtagttgtctaattttggtcaatgtacttaaattctccaagttttgggggtattctttatcagtaaattctaattcagtgcttaacatagtacttggtactcagaatgtattcaacaaatgttacttatcattattgctataatattattattattattatctgcttggtcaacagtattttccatgcaccttatatatggcatgcatacgctctggaggtaaaatgtgactactggttcaagaaatttacaaagtaagggagaaggaattataaatagttaagtactagctaaatgccatgattgaagcctttatattttttattttaattaattaattaatttttagaaatagggcctcactctgttgcccaggctggagtgaagtggtacgatcttgtctcattgcaacctccgcctcccagtctccagcaatcctcccacctcagcctcctgagtagctgggactacaggcatgcaccaccacgtgtgcataattttttattttattttttgtattttttgtagaggcggcgttttgccgtgttgcccaggctgatctggaactcctaggctcaagcaatctgcccaccttggcctcccaaagtgctgggattataggcatgagccacagagcctggactgaaacctctttaaatatatatatttatataaatatatattatatataatatatacaaaatatataatatataatatattatatattatatattttataaaattatatatatttcttatataaatatatatttcttataaattatataaatatatatttattatatattatatacatatttattatgtatttattatatattatatacatatttattatatatgtattatatattatatacatatattatataaatatatataatattatatatttattatatatataatatatatttattatatatataatatatatttattatataaatatataatatataaatataattctcatataaataaatataatatttattatataatgtatttctcatatatatgcttattatataataaatatatttctcatataaatatatatgtttattataaaataaatatataaaatatatattaaataattatattatatatttaatatataatatatatgaatatgtattcatatatatakagagagagagccagtggctctacctaggaaatgctccctgataaatttgaagaacataatgctttccatgtggttaggggaggattgaggattacctcacaacaaaagaccagcaagaataaggtatggaagcatggaatgcctgtccatatcaggggactgggaacagtaaaggacaaattgagttaaaggtgtataggagcaactgaacaggatgctccagaggtagattaaggaaataatatttgaggcctacataaataacagtggactttattttatggacagtggaaaatcattgagcatttccaatcgtaggaacaaatacacatttcagaatgacagtaattggaagcagtgtagaaagagattgaaaagaagaaagactaggggcagccccatactcttcagggggctgtcacaggccttgtacaggatcaagataatgcagctctgaactggggtggaagtggggctgtggagatgagggaatgggttcacaactcttcagagataggattgaagggacttgggggttgattagagcagagactgaggatgaacaattttaaagtgaaagtatgagccaggtgtggtggctcacgcctgtaatcccagcagtttgggaggctgaggcgggtggatcacctgaggtcaggagttcaagaccagcctggccaacatggtgaaaccccatctctactaaaaatacaaaaattagccaggcgtggtggcacgtgcttgtaatcccagctactctggaggctgaggcaggagaattgcttgaacccaggaggcagaggttacagtgagccgagatggcaccattgcactctagcctgggcaacaagagagaaacttcatctcaaaaaaaaaaaaaaaaagtgaaagtatatatacacatgttcattacagcactgtgaatgtgcataaagggttaaaaacaatccaaattctaaataatgtgtgaattctatttaggtaggggttaaaaaattcccataataaaatgattttaaataatttatttttgagaaaattttaataatatggaaaaatgtttgtattttaaggaatacataataaagtgccatgtgggcaataggcacacatttaatgcactttaattatgtatattgaattgaacttaagttacttttagttgttgaccagtagttagcaaaggtagataggtttaccattttacattgaatctagtgacaaacatgttatttctcaggtcccagttgttagtttgcctctccttgcctagaaagggcactggtgagacccgccctaacaatatttcaatattatggttccacagtccagcattaactgtattttaaaataataatatctctcacatagggcagcattttatggattattgagcctatgacaaaaatgttgtattatccttcagatgatcagaaaaactacccttagggctgggtgcagtggctcacacctgtaattccagcactttgggaggcaagggaggaagatggcttgaggccaggagtttgaggcaagcctgaaacacagtgagacctccatctctacaaaaaattttaaaaattagctagacatggtggtgcacacctgtaatcccagctattcaggaggatcatttatgcccaggaagttgatgctgcagtgaaccatgatcatgccactgcactctagcctgggctacagagcaaaactctgtctcagagtaagaaaagctaccacatgaataaaagatctcagtgtcaccaaagtccactcctgccagcatcccttccccgctgccctgagtttaaaaagagcaatacttcccaaacctgtctctgatcaaaggaatccccaagggcttyctgagaacaaccacaaaatgactgattcccagactttccagaactgaatgtctaggataaggctcaggatctaaattattaacaaatactcccaggtgaatgggcttgattggccaaatttgggagaataatggaatactgaagaaagcaggtgagagggctgcctgtgtacagtgttgtcattgagttgatgatagcttgttggaaaatacctgtctttctggaaagtatatatagtgacacccacaccctcatctaacaaacagtgcagcccaggataagcacgatcatatgtgcaaagtgctccacgattagtgaaagaagatacaaggtgatattattatctgtgctgacttcgtcatcctgggcatcagcgtcagggtcatcatctgttatctctcaaaatacatacaagattttaagtagagcagcttgctcgtctctgagaagaaaatcaagtatcacatctacctttgtggatgtgggagggagggaatttgggaaatgtttagtaattgcattctttttgtcttcttggacacagtaccaagtctccttaaactaataaaagaaaaaaaaaaataaaagaaccacacaaactgcattcttcagtcactccctttctccacaaagtgcttcccacccatttcagccttaaaaaatattctaggcatactcagaaatacagtgactgtggtggggcaaaatgttgaaaattcctttgaggctcatttcccaaattttactagttggatgttacactgaattatttaactctaaataaatagggagtgcactcacagcgtcgtttcttttgttatatcaaaaagcctctctcaaaaaatgctttaaaaatcagttggatatattattaatactaatattaataaaagttaacatttactgacatttgaaatgtaccaaacactctagatgagtaatctttttaaaccttatgatatccaaagaggtagacaccgttgctattcctgcttcatagatgcaaaactgggctagacaagttgaataatttgattaagatacataggtagaaaattacaaagtacggattgactcagagggagaatgtcaagtcctctcctaaaatgtactggcatgtacacacatacacaagctgctggatgtgctggtcctcaaaagttattccctagggacatctctcttcttttttttctctctccttccctccctctctctctctctttctttttcttttttcttttgagaacagaaaacaaatctataccatctattcctgaatgtatatgagtggagggtaggacaagaggagggataagatctgtggatgcacagaaactctttgggaaaccctaaaaactctctatagttatataagctaaggaaaggattcctgccagggggtataggattcttcaattcccacacttctcttcctgactcttctgaagtgcccgttgtcaccagagtgcccaggggcagagcattgacaaggaaaggcccaggtgtgtgtgagaagtcaggcagatggggtgtttcggaggaaccagggtaacgcagtgcttcagcgttagcactcaccttgcttctgggaccacttaccacgaaggcctgaaagggcaggccccaactactgggaatattaatcttctctttgggtgaagtctcttcatgccattatcatctcttagctaccattgctaggcaaaagtttcctagctcaccatgtcctgaatgcacttccttgagatatttctgatgcttaaatatccagtgctttctagtgtgccgtcttccttctgtatttttgttttgttttgttttgtttttttgtggttccttttcagcactgttggtcctgtggaagtatttctaattgactgtattctatatgccacacaaaacagatgggtgtttatgacattcttttctggatatgtttctgatgtttgcatattgaacacagaactgtccacatagagaacttgatttctgcctcttcctggctttgcttttactcatttagtccctagtatgtgaaaggctatgcttaggctccaaggacccaaggatgaataaaatacctccagtaagcttcaggaccattactctagaggtttgtggaacttaaaaagctaaaatgtgttctgttgaatgacaaaaagcattaagttaatagaaaacagagggcttataagtgaatggataaatgaataagtaaaataaagaagagagaaaggaagggagagaggaagaatggagcagatgcaggtgagattgtttttctaaagagctaagaagctgcctacagtgttagcttagagactgaaaatggtttgggaaaataattcagaaatttagggaatacttcacagcatgagaaagtggagggctgagattggtaaaagaagacatgtttcaaaatagccaaaaggaaaatagaaaagaactggtcgtgaaaccgagacctcagagttgaatgacaagtaagatacctctgaagtcactgacagtggactgactgttatttgactaatattgcttctacagagacagacctaggttttatcctcccatagaaaaaaatctcaaacattggtaggttttgtttttgtgttttgacatacaagtcaaaatctatgtgaaggaggaggaacaagactcaggggtcagaaaattggggtttcgtggctggctgtcctgctcacccactttacgtgtgaccttagaaaagtcacgccgatgtgttagatcttttctgttaaaatgtggtgggtaataattataccttcctaattttgaggaattacatgagataatctrtgtaaaaaaattagcacggtgtctgggacatagtaaatgtcaggtcttatttaaaagcatgtggaaagtgcttaatatgttgaaaagtattataaactaccaataaatattattatattattcaattactgttgatcctcaaaacagccatctctggaaactgtgcaattatttgagccctgatgccattgctgaaagcattttggaagtggctttagagaccatttacagaccatataagacacacacataccaaaaagcaataagcaatctcactggtttatagtaacacttcacttatgaccaaaaatattatttccaatatgattaccaaccctattcaccagacagaatgtcaaattagcttagatggggctaactccagaaatgaaaccattctcaagggattttaaagagttttttaagaagtatcacatggacttttaaggcaattccaagacagggagccctaaaatcattacaatgatggcaatgtgtggaataagcatataaacacattttcccagatgcaactttgaaggagacaaaatctgaattctaggcagtttgtgaaggaaaaggagcaatttctgggaaatttcttttacccctcagccaacctcaagacagtctgtctttctacagaccctcccttgctgtttctctttactggaaactgttgagggtactggaaataaaggagaaggccaatgtatctaagaccagtggatcagagaggagcccaagaaccttcatcatttccacagaaagggcagcagaggaaattaacctggccttttgtcatgctattatttctcagtgagtctattaaattattgtggcacactaaacagtgttgtctgcatcttgttctttggggattccatacaattctccccttggctggcttatcacctccccttagaaaatggtgtctcagcaatgatcctttgcttgcaatacaaaaaaaccaactctgctcattaatgcaaaattcttagtggaagaatataggaagaattctgaattccctgagaattagtggggcgacaggtggtggtgggggtgctggaggacgaggtttgaaggaatcagtgcatctttacagtgctagaaggctacaaatcaaggggaaagtctcatggcaggagtagtcgagtgagatccccacaactgttcttagtttctttgtcattatttcaagagtcaaacagcagtgaagggatctaatttgtcttgtttgcgtcctgggccttggctaaaagagaacaggcaggtggcttcagttctaccaaactatgttataaaatgtggtagtaagagctgaatgatgggaccagattttgtgggttcatattctagcactacgacttacagatgcttgtgctcaaacaattcatttaaccttccagagcctgaaattcctcacttttgaagtaagcacaataataatatttatctcatagggagttcatgaaaattatttgaggagatatttatgaaaggctgggcatggttgctcacgcctgtaattccagcattttgggaggctgaggcgggcagatcacctgaggtcaggagtttgagaccagcctggccaacatggtgaaaccctgtctctactaaaaacacaaaaaaattagccagacatggtgttgcacacctgtaatcccagctccttgggaggctgaggtaggagaatcacttgaacctgggaggcagaggttgcagtaagctgagatcgtgccactgcactccagcctggataacagaggaagactctgtcttaggaaaaaaaaagatatttatgaaaaatgaagcaaaatgcatggctcacagtaagcacttgatcattgctggttaactattattaagattatctaatagggatacaaagtatattcctgaaagaaattagggtgctcttagataggggarataaatgctagtaggattggtttcaatgcactatttattttattaatttatttctcactgaatttctttttatgatactcattttttttagagatccagatggtacctgtcattaatgtatccctgagaactcagttcctctgaaggcacaaaaataatttgaccatctcatcatttgatccacacacatttattgatgcctcttttatgcttggttctatacaagacgccgtgacgtgtggcccctgtaggaagtcctggcctctgtctctaaatctgtcatctcagcccaacccctattcagattatctgtgccctctgcgtagccattcacttcgcctgggtgcaatcatgccttccttacccaacrtttaacaagtccagcctagcaacctacatcatgccatccaacagaaggaaggcattattgactcagaacaaagtataggcgctcttagaataagtttattaaatcatttttttaaaaaaaagatatgtgctttttcccaggggagcagtgaggcattgtcagagggtggattcattaaatcaatacagagaatcctggctgcactatttgttagctatttgactttgggaaagttattctctgagccttgatttctcattagaagacgggaataatagcaaacctatctcagagcattaagtaagaattaaatgaagtgaattaagcacgaaacctagcatctgacgcatagtaggaactaaaaaagaaatactagttcttgaataaacatttttttcttgactgtactgtgatacttccatcagtgagtttccaaggcaaatgaatcatctttagaattggaagctcaatgtaagcaacaatgaagtaaagaaaacaactgaatttctcttgaaattattttcctttactgacttgtctttattgtctgtgttcacaagaaactagctctgactgcaaaaatgtctgcctgtttctatggccagttcttttctacatgtttaaattcctaattgtgcacacaatcttagtcacaatattttcatgtgcaagcaattaagactcatttaacagccctccctctggaaggttttgttctccatctgccacaaatcagattccttaggaagatatttgattttgaaacaatgttaaagtactgttcattttgttcaaatttcatttatgtaccattttttaaagtgatgtaaatggacagccacaaaaagctcagcagctggtcaaaacaaaacatcaaagtcaccattgaaatggggcaaaaaaattaaaaactaatatgctgggacaatgccaaataaaaacgatagtctgataaacattcctcagacacattttgctcataacaactatttcctttacagcagatttaaaatatgggaaaataggaatataccccagttgccactctgaatcttagctgtcctgagttcactgcaatgtatataataaggaagtcagaaggtggaaaagaggaaaagattaaatttgtaagttttttgaaagatatatggtaaaaagtagaggtatccaacagatttgtacgatagattgttcatttaaggaccaggagcggtggctcacgcctgttatccagcattttgggaggccaaggaggggcggatcacctgaggtcaggagttcgagaccagcctggccaacatggagaaaccccgtctctattaaaaatacaaaattagccaggcgtggtggcacatgcctgtaatcccggctactcgggagactgaggcaggagaatcgcttgaacctgggaggcagaggttgtggtgagctgagatcgcgccattgcacttcagcctaggcaaaaagtgaaactgtctcaaaaaaaaaaaaaaaaagattgttcatttaaaaatcaattmgattggccaggcacggtggctcacacctgtaatcccacagcactttgggtggccgaggcaggcggatcgattgaggccaggagttcaagatcagcctgggcaacatggtgaaacccccgtctctactgaaaaaaaaaaaaaaaagtagccaggcatggaggcatggtggcacatgcctgtaatcccagctacttgggaagctgaggcacgaaaatggcttgaacccgggaggcagaggtgagatcatgccactgtactccaacctgggtgacagagcaagactctgcctcgaagaaaaaaaaaaaatcaattagataagtgagagtgtatattcagggcaacttaaatctatgctctcagattaaaaataagatttaattacaattttttttttttttgatgcagggtctcactttttgctcaggctagattgcggtggcacaatcacagctcactgcagcctcgacctcctgggctcaagcaatcctcccacctcatcctcctgtctacctgggactacaggcacatagcactgcaccaccatacctggctaatttttaatttttttttttttttttagagacaggatctcacgatgttgcccaggctagtcttgcactcctgggctcaagtgattctcctgccttggcctcccaaagtgctgggattacaggtgtgggccatcacacccagccaattttgaagtatttaatttttaaaatgaaaaattgattagataatagttctccctcactacaggtgaagtctgtttttatttatttgttcaatgggcttctttagaacatgacatagaaggcaatccttggtcaaattaaggcagaaacaagaatttattaggttctgaacataaataactgtctgtgaactggtaactctctaattaagcataaatgtgaaaagaagaggattagctcttcttgaggagttggaaatggaaaatattacaatttggagaggtagcttgcagaaaccgtacagttttctctgcttatatgccccagcgttgggagacttgaaaggaatcaccaaccaagttaatgcaataaatttccatatatagatcaattggatgttttgtccccagcttcctaggcctttaataaactgaattgttttggtatcactggatgaaaggttctgtaaaagttcaaagtattgttatttggggcattcacacctgcatgtttaaaatgcctttgtgcagaatgtagtccaatctgctttcaaatcagaccttcaaagaagggtagattcatccatgtgacagatccccttaggtgcttctctaaaagaaaaagttaagctagcaggtctacccccactcattatctttgtctctttgtgcgtaatcatcaaaccgcacctctgaaaagaagaccaagagaaaactttagtatctctttgctggagatgcaaagcaagatatagaaggaactggaaaatagttcttaagtaaatacagggggaaaacggaaattgagaggacgtacttttcgctaacagttgtaaactaaaaataaaatttgaagcacgcctgcaccctcacctgaatggacttcctccttggccagggcactttaaaatttaacctgaaagactgatttaggccgcaaaggaagtcagacatgccttattttacccctccagtattaacatcaccacagaccttaagtctgataagaaacatttaggatctcttttcttggaagcctgctacctggaggcttcatctgcctaataaacctttggtctccacaacttttatcttaacccagacattcctttctactgataataactctttcaaccaattgctaatcagaatatgttgaaatctacctgtgacctcgaagccctcccccaactttgagttttcccgctttccagctttccagatagaaccagtgtaaatcttacatgtattgattgatgtattatttcttcctaaaatgtacaaaaacaagctgtagcctgaccaccttgggcacatgtcttcaggaccacctgaggcagtgtcacacgtgcatccttaactttggcaaaatacactttctaaactgattgagacctgtctcagatattttgggctaacacaatgaatatgaaaaaacttttttgttggcgggggtgggaggtgggacggagtctctctctgttgcccaggctggagtgcaatggcgcaattyggctcactgcaacctccacctcctggattcaagtgattctcctgcctcagcctcctgagtagctgggattacaggcacacgtcaccatgcctggctaatttttgcatttttagtagagacagggtttcaccatgttggtcaggctggtcttgaactcctgacctcatgatccacccatctcggcctcccaaagtgctgggattacaggcgtgagccaccacacccggccaaaaacaactatttttaaagagcatctaagctcagaaatcacaggcatattacgcctgccactaagggagttagttccattgaaggatataattaagagtgaaatgaatggtgtgctaagcacttagggatagtggttcacaaatttgtctgttccttaaaatcaccttggggggcaggcgtggtgcctcacacctgtaatcccagcactttagcaggtcaaggccagaggatcacttgaggccaagagttccagactagcctgggcagcgcagtgagatcctgtttctacagaagataataataatcacctggaaatttcttttttttaatgcagctaatgaaggaaaaaaaaatccgaggttttgaaaccaactcaaagacaacagcgatattcaagcataagatgtaataaaggttgtacactagatagctagatagccagaataaaaaggaagagatagttacaaaaaatataaggaggataaatgtataggatttcataactgctaatcatatgattttactgagtaggtgtaaaatgcttctgataatgtgtgaaaatttataatccttcgtattatatgtaggataaacataggttaagacctggattctaaggctgaatttaaggctagtttatctccatccttagatttcctacatttcatttaagagaaaatgtcctgtatattgaatattcatgaaaatctctgaaaggtgttatgcttattcttaacctcttaaaggtgtacactgaatgtaattaaatcatttttgctggctctggttcctcatgaacatctgcttttgtacttccctgtcattcacaaatgcacttaggagctaatgatctatgaggacttttttttcccctacagtaacgagcagcaaatctggctgcactttaatttctcatctgctgtcccatattgtctggtggtcagttcatgatgttactaagcttggctttattggcatcttttgtgagctgctgctgctttttccttggcaaacctgattaccaagctattgcattgagcataaaataaaggtaaattaattcaaaataaaagtgaaggttgagggcaattcatttctgaggtagacctttaggatatgagatgcataaagtgaacaagatcctacaagtgtttacttgacttttctgggttcttttcacctacttactgattttgaatagtataaattcctggataattaatctggataagtaagtygtcactgtacctctagagaaaataaaatcaaccaaaatatgtttaattctgtgctctgggtttcaagaaaacaaaaatgaataagatatagtcctacccccaaggacttgacacaatataattgtacatgtgcaaaagaaactgtctaggtgtggtggctcacacctctaatcgcagcactttgggaggctgaggcaggaggatcacttgagcctaggaatttcagaccagcctgggcaacatgatgaaaccttttctctacaaaaaaaaaatacaaaaattagccaggcatggtggcacatgcctgtagtcctagctactgggggagttgagataggagggttgcttgagcccaagaggtctaggctgcaatgagctatgatcacagcactccagcctgggcaaaaaatcttaagtagtctcaggactgtaccacagagtatcrwargarttcagaggaggcaaagaccaaattagaataataagcaatgaaggcttccagcaaacatggtatttttgttgggccttgaacactctttagatgctttagtttaatgtgccatagtcacactttctgtattgggagtgttaatgggtgataactactccagagctttaggattgcttccagtatcccagcaaagcagcccttttcaactagaaccgtttgctattacaaaagagaggtgatcacttgtgatttcttaacatttcttcactttgcctctggcactgggcttctgaaagtccaggaaagagcaatgacctcagggttttaagaccaggggtataatcccagctctgcctagctctctgtgtaatttttggtcagtaatttaacctgggttgtgttctgtaaaatgatgatattggattaaatagtacctaatcatctaactttttcctaatattttattattataaaaaaatgcatgcctctgatgaattgcctttatcttctttagtcatatttccctaagaagtgaataaaagataccaaggcaatgtgtgaattccactttttccaatctggatgtttaggggatatccttgacaccatttgctattttgagttttcaacaaagagttaaaagaaaattctggcactcctatctagtcatcctctccagttggcagaagtcttcatgtggacttgatggttgcccagagcaacaaaatattagggacagaaacatgttcagggactcgattgtataagtgactcagagctgagagaccttttccagcttgactgcagcccatacttagctaragtgggtatttgtctattcctgtctgcatactgtgacttggagatgcctattattttgcttgctaaaatatggaagccaaccttgaaactggcagagargagttaaatgatcagaaggcaatcgtcttcattcagcacgtctgacacatgaaagatcattaggactagcaaatataaacaagatcagggagtggtcttgggctttgaagagcacataccaagaacatcaagagaactcaatataaattcaatataaaagctactattcaaggccaattatctcttttgagttagaagagcccaatggrgagccactcacgcaaatcaataccctttccttctctcagttggagccagacatctctaactatcctctgaattaaactggatttttaaaatgtttttctgtccctaaactctttaaatcctgaggtcatcctttctttgttccatcagtctggctccatgataccaattactccagcttgttaaagcagttattggcatatggtagtcatgtcttttgtttctatgcaatgtttcctggagcaagaattggagggagaagtattagccaagtcttgttgctttaagtctcctctcttcaactgtttaactaggttccatcctaattatgtgtttggttggttttattttgatacccaatatacattcttctcatttgtacatgaacaatgtcattatggtaataataacaattatacaatattactttctgtcctcattgaatgtcattatgatcaggagctggtcctcttggtttggacattataatttgaaatgaatattctttttaaatgattggaaacttagtcgtaaattcaagtggtttacaatagtaactcttatcccagtaaccacagcacctgtttagaaaaatgtcttcggatcacttgtttgcaaatgtctttttccttaggatcctggatggaattgaacccatatacgttacttgacatgtgaaacacgtgtgaccctggcagatgatttggctgaccttgaaaactacagctgtttagtcactttgaaaacaatgcaatacaagtgatttactaggcttcagttttaaccattttatgctgactggtggaaattctaacccttcagaaagaaaaaaaaattgtgaagcaatggaaatgtaccatcctgggtattaatgtcattaattttcaatacattttctcacaaaaagtrtaaagaagtctttgcttgaccttacgggaaaaaacaacatacatgtggctttattttgccttttttttttttttaattaatgaagaaatccaagatttgacttttgtttcttctctacccaaatcaaaagcagtctataatctcctgcaaagatcaaagctttttgcttactataaagtatgtgccctgcttaggcattacatggtagaaagatagcattctgttccaagaaatctctattcgttctctagttgctgtgtatatattctcttttagctagaatatggttagtaaatgagtcctgaaaatttcgctgtatataccaaaacatgttgtataccataaatatataaaatatttttatttcaattttttaaaattgtgcttcaatcaagacagaagttgatttctttttccagaaattcagagtgagcagtccagggctgctgtggctgctctaaaatcaccaagggcccagagcttctttcagataatttttttaacatttctagattataggctttgtcttcatggtctgagatgactacaagagccctagccatcacaactaagtggccagcagcaagaaggaggaaaaaagaaggaatagtacacccactccttttagaaaaggcttctgagaaatcccacataatgcttctacttacatctccttggctcaaatttagtgtctgccacaaaagagaataagacacacacacacacacacacacacacacacacacaaaaatatatattttttttttttttttctggcaagtctctagttcagggatttcaatctcctttaagcaaatgagtcttctcctaacctctccctctggcctgcccagtctctctcgaatctcttgccatcctgtcctccttactcactttgggaaaatccagctctgtcagttttacagtctgccttttccacttccttacctgaattcctgggaaaaataatcccacatcacttcaagctggaattccaacaaagtcaagacctgtcacctcatcggactctcagagcacttgacagttagttcctgctgtgcccctctctcagtcctcttcatgctaattccaaacctgtcctctctcttaagcctcccaaaccagcagctcttcatctcctttcagcaaataacttgttgctttttgaagaaagtctgtgtcaaggcatgaacttcctcagctcctacatcctcttgccatagatgttatccataggtctcttactgacatccataatcccttcctcccttctggtctcagcggatgacgtttcccttctccctcctgctctaagtcaacccctgcatctgggcccttgatcctctctcctcccagctcccacaagtccttgcttcgtctgttttcctttctatctctcacatcttcaatctttacttttattctggctctttccccattcatgtctctcacaatcttaaaaacaatacacagcaaaccacagcaaagttcagccaactctttattgatcctttagctagttcttgatcttctcttttcagtcaagttgctctacctcctcatccctattcagtctgcagtccactgtagtacgactttctcacaacacctctgttccagctgccctcccttggttgccaatgaactcctaattgtcttcttagttcttagaggcttcttcttcttaaactctttctttgttcatttactgagtaaatatttattcaacatgtttttgttgggagccattttgttccagatgtttccacactcttcttgctgctctgaatacttcttttcactattcttcatggtctctcttcctccccactttacctcttaaatgtgagtattctagaatgttctttttgattaattggttttctcactctgtgtactctgtagatgttttcatgtacctcatagttgtattttccatcttatgaaagtgggtcccaaaactctgtctctactcagagtaggcacttccccaatttccaaatttattcacacaaaagcccaatgtccattgatatccaactcttcaaatccaatatgtccagagctggactcacatatttctttgcaaatctgttcttcctatctcagttagtgaaacacttttagccaagatcgaaacttataaatcatgaatccttctaccaaatctatctgtctgtctatatatatttttgaaacagagttgtctcactctgttgcccaggatggagtgcagtggcaagatttmagctcactgtaacctccacctcctgggttcaagcaattcttgtgcctcagcctcccaagtagctggtattacaggtgtacaccatcacacccagctaatttttgtatttttagtagagacagcgtttcactatgttggccaggctggtctcgaattcttggcctcaagtgatcctcctgccttggcctccaaagtgctgaggttacaggtgtgagccaccatgctcggccccaaatgaatacaatttttattttattttataactattgatcaaatccatgctctcttctctaacctgctaatatttccctagttcaagcactcaccaactctcccctgaattatagtactagtacctgaaatagtgtttttgaaactgtcagttgcatttagcattttattttaaaaatatgatacagaattgmgtaaaaaataagagtataaaaccacatctataatatcaaagataaatatggttttataaaattattgatacacccacagacatgcaaacacacacagacattttgccatgaaaatgtatttcttactataatttttaaaattagagaactactttcttaaatggtcgatctctgttgcacctcttcttagctctggccttccatgatgccagcaaatttatgtagttgaaaaattaatctgcaaatgtcactcttcttaaaaccttttcaagccttcccatcatccatgataaaatcagatctctttcgtgtggtacccaaagcccctatccagatatgtattgtacctcctctccagcccagcccctggctgactctttcagcagcaaactttttccacccacgtgcaccatgtttcacaactgtcttcatttacttgtactcttctcaccmtctaaaactcgcttctctctcataattgcctggttcactttatctcattttagaggacacctaaaattcaagcccagtccccttcctcaggccgagtcaggctcttctcccaaacctacctctagcataacctaatgaaattgctctaaaaattatggtctatgcctctttattaaaaaaaaacaacaacaacaamaaaaaaaaccctgcccaccagtatagcaattcttttgttataaccacacatagtactagtgtgtggttctggggcactgtcatgccaacttacctgtgttcaatagacctgaagtagggaagatcagctgactcttttacatctcttctcagaacatcttgaaatgattcttgggtgcaatataagagcaaaacatggaacagtagaaaccagcatggaaaactttttctcctatttgagaaagtgggatgaaaatgtgtctcttaatccctttggcagaagggagtaacttgaaagaagtggatgatggatgatcttctccactctgtcagccctctgagcagaatgaggaaaatgtgagaagcgataccattgctatatttgtttcattgaccattattttaaataacttacatggtcctgaacaaggacatgtttttgtgaaaaggacaacatttcttttggtgtgtccgagtagcatttaagaaaagccttatagtggtcaatgaaggttggcctttcacccgctgctactggagagtctgtgagaacactatttattcagcctcatggaaacactagggagtcatgcctgggatctgacaactgtgcagcaccatgccaggtgcacagagagttgttgtgatgaatgtcgagagaggtggtgggggatttttgttgtttttgctccttccattttctttccctctgacttgggctgtggtttcattcattctacctccccacccctatgcaagaatagatctctgatctctttctcatactttatctgccctaacttccactttccttttcttgagaggagaagaacaactccacagtgctttccttttrtgttttgggctaattttgttgtgttgttttatggtcttgaactgagagctgcctcagcactcaacaccagcccctggactgtgagactaatgagaaaagcaaaatgacttcaagtaaaaggaagtggtttgtgttgtggagagaaacttggaaagaaacaccaccaagaacactaggggctttattttccctaaagcctacagttgggttaacacatttcaaaataaccggtcaatttagttaatcccatcaaacgacctagtcaatacagtaaagaggtagggcaaataaacaaaccgttttttggatgaccggtttagcttcatgtatccttcgtcttactcatttctagggaataatttcaactcaaggaaatgtgaacatctgttttgcaaactattacaggctggtttaatacaaaaatacctttaaaaaaggtatgttcatactcaacatgtttttccagctgttattaaagcaggtagaaacaatatagtaggcatagaaatcttgattataatgtggaaaaactaaggttaaaattattagcagaaatacatttcttttccatccttccactgtctgaacatctctctttcctacttcctccattttattattttctttgctttgtttctctcttttaacctcaataataacaattctgtgtgccaaacactgtgctaagactgggcatgcatgatcacataaggtaggtaaaattattattcccattttacagaagaagaaactgaggctcagagaatttagggatatgtcccatggtcattattctggaaagctgtggagccaggcttcaaaacttggcagttatatttcagattccacaccctgcagtcaacactctgctgcctccctcaaattttatctcagttcatttgttttctccgatcttctccttttcacatgttctctactctattctcttgcctttttcctttccttatatctgcctcttctttttccagtctcttccctcactccttcccttatttgtcttgtttcccattctttgtctaaatctcctcttttctctccctcttcaccctattcattcccagctccctaaaattatatcattcttccttcatcatgctccctcattcctcactgcagcatcacccagtccaactctgtcccatctgtgattcctcacttctgctttcgcaccatctctctccctaaggtagaagtggtgcccagctttaaacacaaggcaaagtgagggtatgttccactaggacagcgtgtgtcactctgctgccatacacagggagtaccatcagtgattataaagaggaatttcattcctgccagagagctcacaaattaggttattgttgatgttcatatagtttttagtgactggaaaaagataatgcctccttctatggtcactaccaggaagtgagctccatgcagcagacagaaaccaaccagataactgtgagatcccagccaagcacaatttctacatgttagtcaattgcaagaaacactgagatgtaatgtagtactttggactcatattactcaggtgactatgttttcaagcagccagtacaggacagaagagattcatttccttgaatcaaagctatttggtgacttttcctggaaacactctgaggcttacaggaagggattccagattcccaagctactggcacagagtaagcatcttttctttacatagtaattcacaaacgtccctcatcaccatatgacaatatcctcactggatcagctcggttaccagaaataactagatcaaaataaatgtcattctcacatggacacaggtggactagggtttagaagttttgggaaccatcacagttctaggcacctgaaacttcttcttttgcttgtagtaaatatggtgtctttctcaggactctgccctttgtttatttatatatctggtctggtttttgttttctagagatagttctctactctccatagtgtctgctttctcattgcctgagtttgtacatggcttgccatagcttctctaggcccaattttaggccatcagtagatttaaaaatttttttttctcttgacaccaattaccttagttgcaatttcccatttataattgcaacttgagcctacaaatttacaaatacaatgaggtaactttccactgtggttaaatattatagattattggctgctggtaaacccatgaattgcctgcctttggattagatattcagaccaggtccatttaacaattcagacatttttttaaacaatacttttttgagagtcttccatgtgccaggccctaatcaaagctcttgagatacattgatgaccaaaaagaagcattatccccattcttactccttataatctagggtccaggacaggggagatatgcactgtattaatgaaataatctgtactgaatgtaaaattccaaactgaagcattttatatgaaggaaacattctataagaatggaagcccagaagtccagtctacacatgctcctggaattttatgggaaaataaaaagtctgtcagaatggatcttttgagaagattccagaagtatgttggccaataagagaaaatgagcaagtggatgccagaagccatttcttccattgttgtgctcagtttgcagtgatactactgcagagcttgaaaggcaagtactggcttctcttcctcttgttcttccacccagaaaaaccatccttatcctcatattcctcctccaccttcaccaccactactacctattttgaggctgccaccaccacactataacatattcctccccgctctaaggctctgaatttggacctcccacatgacaggactctaaataatgactaatccattaagtttctgctccatttccaaaatattcattcaaatttgaaatgcctggggcctcttgtgtagccatggctgggctaatttctgcatttgcattttaaacaccctgaatcaggattacacctgaagactttcaaataagtgcttagatggcacaataaagatattcaggttaaaaaaaaatctaatgagtctgttgttcctttgcaaggcctagtgataggaacctcttcttggaaatatttgttaagccattctcacttgtagtcactcttggtaccaaatctgttgaccgaaaaaaaaaaaaaaaaaaaaaaaactcgaggagagagggagaaaggcaaagttactctaatgttttaactaacccatataaccacggagaaccagccctaggaacyaacactaaaatcttaaggactgttttttcagactctgaaaattctcctaaatctccatyccagtatcattcaagctctttacaaccgctgtttgtccttaggctgtaacttgtgcctgaaatcccactctaaggttcccttgtggtatttttaatagtgtttgatgctgcagccagcttctctgcggtttgggagttaaatgggatacagcaatgtggtgtgctgtaatggctcttggagaaatgttagggcaaattaaattccaaataggatagcacctgaaagaacctggtcctttagtgaaagagcgtaggaaggaaggcttagagagtcttactggctcctaagtgattaagaagaaacatctaacctgagtttgaaattcattttggactcaaatacagagtatttactttaagacactggtccttaaccacctggttcttccctgtttgcttttctgcttagttaagcccaaagatgggtgttagtttaagagaaaatggtactaaaagggaggaggggaataattaacacctttgcttaaagcaccaaatcccatgagctgatgattgcctaggttaggcaatgactactaccactactaccaaacaggtctggcatctcctattcctatcctgacacccaggcccaagctgagcacaagcattgcaggattccgcagcctaatgtccgtcagcttttcctttgaacagtggttacatatcgttagtgtatttgagtcaaatgtgggtttaaggtagtggaaagacttttttctgctattgagaacagaatcaattttttaaaatgtgtatgtacacacacagatacacacacacacacacacacacacacacacacacacaccgctatatattttattttggaaaacagttttatttccagtagatctttattgaataacctatcatctacggagttcctatttaaaagttttcattggtaatggatttattccagacaggacaggttatatgtaaaatacaattcgtaaccaattaaaacaataacaaataacttgtgctgagtggttaccatgcaggtgctgggatacgctttctctctacatcatcatttcaccctctccacactgtttgaggtgtggrtctattgtcattgtctccatgctataaatgagatgaggcacagatgttttttattatctccatgaaacaaatgagagcactgaagcttagagaaggagagaaacaacaacttgaaggtttagatactgtttgaggagttatagtaaaaagaaaaatgaaaagtcctctcaagttccactgaaaatcttataagtgtgtttctttcccacttttgcaatataatttttctcttctaccctcaactgaaataaggtcacacagcctatacagtatagaaccaggactccaaggtcactgacaacaaagtaaaagtcagcagttttggaaaatacatattttttttttcctagctgaggatgggttaccttcattagtgacataactatgtcacttgaatatcaattattggcttgaatatcaattcatttctctattaagaaaaagaggaaataactcagatataaatgatggaagtggctactgagttaggaaaacatttgaaaatcactttataccaagaaatcacattctggcaggcctaatatggtataggagatattcgtaactggttatcttcattgaaagattatagagactagagaataggaaggttaagtaaaaactctacaaatgataaaattttatgttaacaagtaacctaaccaaatactgtatttcgctggactttattgtagacaaacagaaattctggcaaaagaaaaacaacaaaaaataggaaatacagttactaagttaaagctcttgcatttacattataagtatttctaaatccagtttaagattgtggaaacaacaacagaagtatatgaaattctaaatgccatttaattaaagtgttgaaagagtagagatttcaacagtatcaaaacttgtgatcttcaaggatcaaagtaaaggtgagtttatagaatgctcactctaggttctgatttggccaattcaatcacaccactgcccaattcaatgaaaaatataggcaactttgtcaagcaatgaattttatcaatgtattcaaagttgaatgcatcttaggaataatttgagggtttagaaaatgtttgaggttttttttaaaaaaaatcttccaatttaactgaaaactcttgtatttcctttctacttttcaaatatagcctttgtcctttaccctccattgtagcttaagatgtggtcttgcattataaggaatatttaaaaccattcaatattttaaaccaaagacattcaatttttaaaatttaaatggaactgccatgtattcttgagtgttgtagctatacagcagtggtccccaacctttttggcaccagggactggcttcatggaagacaatttttccatggatggtggggagaggggttggttttgggatgaaaccacctcagatcatcaggcattagattctcataaggagtgcacaacctagatgcctcgcatgcacagttcacaataggattcacagtcccactgatctgacaggagataaagctcaggtggtaatgctcgcttgcctgctgctcacttcctgctgtgccaccaggttcctaacaggccatggaccggaagcagtctgtggcttggaggttggggatccctgctatatgggccagaaatgtgaaagaggtgttcagtggggagtatacttctaacttgaatacattcttttcagcatttctacttattttatcaaaaggtaattttttttctcaggaaataaagcaataggcaattgttttttatagtttttctgtacagagccttattcaattatactaccaatgtaatcctattgcactgctcaacagaatcagaataagaagaacttccaagtacaatttgaaaataaaagtatctttcaagaatttgcactgtactgcattatttgatttggaaaaaaaaaaaaatcagaccacttccatttcttgatgaaacaactaactcatttgctaactttcaactggctctcttcagtggctttgagaatgtggcacttccatcataccttgcctgtagtaccaccctagaactttttttaattgaaaatattttaaaagataattgattcgtatgcttcaaaattcaaaacgtgccctagaaaggatcgattattaacagcttcttgtgtattatgtaaacaaatcttatgcatatacaagcaaaatacatattggctagcactcttaaaaacataggaagggttgaatctgaccaagttaatatttcaaaggtgtctatcagaaaggaaaaggaaagcttcctacagttatgtgtatatwtttttttagtttaaaaagaataagaacaagatattgggtgtgtatgtatatatgtatctatttatttattggagacggaatcttgctctgtcacccaggctggagtgcagtggcaggatctcagctcactgcaacctccacctcccaggttcaagcgattctcctgccttagcctcccgagtagctgggactacaggcgtatgtcatcacgcccagctaatttttgtatttttagtagggacagggtttcaccatgttggccaggctggtttcaaactcctgaactcgggtgatccacccacctcagcctcacaaagtgctgggattacaggcatgagccactgcgcccagccagattttgggtttttaaacctattgaacttatctttggatacatattttaagttttccttaactgtaaatgtgtttatgttcactagaaacaccacatgatttsgcagacatggaattatgtaggtgaaatcagcggctttcaattagggctcgataatattagatatagtataacttttatggcattcacacatactcttcagggataccctttgcaattccggaatagtgtttttcttgcttacttcagtcgatttcttatatctttaggaaagatctgcacattcattctaggtgaatgtaaaattgcattttaaatccattcattgggaatctcacttcttaaaaatcatgcggaaagatagatgtacatttttagtaaccgagctgttcagtaaatttcttaagattattttctcataacctctgtacatcaaaagtgaaaagaacctgtccccttctctctgtatgcaaaattccagagaagcaccaagaaccagaagaagatgaaagattyggaagagcacacattttccagcctgccagcctgggtttaatttcactttcccaaatatttacttggtaaattcagaaaaatcactggacctccaggaacctcatttccattactgtcatgtgggatagtgataacactatggatcattacaaatattaaattagactgtatggagaatgctccaaaagctaaattattgagtgctcacaaaaagcattcaacaaatacacctttccagttgaaaatgatcattccattaaattcaccctttattttctttgagaaaaaaaatctatgttctgcattttcaaacttacttttcatggatacatagtctgtaataaaaacagcatattaaacatacctttaaaagaacaaagacatttataaaacaataacaacaatcagcttctggatggttcccccccccccccccattaaaccctattaaagggaatacggtctctaaaagggaaatccagagacctgtgtattcgagttataaccctgggtcaagcaacttaactaggctgatattttggcttgatgtgatttatatgtaaccttttaagcaatgtatattaaatccgtactttttactcatctacttgattgcaagctcctgcaagataaactttgttgaactcaaatgttgtaaacttcatggggcttagatataaactacagacttcatcagtgtttaacaaatacttgcttaagaaacacaaagtcctgttatatcagccaattaactatgaagctaattttaataactgaaatatcatagaggttaatattcaaaacaccactcatcttttttctcattgagtattatttatttatttttgctttctggagacatacgtttaccctttatttactgtctcattttgtcrtctctgaacataccatttacagctttttagttattctggaaaaatcactttgtatgaaataataggctatgatggctagaaaggatctcactgatcatcagtgcaaggattgattttagaaacaaggaaagtgaaaccagagacagccagtgactagtctcagtactcagagaggtcatggttggtcagaggtcagaactcacatctcctgacccacagcacgtttggctttgtgcacaactgactgccttagttaaggacagataattcttttctctttaacaatagaaaattagactaattaaagtcataaaagatgttgctcctttataagccatagagaaacccccgatggtttctttatttggatctgygatctttaaagcatgtgactagcagctataattggattaaagtgaaaacatgtgattgtgaaggagttaaagtacctttgccttattctgctttgatagccagcttcaattgcacatcgtgacaagcagtgaaccaacatcaaccctgtggaattaaaactttagactctatcacaagcttttccaagttcaaagcccaccaatttattattggttccaagttctaggtctagaatcaagtcagctgggacatcaaatacttgttacaaaatgacatttgaatgagataattataaatagcactagaagcacatgaattaaatattgcctgaacactaattttcttaggtaggatattgggatgtcctttgctttatcactttgcagtgatgtgagcagtatgagatactatgttttgcaaaactgtattaattataatatttattgagtacttactatgtcccatgcacagtccaagtttttmatgtacatattattatttaaccttcactgctatgcttgcagatggatgtgtggtatattttagttaactcgctcaaggacatgcacagtaagcggtgcagctgaagtccagactgggtcaggctgactccacaacctcttaatccctatattaaattgatatatctgcccatgctatacatctacttgatctttaggttgatttattgatagtgacatttaatttttgttttcttcaaaattaaattcttactgtaaaactagtcaaggcaactgaagtttgtgtttgaataaaagtgtagagttaactgaggatttgtgtattctcattccaagatgagaagggagggagggaaggaagaaagaaggaaaagagggagggaaggaggaagggagggagggaaggagggaggaagggaaggaggaagggatggaggcaggaagtaagggaaggaaggaaggaaggaaagaaggaaacagtaaaggaaaagaaaggaaataaaaagtaacttcattcctctatagaatctctattaataaatgttattttttaaaaataaaaatacagttatttttcatgaatataaattttagaacatatttttcagtgctccttacctaactcccaaataatccattacttacatttctttttttgagatggagtctcrctctgtcacccaggctggagtgcagtggcacgatctcggctcactgaaacctctgcctcctgctttcaagcgattctcctgcctcagcctcccgagtagctgggactacaggcgtgtgccaccacgcctggctaatttgttgtatttttagtagagatggggtttcactcgatctcctaacctcatgatccgcccgcctgggcctcccaaagtgctgggattacaggcatgagccactgtgaccagcccatttcattctttataaccattatgaattcccacctagtttgagaaccactacttttgtgtggtttccaccctttgtgtgatttcaaaaaggctcgcctttaggcaaaatttagcaagaagtcaagccaatcaataattgcttgaagtcaacttttccagaataaaactgtataagggactttgaatttgaaggttacaatctaaagtttgctttgagatgggaataatacgtagtgttggggattattgtaaacctaagtgatctaattggaaattagaattgaaagtgggaaagtgaaggaggaaaaaatgaaggttggggagaaaagaaagcaatttaggagactctatagggaggaaagkatgagatgcatttcagaaacaaaatattaacgtaaacagaaaaaagagaaagcaatcatgacaaagcctaagagggctagtggaatgctagaatgaactcatttaccttcctttgatatttaggggctctattgcctgctaatttcatcactgttatttttcttacctcttatctttttccctgtagttattatcagcctaatattcattcattcattcatttacctgagttttcaggcttgtgcagagacaacagggtggggccaggttgcaagattgtgttcccaacttggaagtaacgtgggtaaggaaaaagtcacagctggccttagaagacacaagttaaccacatcccatgggtcagtggaagaaaacaagggaataattagaaaactgtgcaagatcagaagggagcccctgaagctataactgcaagaacctccagaccctattgcctttaaatccccttttaaaaggcaccaagtgaggaaaattccaagatgaatgggttacgggtctgaccttcaggaacatgtaggctgcctgccgatgtccacaacatcgtccctttcacatgcctaatacattagygtgggccactcatttaaaatttaaaaaatttcatttagcatttaaaaattcatttgacagaagagatgtttcaaataaatagtcttcaaaaaaagcccggtctataagtctctgtaacacagcccatctgctttaggtgaagtgaggcagtaggcctggagcctcacctggttggctcttaaccacatttactttccaggagaagcctttcaccaacttcctcagaacctccaaaacaccaaggaacaagatcctgaaattgtccatagtcttaactttgttaataacagactgcatgcccctggaaaaactatttcacttctcttggcctcatcaacaaaacaaatgtggcctaaaatactttgtaagatggtttcagttgtaaacagcctgaaaactcttagtacaactaatttgggcaagtaggtttggctacagataaagaacagaaagacttagacagtggtatacattactctgaaatatttttattatgtaagtacaaataaatggatgtctaattgttacttttcaggtagcaacatttgtaggaaatgcattttgttaggaattttaaaatcactgaacagattgccatttagtttacattttcttctcacctgcagatcctgaaacctctgaacttttcttctgccacataagtcaaatatccatttatagtttttaactcttctctttggcccctaaaaatagaagatcattcctgattttaaaagtagmacttgtatgcatatatataatttttatctttaaaggaatacgctgatgattcctgactctagccagtcctttgcaaccttcaaaggattgtctccttggccctaagatgtaacattgttaaccttttatgacagaatcacgtcaaggaatattacatctcttctagttcctgtaccatatctttatgataagaatgtgtgcttgccatctcaaaatattgaccctctggtacaatcacttgtatctacttgaatacagatgtcttgttactatttctggaaaatattcagtaacaaatttttctctgaaatattgttattaaattttcttaaaaattgtttytaaccttctttactagagctcactataaggtagtctttagtttaagaacttcaacactctctgattttggtttaccattttcatttgtgcaaaatgaatgtgtacataagaatctgtatttccaacccaaagaggcattataatgaccgttaaattttccatccaagaaataaactaactccaccatccctgagtgtataccctgcccttctcactcttgtgttctttaattagacccaatgtgcaggacatgacttgactgaaatttatagccacattgagacatgcagctaaagaaagctcttagaccaggcatcatctcaaacttttaaagcaataggatcatttgacagaagtgtgactcgctatagtaattacacaggtgcaagttataactacttaatctgctcccagcatctctgttgcccttgagaagtatgatgtcctctagccaacatggctgttcatatgggactgaatctgcacatatttgaattgagtttttcaagtttagaaatgtgatactattttacccttatgtgccttccacaatcctactcctctcttaggtggatcagagtttctggaatccatcatctttagttctgcaatttacatctcagacttacatgtttctaggcataaatgcaagaatgacaacatcaaggcctatgaaacttagacttgtatgtatgtgatggtagacattgaagtttgttgcaggaaaatgtttctctgtcatcctaggaaaagcccccagtttctcagttcctcctcctccacacgacagttttttagtttttttagttttttagtttttttctaaaatggagttaagtccaggtgcaatagctcacacctgtaatcctagtattttgggaggctgagatgggcagattgcttgagcccaggagtttgagaccagcctggacaacatggcaaaaccccatctctaccaaaaataaaaataaaaaaaataaaaaaattggcatggcagtaggttccagtagtcccagctacttgggaggcagagcctgggaggttgagactgcagtgagccgtgattgctccactgcactccagcctaggcgacagtgagaccctgtctcaaaataaaatccaattatgatcatacctctctcctgttgatgtccatcagagtctgcartgccttcagggtaaagtttaaacttccttctagaaacaatgttctgcggtaaaatgaccagggtctttggtattagatacacctggcctcaaaaaatgggtcagcccaggtataaccttccccatcttctgtttcctcatctgcataatggagtaacaaacattgtcaggaagttactggagtaattgtgtgagataccaaacataaaaagcctggcacaaaataaaagctcagtaaatgtaaatgtcctgtcttttgcctttccctcattgtctgcgacttacctttctaggttcctttctcccatgtgcatccccttccttccaaagcactcattgattctagcctgcagtgtatagtttcctgatcaagccaagctctcccacacctctgtaacttttgcgtatattgttcagtctccctgtaagtcttccctaccttcaccttttatagaaactgcagggtacctacttgccccttgagatagctattcctgaatttctcccgaatttaagcattcctcctctatactttcataaatctttcacacacctctttcatcctacaatgtcataatattagttggttttatctgtcttccttaatgtatccttaactcctgagagtggacgctacatcttagtcatctatgaaaccccagaaaatgtaatcaagctaaaatggctcactcatttcctagcaaatattggttaaatgactgaatggatgatacagggggcaaaataaatatggttttagaaaagtggcatggctgctgatctatcagtgcaaaaaggagcacacccacccactacatggccaaaaatgttgaaggcaagagactagatggcttgtgaataatatcaaatgaagttgtctttctgtaggaagtcttagacaatgtaatcttgggaggcgggtggatcacaaggtcaggagttcgagactagcctgactaatatggtgaaaccccatctctactcaaaatacaaaaatagccaggtgtggtggcatgcacctgtagtcccagctactcaggaggctgaggcaggagaatcacttgagcccaggaggcagaggttgcagtgagctgagctcgtgccactgcactccagcctgggcaacacagcgagattccgtctaaaaaaaacaaaccaaaaaaagaaaatgtaatcaagctaaaatggctttggctttccttcagtaaatggttactgtgggaatatatgtgaaatgaatatcaatactatgatgagaaacacatgcactaaacagctatacttctgatgccattctcaaatctgaaactttgcccaatttcagggacaaaagtgaagtaatatgtatccccagtgtttagcttttctcttgccatggatactaacagtgagattcctcagggactgttcctttaacctcgttagggttgctaggggctattgtgcctttcacaacacagcacctgcaactgggaataattgaaattttctgccattagctattcccagcagagtattctgagtcacatagaaagtgtcagaagcatataaattactgatacattttttaatcccatattccctcagggttggcgtttttctctcttgaaagtttcccccttaaggctgggcgtggtggcttacgcctgtaatcccagcactttgggaggccgaggcaggcagatcaagaagtcaggagatccagaccatcctggttaatacggtgaaaccctgtctctactaaaaatacaaaaaattagccacgcgtggtggcgggcgcctgtaktcccagctactagggaggctgaggcaggagaatggcgtgaacccgggaggcggagcttgcagcgagctgagatctcgccactgcactccagcctgggcgacagagcgagactccatctcaagaaaaaaaaaaaaaaaagaaactttccctcttaaaatattcttgtttaaatctaaattaatttcatagataccatttccatttttctaatgaataatactgtatcctttcctatctataccatgaagtttttctttgccttgaaaacccatttagatttatgatttctagcccccaaaataacttttgttcctatatccaattccttccctcacagttctttcacaatagcttcttttctcctgtaaaaccctacataaactccaaaaacatttctagttttggaaatcctaatccaagaggtcacatcactaacgcaaacgtagaaatctttgtaccaaaggacagaggtgcaagggaagtcgggagttgtggctgtgggaaagtgaggaggactctttggcatctgggcagaggtacagggaagccaggatgggggcagaaagaaagtttctcagtttctcttgtgtctacggttcatgcttaggcctctgcagcagccccaaggcaggtgagggtgatcagctgttccagtttgcctggcactgagggatttcctgggatgtggggcattcagtgctaaaactgggaaagtcttggacaaattaggacaagttggtcaccctacctttcccttgctgctgctgtccttttaaagtcctcattcctttgaaaattgcagtgatcttcagttcttcctgattttaactgtatacaaatattcaaagagcttggaccagcacatttctcagagagagctctacttacagtaaatgttatgtgacagagcaggatagcaaatagatgttacctggggcaactctaattgcttggtcatgactgtcgggagtaaagtgttaatagtttcttgcatatcctccaagagagtattacaaatactattctgcaccaagctctttgtaatttaatagtgtatcttggggcccttttgtatggacttatacagatcatgatctagagataatgatcattcttatttgacacatagtattgcattatgttatgtctaaaaacccatttaactctattgatagtcttgtgggtcatttccagtttttactacaattaatacaaataacactgcaggcatccttgtgcctgaacatctttgtgagtttacccattgaataaagtcttagctgtgaaactgaatttaaaattttcataaatattgccaagctgtcttctaaaaagaatatattaagttacaatcccaccatcatcacaagaaatgcttgtatttctatacacactgaccctgagattcacaaaaaacatattttccccatctaatttaattgcaaagaaaattagtcacctttcatacatttatgggccagttccctcctacctccaaagactcattgaatcaattatcttgaggagtttattttttatggatatgttaatgttttgagtatattaagaaaatgaactctcctcatttgtgtaaacttttcaaaaaattttaatttgtttaggrttttttttttttatcatttagtcttttaaaatatttgagtagtcaaattcatcctttcagatggtttctggacaccctgtatcttttatgcttgtttttcctggcattcggtgcagtacctatcacaaaatagattctcaataaatgttttttaaataaatggacaacgaatgcatgaataagtgaaggatataatttattcttttcattcctcctcatgctatgtagagatttgcaaaatgaatgccaaaacatatctttgaacagaatttcatggcccagtatcttcaggcagtggtttttctgttttgttcaaaatgatgtccctatcatctgcatagtgctggcgtatgggagatatacgtattgaatgaatacataaatatagagaataatgagataaatagaacgtggattatttggagttcatcctcctgagctaatgatgggcatttctggaagtgctgggttgcaaataagyccagaccagagaggattgtgtttaaaggcccagaatctcaactgataatcctcagaagctcagatttacttttttcattccaagtaaattaaactggagtggtaagaaaaagaaaaatggttatgaccatcaaccccagaaacagggaccacatttaattgaatttataatgtccctaacatctctgctgtgtttgaaaggttaaaaatttcctagagaaaacagcttttgctactacttgccaaagtactcataaaatggactgattgctaagaacagaaaacaaaccaaatcaaaataaaatgaaccaaaaagcaacagaaataaatgtgccttaatgtagttggatgattaccacatctactctcctcagaccaccagccttcagagtaagggcacatccttccaaataagtgcatccttgtcagggacatttggtgaggtgcaaccccttcaatgtgtccgtttcctgggtcatttggggtcttaggaaaatcttcttgttggtgcgcactgaattgcacatgcattatgtaactcattgcaacccaatagctgaactcatggtttcatagctattaaaatatgccacaaaccaaaccacctgtgaggcgccaactcagcaaatgtgccttttcagaaagtagtcataaaaggtacaaaaaatgaggatgaaagaaccctgaataacaacctagagctcatayatttggagccatgaggaaaagtattccatgtaagttgaaggaagatagyagtcaggagcattggtgttgaagaccaccctcactawgagaaagggtcatatatataatgtggaatgaatcagagctaccactgtgggtcccctgttggaaaaactgcaattttggataattatgtgcaagcactaggagaaatgccagatgttagaatccatgtttaatgtgaaaattgcattttgttgtttgcagaacctcaatatatagctttctctataaaatgtgggcatatttctgaaggaaagaaaaatgccagggtttcgttttaacatcctgttacgttttagttaaattcaaaggaacatgacttttcaaagagaaaactgtctctctctcataaaatagcattaagtggttccaaacatatcttaggttataattgaaattggactctgtggaacaaaattaatgatggtttgttctcaaagrcccattgtcccgttgattttatcagttattctttgttaataaggtggtaatgtggtcttaagagcttccactactgagagaatccaaggaatcatagataagtaaattgatgtcaaatattatgactttttctctttcattcttgtactgtatctagttgcctcatctttttttctaaatctcacagtttttgatcaaattccctagggacagcttacatgctagctttatgagggaggtgagtcatgcaatcccaagaaagcaaaagtggagttgagggggtgaaaggaacagcagtagggaagaagagaaaccatgtacaaggtaatgcattactaagcttgtcagagcttcccaacaacaacaacaacaacaacaacaacaaaactagttgctaagttacaagggacattgcctgtgaggctgtgtcgtaaaacattccacatggagaagaaagggtgarcaatttttctgtgcataggtcttttgtctctcattggtcaaagtttgctccatggtacccttggccctcccagagtccctggggaatacaragcctttgtccatctcacgtgtagctggatggttcctgtcaagtcagaggccattgcccasgctaagcccgcaaggatggggaggtggaaaacatgaggcaattgcagtgataaccgctgctttactggggctgctgtggcatgcctgggaaactgggagagtggcttatgcccaaggggtagggtgggcagagctgacctggggaggccacaaacaggacctagtgtacttttctacagtatactagcagaattagaatgaatcagacaagagatttattaaattaagcttttgtaatgtcctgatgtagtgcactgtattttaatgctgtgtcttctgttgcttgagttcctaatttgtaccaggtgttgtgccaaatgcttcaaataaattaccttgtgaaatcctcacgactctatggactccaatttacaaatgagaaaactaagacttaacttgcttatcttcaccaagctaggaagtggcagagttaaaatttgaatccaggtctaaagccattggtcttctatgccatagaatcggcatccattttgctactcttactagaaaatcatgaatcctagctatgaattgtagtgaggaggaaagttttttctgtttcatgtttatgaaaaaatctctacctttttcattttgtgtttcatgcatgtgacagcattttcagagattttgtgtaagagtgtgtgtatatatatattgtatatttacagacagaaaaaaattgagattaatttttcaattctctaagtcataagagaatggaaaaacagaaatggacaagcagaattttttatcccaatgtattctttgacatacactggtcataatgctaatgttagcaaaagaaataaagaaatccctggtgcaatgggatgattgaccttcctttagcagaacagtgttgacttgttaccgttgtcaaatcagactgaacacattcaacaacatgatcatttctacttgtgggtttggactgacaaggacatttctagtatatcttgttgacatcaggttaataagctctaagcaaagctgaaaatgaatgctacttcccacaatcaagtggaaatgttaatattatcaacatgtcttaaaggccatgaagtcctatgcctgtatatgtaacaggaatagcaaacaggaacttttcttaaagggaagattaaactagtgttatttttatgtattcgttaattgcatgctccccatttttaaaactgtacctgaaaatatactgtaataaaaaattaaatttgaaatattataccattgaataaggtcctctggatagttttgagatttaatattctttatttcaatttacatgtatactgaatcacgtaaaagttatttaggtcagtacttccccacatttgttccttcatgacatacgctgataactatatttctacgaaaactgcagtaaataaaggatgtggcttgtgttcagtctcccacccactagcgacaagagccaagggaaatcaatagcttggctcacctgtcatctccactctttggcacaccattgagaagtctaatatgtgcaaagaaaagttaattttactttcaagggttatacctttkcttattccaaagaacggtgggggagtgtaccagggccattattataatgtatattattaaactttttacattttaactgatttctcttatagtaaaattaattatatattagctttggggtatacaaaattgcactttgataataatatttaggaattggcaactttgtgggcaaagttgtgggaactatcagaaaagtaaaaaataaaggtgggacccgaaagaaggaaggattgtaggttggagccatacgcgactagaaactaagacatgtatccttaaaaaccctcaaatctgtgttctgatgggaaaaccctgctaagtcaatggttcccagactttggaatttcaaaacaaaaaactgtgaggcccaacatacaattaccaactcttcatttttgccaaacaaaactattttcaacagaacacactaacatatactggaaccatgatttcatattatgacatttattttccacattctatatacttttaatatgcaaaacaaggacaaaaagggcagtcatctcccatggggggcttagaaatctctcattaatgtgtgtgtgtgtgtgtgtgtgtgtgtgtgtgtgtgtgtgtgtgtgttttaaattggccttattatttctttaaatttaaccaagggccagtaaaactcccttttggaataccacacgcccgtgctgttcaggaatgattatgataaagtcattcatgaggacatagagttatttcatatgctctcaaaaatgacttgcagtgcgaaacacagctactattggacaagacaacaacccaactttatataacaattttttaattcactagtacttgtgtatcagtcaataaagtacctggtacttgtgtactaggcactgggatggagttggggatacgaaagtgaaaaatatagtcacaatttctaccttatactctagtaggggaaagaaaaacaaaatgtatgattgaactgccttaagcaccatgaaggcaacatacaaattgctgtgagagcatataaccaactcagaaatcagccttaaactgagacctaaaaaggactccccctgtgycttttgtatatttaaggcatcttttttatattctagaaatacaatatcattgagcagatagattccaaagggccatcttctagctggatgaaatagaaaagggcaccccttcctcaggctaacagccctgcctgctgagggcatagttaggtgaatggatcatcactaatgaatggatggttttaaagaagggaataacatgaccaaatttgcatttaactttactcaatagtctggagtatttaaatatgattaaaccttttctttccattcacttgaatgaggcagaagggctattcaggaatttaaagttgactaaggtattgattgggtacaaaatttttactaggtaggtaagggcaggatgattccaytagaaacaagaactttttctccagtgctctgggaagaattgattggttcagggctaaatcaccaagatgaataccttcttttgattcacacacccttttgacatctgggtttccctgaatcatatgcaatctaggacttacgcagaccactccagtttcacttacgaaatttgggttagccaacttaaacagtcatggctgtaatttgcttctgagttaaaatgctattattattttatgttatttatggattcctgcaaaggagaaagcatttttattttgataaattttgttattaatgaaattaactcaattttgtagtaacatagtatacagtgaaaatgtgctttacgagatgccgtggcttgtctctcaaatggacaatgaggctttccgaaacctttgtgcctttaagtttaaggaattgatttggcgtcttatctcagtgtacacaaagcttagttatcacctaggaaatattggatgtttgtctcagggagaagagacaatttttgagaccacaattaggttttgtagctatttgacatccaattataatcagatactcagtgaaacatgcattcataatgcaggccaatgatcatatatttggcttagcttttcactagaaaaattctttaaagaaatattgtccttccaattttagtggtactgaggaacagctctggttataaggggggaaatactatatgtcctttgttcaatcttactaatctttattaattttatgattttccccatttattttttaaaaatcattaataaaattatccttgattgagtttctcctatgtgctaggcattgtgataggactttagtaaacatcatctctaaccctttcaataaccctgcaaggtagggtcatattttatagataaggaaactgaggctcagagaagttatgtcttgaaattatatagtagcaagtggttaagccaggtttccaacacaggtttgtctgactctaaaaccagcatctgccccatctcctcaccattcgcgaccagaatgtgatgcacgtctaccaaaaagagagtagcaaaaggtgatttatagaagcagttayagtcctctgaagagaaggcaaaactattggggatagggaaaaagtaactataaagatcatatttatataatcgaatattaacttaatggcttgaattaggtggcaaataaaatatattagcaagcaatgttacaaaccatggtgagagctatgtagtagatgaagcagaatgatggctgggctcagggagctcatacatttggaacccagataaatctttgctccttcttcccagagcccatcatcactttttaaaaacacgtctttgctgggctcagtggcttacatctgtaatctcagcactttgggaggcaaggcaggaggattacttgagcccaggagtttgagaccagcctgggcaacatagggagatgctgtctctacaaaaaataacaaagaacaaaaccatctgaatttcatgcattccaacatatattattttgttccattctacttaataacctttacactagttgtgaaactcactgaaaacaaaggagaaactcattataattcatctaaacattcctgaaatatcactttaatcaaaaaattaagaaatattgctcagatttaaaagaaaaatggaaactcccttggcaagtgggtttgaggtttggtcattaggttttgaataatcaggagctatgtgttgtagtaggaaaagcataccatttagagagagacagctttagtttgtcagtcctgcctcttaataggtggatgaccttgagtaaagcatgacgcagcctttgggcatcagtttcctcacttaaaggtagaagggttgaaccaggtgtaagctgctgttcttccatgttatgattctaaatagttctagatggaattatgttgcacatttcatatgttgttaaacagcttctctctggaacagttgctcctaatctcctaataagcttactatgggtcactcagcaatcttcaagagaaacaaacattatttggttggtggataccaagacaattctgatgtgtttgtgtcaaagattggtcagatgaaatctaactagacatgtatcattccatcatcaagctaaatgaccttgactctaaacatcttaatttgaactgtagacatttcccaaatgctttagggtagatttggaccataatacactccactgtaaatggagaaagttcatcatccccataataattgcccccaaactgctaggtaggaatgcatactgggtttagtatgtattaactcccttgtgaattcagcttttgagagcagacctcttaacaagtcatgagtatttagagtgaaatatttaattcttagtgatactattttcctattctgctattattattcagctatgattattttccttctcctcccaacctcctatttctttttctttattaaaaaaaggagaggaggtgcatgctgccatctggggtgaatatgggcttcacgtggggacctgggcrctggttctgatccagagagtgagctaggagcacttacacaagagggtcttagccactgtgtcgggggaatagccttatatcaaagactgaagccttttagtaaaacctgaagaataatcagaagcagcattgactagtctctaaccttggttgagggacacacacacacacacacacacacacacacacacacacggctctgaaagctcagacacggaggacacgctgtgatccacttagccctctcttctccttcagggggtccttgcaggacagaacgctaaggaacaaagtcttaactggcaagctgccggcagaaggagactgtctggtggattgcagcgctgattaggaacggggagtcctttgcgtttcagaatccggtccacattttgctgagagcccaggcactgtgaataagaggagcctctgaggactggtttctgatgtcgcactaggcatgataagaatgccattgacgtcagcagagtcatcatcagggagaatggcaccccagctcttgaaaccacaccaagcaattgcagtgcttttgaaaattaaaagccggtgctggagtgtggggggtgaggtggggggtgggggggtggggagggaaagaagcaaagagggaagtcgtggctccagctgaactcttctttcttctatgcgtttcctgtattttaaaaaggcaggctcacggccctcctgtgcacacgcccgctcactcacacacactgctgcctgggctcattaacctaaattgggggaggtgggggaagaagaaagagagaaagaaggaaaaaaattaattctgttaacacttctgcatgcacataaaacaaactgtgccacccaggtgctggacagaggccctgagccacataagcctctgagaatcaaattgctgaggtaaaactgatatgcyttaaatgtgtgttgatgaagagattacaagggaggaattaaacacttcaaaggagctactacaaagcaamaatcactcttcccccatccctcacacacgcacmttactgtggacgcttgcatgtttgtgtgtctgcctgagaaaatggcaaagttggtttaggaagggaacactgcaggcatgttgtgatttcagctttcacaggcagctccaagaacatcacctccagctataattcaacggttacctggactggaaaatgtcttggaggttacgaagtctttgaattctttagtgtaaattgtctccgctttgaaattccacaattgatcgaatcctttcattctctttcccactcctaattgttccactctaactctccacccaccgccaggaatatgaaaacaacatagagtagaactgatgatatcagctgtataacacgctttattttacggcattaatgggcagctttccaagtccataaaaatcttttgctgatctgattttaatatccatattcttcagttatactagaaagaatgatttccgagatgtggaaatgttagccgggaaacaaaaggacataggcacataaagcaaaatctggcaggaaatgtgggtttaataaattgaattatgtgaaactcctatttcaaatggactgatactagaggagcagccctcgagagatatgcacagtaatgattcttcgttttcaaagacctgtttctttttgaaaaggaagaagccctgaacagcattcctttcaaatacacaaaggtagctaaagtacaaccttctcctctttcctatttgttctttaaaaaattgtaaaaattatattaagtgtgcttcttgtgatagagtcaataaagggagaaggagtttagcaaagcacatttactatatactcttaacccgtcttgcttactgtaataatcgaaagaaagatggctaattgtcttgcaggaatttgggttatcctctgaaaggatacaagtaaatttgtaacttgggtcgtattggctattttttgttctcttttgctttcatttttgttttgtctgaggtttataaatggaacccttctttcctttcttccttttttccttccttccttcttcccttccttttttcctttcttccttgctttctctctctctctctctctctctttttttttttttttacaattgtacttaaaagaataaaggattctgaaaatcagttccaggatccaataagggcctagattgtatatcacaggatcagagccccttgctctcaaatttatgattgtgaggatgtattattgtatttgggggatcaataagcagagccagagccttcacacaaggctccttgtgccccctcccccgctccatcccatgaggttaaaaagcactgactttgactttaacactgtgaacaaaatacagaacaactgtttcaattcccttcactatttctgctatgtgcctagattagatgttttctgacctgtctccctaagttgttcctgtcacttgtgtctgtcattcgctcccccatcgcatcctgcccaaccctccctgtctatgattcgaattgctctctgtccagatcatttcctgcagtgaaaaacgaagaaagactttctcccttcttcccacctacacattccttttgtcccccaagatatcccttcctcttgcctggaatcttcccaggccttaattgattgatttaggccccctttgcaccaggcaccctagcggaagcccagaaagccccaagagtctggatgtgttttggagagcaggctcaggttcactgcacactaatttgcagcaggaagtgctaggaagcccgatgagggatgggaattagcaaataaggttggcagtcaattgacagaggaagcttaaggaagaggatcattttgaaaaggaaaaataatttaatccttttcaggtgtgttaatttctttcgtggaccaaattaccatggacctggaatagttgagattttccctaaggtctggctgtacttcatagggaagaagcaagggtaagtgcagtaaatttgattatggacaccagtctaactctagcttaatgagccatggaaacaaaatagctcaatctcttctaactgctgtaatgcaacactaggagcattgagagcactgtggttttggttacacaaatttgtagtacaggccttgcctcagcatttgaacatttcagcaagagagctgaacttgcttcgttcttcatgtagcagatataagtmttttggaattaatttgaaaaaaaaagaaaagaaaagaaaagaaatgtacccagaaagcaagagatcttaaatgtatccaaaacctagaacaaacaaacattaacatttgccataattactgtgggtgtttttaataaaaatatatagatagataattttggaggttgcatttccccaccatcactgccagcctcatttttcttccatcctctccagaacaacctctgccataaatttaggaaatagtcaacctgttcacattttcatctttttactatatatgttcttattcacaaacgaatatgttgtagttataaaaagtcatcagtatcttttagcttatttttttaaatgcaacattatgtttgttggatcattttactcttgtcccagtgcaccctgtaattcccatgaattgacaggtagcgatagatcagcagtagtaaagtaactgatatgggtaggttaatagaatgacccttttaagaagggatctcaaagagggaggctaggtaagctacaaaattatcagggcgaaatgcagtgaggtagaagtgaaagcagcttagagtcagcctgggctaagataaatgaggagtggagctgcagctggaggagcaagagaatatggtctactcgagtataaatcaagcttgctggtgagcagtttaggactagctcctggttttacagcaagactttttatgtgatcttgaccaaaccactgcacttgattgctcctttctactccttggtcctcacgtgtcaaataaaacccctgaattgcagagccaaaatgcaaacaaatagaactcctcactcaacctccctcagtttataagtaaggaaatgaagacctagtaaaacattataacttacagatacctgtcagggcagaaccagaagctggacttgggctaggaaaagttgttcccccctgattacattttccaaaggttataccttttccacagtttctaaggtaacatgttgattgacttgacagttgtagaaatattaggaagtggtataaagccaagaccatgtttactaaacagtgctgctcttttttttacatcatacagatgagaaagctggtgctcagggaatttaagcaacttgcccagagtcacgtagcttagaagtgttagagccaagatttggaccccagtctttctcactttcacagacttgcttttaaccactgtgttatgctatgctgcctcagtataagctcctttcaaacaaaccacttccagtctctgacatgcaagcccagaagttttcagatttacaatggcatactttttttctatctgctaagtgttagatgtcacggtgtctgcaatggagtagagctttagaaatgaggataaaacatttggtttgatgttagtattaagaactccaatatccaaggcaggaaacttggtaattaatattttaaatggactggaggggtcacaggtattaaaatcaatattttgatggcaagataacaatgtaggaacaaataattggagatgtttagcaaaattatgaattaagtagatgtataaacggcagattatgaaagggaaacaaagattacctgggaagagttttgtgttttagtcaactgaattaccagaatgggcagaaaaaggaagtatcaaagaagggtctgctgatagaaaattaaataaagaagaagatgccatggaaacgtttttagtgcaaatacactattgctcatggctgaagacagaaagaagactatgtgtgacttccagatgaagttcaggcatagaggcagggctaaataaacaagcacatagacccgagaattctcgttgattgatctttggaaattcggtrtaaatatgatcagttcaaccatgccttagctactggatcaaaggagacatctaccggctttgggagataggaatctggaaaattgacagactgaaaaaaccaaaaccaaagaaaaaaaaaaacaaaaaaaacagagaatgcagaatgccattttaaaaaccctaagaggctgtgtctgatgttacaggactctttgactccattagtctcaattctaatatttaagttaagtgattgtgggcatagaatttttttcaaaacctgtttcgaaatgaaggcttcccatacattgaagttaaaagtggtcttgagaaaagaacttcttaataggtaaggggttttactttggaatgttgaaaatgtttggaactagatagaggtggtggttgcacaacattgtaaatgtgctaaatgccactgaattcttgactttactatttttaagtttatgtgatatgaatttcacttcagtaaattatctttgttggtgcataattactgtatatatttatggggttcatgtgatgttttgttacatacacaatatgtataatgatggaatcggggtatttacggtatccatcacctcaagtatttatcatgcctgtgtgtcctctttctagctattttgaaatatgcaatacctgttgttaactctagtcacctaatctgctatggaacattagagcttattctatctgtgtgtttgcacccattaatcaatctcttcatcccctcccctcccacctacacactcctcccaggctctggtatctatcggtctaccttcatgagttcaagttttttagcccctgcatatgtgagaacatgtgatatttatctttctgtgcccagtttatttcacttaacataaagatctccagttccatccatgttgctgtaaatgacgattttattcttttttatggctgaatcatattccattgtgtataccatgttttctttctttcttcctttctttcttgctttttttttttttttttttttttttgagatagagtcttgctctgtcatccaggctggagtgcaatggtgccatctcagctcactgcaacctccgcctcccgggttcaagcaattcttctgcctcagcctcccaagtagctgggactacaggcgagtgccaccatgcccggctaatttttgtattttaagaagagatggggtttcaccatattggccaggctggtctggatctcctgaccacgtgatccgcccgtctcggcctccaaaagtgctgggattgcaggcataagccactgtgcctggccgtataccacattttctttatccattcatctgttgagggacccttaggttgattctccatctttgctattctgtatagtgctgcaataaacttggggatgtaggtatctctttgatacaccaatttcttttcctttggataaatacccagtagtgagattgccggacatagtggttagttctatttttagttttttgagaaatctccatgctggttttcatagtggctgtactaatttacattcccactggtgatatgtaagagttcccttttctctgcatcctagccagcatctgttattwtttttttattttttattattttttgcatttttaataatagccctctaactggggtaagatgatatctcattgtggtatcaatttgcatttccttgattattagtgatgttgagcattttttcatattggacatttgtatgtcttcttttgagaaatgcctatttatgtcctttgtccacttttaatgggattgtgtgcttttttactattgagacgtttgagttcctaatatattctgaatattattcccttgtcagatgagtagtttgcaaatattttctcccatttaatagattgtctcttcactctcttgattgtttgctttgctgtgctatacagaaatttttagttcaatacagccccatttatctatttttggtygtgtggcctgtgcttttgaggttttagccataaaatctttgcctagaccaatgtcctgaagtgtttcttctgtgttttcttctagcagttttatgtttaagtctttaatccatcttgagttgatttttgtatggtgagagataggggtctactttcattcttctgcttatgggtgtccagtttttccagcatcatttattgaagagatctcctttccctaatgtatattcttggtgcctttatagaaaatcaaatgtatctatcattatgctctctgtctactctaaatctatcagtccactctgtaaaaatgtggatttgtttccaggctctctgtattattccattggtctatgtgtctgtttttataccatgttgcttttgttactatagcgttgtaacatatcttgaagtcaggtagtgtgatatattcagctttgttctttttgctcaggattgctttggttagttgtgctttttttttggttccatagaaattttaagtttttttttatttctgtgaaaaatgacattggttttgatagggattgcattgaatctgtagattgctttgagcagtacaataatttttttttttaaagagaaagggagaaagaattgggcactaagtacatcagagtagatgtttatcaatttttttaaaaatggtcttggctaccataaactgtgatgttcttgagagcttacattgtgtcttgttgattttggaattgttgatactcaaagtgcctgacacatagacttgattcatatgtatttaatcaatgaatgaatggataactctgacctcctcttagtgaagtgcacgtcatggggctaccacttgactatatgctgtgggatagatcaaagaaaggtaggacacaaccttgaacaaaattaaagtaaccttcagcttgtttataaaaagtgttctggtggagaaataatgaatcttttcagattttagagtgttgctgatttgatttcaatttgcatttttaaccatcagtctctgtggaactttagtttataggtaggacttttgattgagcttggtggctcacacctgtaatcctggtgcttcgggaggccgatgtaggaggatcacttaaggccaggagtttgagaccagcctggggaacagactctactaagaataaaaaaattagccaagcagagtagtgcatgtctgcagtcccaactacttgggaggctgagcctggaggatcccttgagcccaggagtttgaggttacaatgagccatgatcccaccactgcacactggcctatgcagcagaacaagaccccatctcaaaaagcaatgacacacagaaaaagcagaattttaatttgttctgctcttgtctctagcacttcatatccatttctctgaatatgaacagtgggaaaggtagtggaattgaaatggatcatagaatgtttcctctactgataatttttactccatttggagtatgattgaagagctaatgtcaagatgcacagcaggactcaatgattgaaaaatagtgttactgatgtaaaagtcaccatattttaagctttctttatgatagtcttccattatttcctttgtcatattagcaccactggaaaaacacaagttatacgtagggtagaaaatgtaatgacaatttggtgttttataaacaataataaatcagctttcatgaaattaggctatgtcctctgctctggtgttagaacttacttttgcctgagctcactaaataattatttcaatttcccagataaatgtacttctgtggacagaggccatatgctggtagcccctatacaatatatagagagcataaatttcctcttctctcttggtatttaaaattaggatttttataaaatgcattttattcttattttgcttctccatcattagaaagattcctggatctgtaaaccaaaaataatagtaataataatgataataagattttggcaatttaaagagaaattcactttcgtgaatatggtcacgccagctatcttttgaaccttaaaggaggcaggaagaacatttgaattaagaattttggagtattacaacctcatttggttctcagaagctttttttaatttcatcttctccacgccagtttatacaattctctcatgcctcactttacttttatatcttttcttaaaaacagtttaaattgtatcctccccaccccactttatacaattctctcatgccttactttacttttatattttttccyccattcttccttgtttcattcattcactctcccaagtcctctggcctaagttttatttgtgtggtattaagcagagaccaacagaacaactgtgaagacttcttggggataaaccaggtttcacttgaattgtggtgcgtctgccattggtgtggaagcagggcagaaagaggacagaggcataccagcaagtacagacatctaaacacaaagagaggagaacaacctcagggatactccctcagtgcctgggaagaaagcaaaacttaaagtgctcatagaattgtaaataaactctctcctctttgaaatttatgttcgatggttgctgtgtagttgcaacagtgtcataaagtccatgaggcctattttttttgagtaatcaatattgtggaaaagtgctagagcagacctaccttatataaattaatttgtttgaattgctctattcactatgaataaatatttattggagtaccttctatatgctggggacctcagccatgagatacgcaggtggaaaaaataacacttaagcagcttattgtatagcagagaggtggttgaattgatagacaattaaaatacaacgtgttgaaaggcctgttaaagccacagggtcactcagtggcaggagggattcagtcagcctgggccagccatggcaagtaagtggcctttggaaagttaccaaggtaagacatacctgatacgttcaagaaacaattccaaggttcaataaggccagaagttaaagggcaatgtaagccctggaaactgaggctagaaaggtagaaggatctctttttaccacacactgtgccgggcaccatgaagaatacaaaatagctagctattatggagcctacactttaatgtgtgtacatagatacatgtccatgttggaatttaactccttgagaggtcatgaattacttagtcccggaagcatttgaatttatactggaaagctatagtagagagttgacaaaatattttaaatgtagtaagaagaatttgacaatctattgtgtggtatgctagcaagccagttctccttcctccttttctcaccatcccaccacccctcacaaaaaaaaaaaaaaaagttaaaaacctgatctgcagtgtttgtctatggccatggtgcaaatactcctcccatggctggttccaagctaccactggttcaacagttcttttgcagaattcttgaatctttaacacttaacaagatccagttccagcatattcctgcaacagcgattctgcagttctcaatgtcaaataatagaaccaaaaagtcatataagtactacaaagaagaagagagagttgagagccagcttagccaggaaatgctccagggggaagtaaggcttgagttgggacttatagataagaaatgtaaataaaaaggaacaaacactcccaccgtgatgcacaaatattggatcatgtatgtgtgtgacaagtgtggccgtctgtagtggagggtccaggtaaaatttaggccatgaaagccttggtctgtcaaactaatacattttgttacattaaagttagtagacagccattaatggtttttaaaaacagatggtcatagcaatgttttgacaaaagcaatttttaaggaagattttgtttttataaaaagttgaattattgatagcagtgagaccccagaatagaataagagacctgcctcatgtaagtgagagtaattcaattcagcagtaatcttggaaatttgtaacttctgtggtgagaaattgtatcctgggatgttgggtaaagccactgtgaagccaaagaaattagtggctaaacgtagagaaattaagatgaaggaactggcacatggagccactgtgtactataaagtatttttattggtatttagtcttgctgttattgttgctaatgattgtattgaataattaccagctgttgttagttatttgaaattaggtgcctaaagcaacctctcatcttgcagaaagtcatctttcttgaaactttttaaaaacttgcttgaaacatggagacttggaatgggacgtctatcatagtagcacatctgaaatccttctcattcctgctgtcatttctgtcctttcgcagtccactttgtcaccacccccaccattccttgttctgcctgcaatccagctttccagtcactttctctacttcttgcctggctgcagcgtcatcatttaaacagctctgggttggtatctcctttcaccagaattcctgcagccgtggagtacgtgcagagcatcttccttttgaccctcttaaaatgctgaggggtgtttccgacacacattgctttgtaattcaataatagggcagttgtgggttctttttattgcagttatgctgatttttaaaagcactctgagtaagaaaggaaaggtagtaaaatatacgtgtacctcgatgctcattgatcacgtttgcacatgttcttgccaaatgttgtttttaaaacctgtctctgcaggtctgagctgtgaaagtttgggaaatcagggtcagaaggcaaaaaaaattcgtttgtatcatcgtcatacaatataaattacatgtagcatatacatagaaaacaatccaagggatgagcttcctggaaatcattccttcttgtttactctgattatataatggggaattgtatgctttatacaattttaatttcttgaatatatgtgctcaaaaaacattataatgtggttcagtactatatatgctgaaaacaggttgctaatgaatttggacaaagattcccattttatttcctgtacgtttacacattttttggctgtatattatatttactatatatatttattaggactacagcaaacgctaattcatcgactgagataagaaatgtgttttccattaataattataaatctgccagaagattgtgagatttacattgttggggatctaaacaaccaaaatcattgcaaagttattttaaaactattattaattatttatgtaatcatagattatggcttgcagaagactgaagaaattgttcaacaaaccatgtaggttttgtggaagagcagtagactttgataagtaagctcagagtggtccattaaccttttctctatatgtacattatgtgttgataagcatgatatctattatacctcaattattaataacaatatacatcctaactattaagaacttagcctgcaaccctaatagtgtcccctttcttctagaacatagatcagcataaggaaggaagcaaaggaggtctctaagcactcaaaatagatgttcacaatgttcactcactgaagataatgtaggtcattagccagagaaatgtatgttcatattttagtgatgattcatacaagcttggtcatgtggttctaaaccttctataattggatgaagcaaattaagaaaggctgggtaggagatttcagggaaagtcacaactgatattagccaaatgtcagctgatggcctgaaaacaacaacagaaaaagaaaatctacaaaatcatttgaaaaccacagacatagctatttggggcctttttgaaaggggcaataagctcaacccatctttggaaacactgagcgcatcctgtctggacaactgagtataatttttggtgttcaaactgatgaccccaaatcatcaaaaaatacaaaattatattttgctcaatctgtattgctcttctatattatggtaagatttctgtttagtgcacttaaaagtaagactacccccaaatttaatccccatccccttcaatgtctcctcctggacattgctccatctatcgccccttctccctctttctttgacctactctttgatggctgcatctccttcaaaactggttgaagttcctaaggaaaaaattcccttcctctttgatcctgtatcttccatcagttattaccacatatctctattgattttcgcacccaaacttctagaaagtttacacttatcattttctttttcttttccccccacttattcctctacccccttgaagttagcttgcagccccaccactctgttgcaactactgctgtagttcctctgctctcccaattgccaaaccaagtagatatttttcagttcatttctcatcaagtttctctaagtcaattgccagtgtatccctctcaaaaacctttccatctttgcatgaggtcgtacactctttcttttcctttccccccacccttcctttgacctggggttcccaggatcccattctccattcctgctttcctcactctgtgtgtcttccaagactgacttgtgcattcttattttaattaccacctgtttgctgaaagcccctaaatttatatagaaatccatcttaacctcttctgcaaagcttggaaccccaatatttattggaaattcccaactgagtatcccatgggtttataaaattcttcatatccaaaaccaaatttagcttttcctctaaatttgtgcctccttatatatctcagttggtgacactacccagctatcatgttcagaaaayaaaataaaaatacgtcataaaagcatcaaaactctataaatttatccatgtaaggattgccaccattaatatatactttaaatccttccaaatgtttgtatacttgtatatatttaaagggatcatatttggtgacttactgctataacacatttttcccatttaacaaaaaaaaaatttttctgcatcaaagtatacttcaaaattatttttgtagttgctcatgttctagcagttatttaactaataatgttaaacatttacatcatctttgcaactttatttctcttgttgcttttttcttaagaaatgactattgaaaatgacccccaaaagggtatataatatcagtgataaaaattagctcttggaaagggaggagagaattttctagtgtatggtagtagcagtaacagtggcctagttacactcaatatctcaatatgtaatgccatttatggacagcttactatgtgccacactctttaaggactttgcataatcctcaccacaaatctgtgagattggatacattattgttcttatttcatagttgtggaaactgaggcccggaggagtgaaatactaggccagggtcacacaagtagtaagaaacagagccaggagtccacctttggcagtctgtttccaagattggtcacctaacacaatgcttatctgccttttgttgtaccctagggcatcctttctaccagagtgtaccacttcgctttatgtttcttagaataaaaccaataaatagtgcagttagttagctaagttttcagaaattttgatagatagtgtctagagaaacaaaaaagacacaatttctaagatgtagtaatgaatgtttcattcatgtcggtgattattttgatttgttgatgtgtttttgataayagagtaggcaaaaaacataccatcaatttaataatggaatcctaagtttaggtttaacatgatttttgaagaagaatcaatgtgcaaatgttgatgtattttcagagttatggttcagaaatgtgaattattcaaatctcatatcagaatctaaatttttaagaaaggaataatagaatatagtaggtcccctaccatcaattctacttctgtacccctattttatcattcatatttggcttgctagtgaagatgccttgtatctgttgtatcactgggtataatgtctggcatttgcaggtgtgcatgcaaggaaggaaagaaggaagtgagggaaggtggaaggaagagaacaaggagggaagaagggaagggtagacactttgggaggccaaggcggttggatcacctgaggttgggagtttgagaccagcctgaccaacatggagaaaccccatcgctactaaaaatacaaaaattagccatgcgtggtggtgcatgcctgtaatcccagctactcaggaggctgaggcaggagaatcgcttaaatctgggaggcagaggttgtggtgagctgagatcgcgccactgcactccagcctgggcaacaagagcgaaactctgtctcaaaaaaaaaaaaaagaaagaaaaaggaagagaaaaagaaaaaaggaagggaagggtagaaagaagagaggaaggaagggagggagggttgaattatagatttccccaactgcctcccacacaatgtgctctaaccataaattcttcatctcagttgctcaggccaaagcttgagaatatccctgtgtctactctttttagaacatctcgtatctaatacattagaactcctgaagcctctgctctcaaaatatacccagagcccagcatccttgtcaccatctccatggttaccatcctattgcaagccaccatcttctctggcttggatgattgcagtggctgtctaataggagaccctgcatctcctcttgctgcataacagtctattcaaaagacagcagtcagtgcaaatcatgtcattcctctgctcataaccttgcaatggctcccatttccctcagagttaaaagtgattattgtggcccacaacgtgtagcccaatttgacccctgtttcatctctggtcttctttttaacwcttctttctctcattcactcagctccagcccattagcctccttgctgatcttcaagcacatcagtcacacttccattttragaccttggtgctgcatgaagtgctctttcccccggtatcttagggccaattccattgctttaagtctttgcttgtgtttcatctccattaggccatccatgaccatcccattttttaaatgcatcgcacattaataccattcccaatgtctgctctattgtatgtatgagtgcttgtttcatagcatgtctatccttctaacacataatttactatatctattgtttattatctctctcctgtactagactggaaactaccatgtggaacaatcttcgcctattttgttcactgatacagatatatatacacaacagtgcctcagccatgctaggttgctcagtacattcttgaataaatgaattatcgatgtactcagttctgttacacagatgatttggcttctttggtttcccattaagagccttgttttctttgccaaataattgaaagtttcactcagaagataaggaacatcaaagacctcaagctttgtggtcttggaaagctgtggctttggtctctgtctcattccccttgggatttagaatagaaaaatgcaggtggagaacacattcaaacatcccacactttatcagtattttaaaagaaagaaagtatggctttttttttctcaaaacaatgtcttagttataaactgaatttgtataaatggccagttgtacattagggcagttgcacaatagaaagcatccagggaacaatcataacctcaagagcctattggaaagtgggatcctaaatagctttctatgatctccctagaaaactgtagaatttccccagagaataagccagcattttgttgaccattctgcaattccaggatcatgcttgcatagtcatagcttggaaggaggcaaattgaaacaagttgaaaatctgcaggaactatccccagtgagaccacagaaaagccagaagaagaaaaggtgggatttggggtagagaacgagccacttctcactagtttgcatgaagcattgaatatcccaagggagaaaacattgaagttctatgagacaccaagaaaagtgtatagattatcacagcatatggatagaggtcatttgttccctccctccctttaaagaaaagtagctttgcaagccacagtttaggaacaaatggactttttgacatagttcaaatcctcctgggtgtggaggcattgacaggagcaatgtcataaattggttaaaggttgcagtctggaatcaggctgccctgaatcccagccctgccatttactagctgtgagaccttgtgcttcctaacctcagttttcttttcttttcttttttgagactgggtctagctctgatgcccagtctggggtgtagtggcaccatctcagctcactgcagcctctgcctcctggactcaagcgatcttcccacctctgcctctcaagtagctgggactacaggcatgcaccaccatgcctggctaatttttgtatcttttgtaaagatcgggtctcgccatgacacttaggctagtctcaaactcctaggctcaagtgatccacctgcttcagcctcccaaaatgctgggattacaggcatgagccacggtgctcaactaacctcagttttcataatggtaaaataggaataccgatagcacctcccttggtataaggattaaataagataatctacatagtgcttgaaacaatgcctaggcagtgttcatcaacagttagctgtgtgctgtgtacatgctggagctgctaccttgtagaaattttaaatttaaaatggtgtgtagttggaggttaggagttactaggggtatcgcctagggaaagacagttggttacccagacaggtccttacagagtagtgttttccctggagaattaactatattccagaatctgtcctcaaccaagcagtctcagaaaggtgatcttgtcacagcctctgagtaagctgattcaaactctcaaaagctcacaagagccttaaagccagagtatcagctgattccttaaaagctacaaagtgttttggccttgccaacatacgcattctccctcttatgggtaggtttagaatgctaaatagtacataacatggatttagaatagacagatttacatatgatcagaaggctcagtggtcatagttttgagggcctaggacatgcatgtgagcagtagggagatcatcacaggaggatgggcacactctcgaggctcatacaggcgctccctctctccatgggcagcacaaggcaagtctcctttgtctttgatttacttgccaaccaccctcattctaatgggaactttctttttccaaatatgttaacaccttcaagtaattactgtcagcgtccagcctgggagtctcttggacacagtttttcataactctagatggatctcataatttgcccctgaaagatggtaaataattttacttctcttacttctggactctaagggggatacttcactcttgctccttgacctctcctctctagatcccacaagccaaaaattgttggaaaggattaatatgagctgggcccaataggctacagcatgcaccagcccctaaagccagctttaggattgggcggagtgtcagcccagcttccaccccacttggcttattcagcgacctcctgcaattgtcctctgctagcccttggcagatcagaaatgttctaaagattgacctctattactttgggctttccttaacttggcatccatgaaaagatccacttaaatgctccagattcagtgaagtctccttatcagagcttcttatagcacccatacttttctttctcagcatttattatgaatgtaatcaaatcatactttgtgcatgttttgttgtggttgctgtttaatgactattttgtccatgaaagaaggaactgtgtttgttttatcactggtttatccaagggactagaacaatgtatggcacatacaggatttaacgaattttttttaatgattaatgcccctttagatagtgtttttcatctgagtgcctcaacttctatgtgcattatgaaactgatatagtgggtcacaactatcagtaagaaaaaaagaactggaatagagtagaaaaagatgagaatgtatcacgcatagggaataacttttataaatctgtttcagtatggataggcaggcctacaccacacacacacacacacacacacacacacacacacacacacacacacaywgagttcctatgaatttgttttttttaatttctttcttttttttttttgagaaggaatctcactctgtcacccaggctggagtgcagtggtgcgatctccactcactactgcaacctctgcctccctggttcaagtgattctcctgcctcagactcccgagtagctgagattacaggcacctgccaccatgcctggctaattttttgtcgttgttgtatttttagtagagatggggttttgccatgttggccaggctggtctagaactcctgacctcaagtgatcggcccgccttggcctctcaaaatgctgggactacgggcgtgagccaccgcacctggccaatattttttaaggtaagaattttgagaaacactgtcctaggttccctctaaaaccgaagatatcaccctatgttcagccttttagccctaatccttttcttaatcttccctatgaccaaatattaccatgcacacatgcacacacatacacacatgtgtgcacatacacatgtacactaatccatctaaagtgctactgttaaggaggagcaatagaagaggtgattcagggaatggtttttgatggttatttacttttataatagttyttatttgtaaaaagaagaaacctagagttttgtatcctaaacaaaatttaggattaggatacaaaataataaaattcaaaataagtcttgactagtgagtgtagaaggacagtgctacatctgaatctccagttgggtttacgcattttgtatttatcaaaaggcagtagtgatttaaaatgttgataaacactcagtttcagttttctattgctgcaaacaaactattccagaaagtgatgtcttgaaacacaaccattctattttgcagtctgtgctgggctcagccgggcagtcctgctggtcttacccatggtccccaatatggctgcagtcactccagtagactggaggctgggcttagctgagatgacctgctttctttctttcttcatgtagtctcatggcttttctctctctccatgtggattcctcatgtgaactctccagcaaggtagtcagaatttcttccctggcaactcagggctgccaagaacacaaaagccaggctttcttaatgtttaagcccagaactggcatgtggccaattttttgtgttctgttggttaaagcaaaccgagtcaagaagagcctacacaagtagtaatattacaagtatgatgaaatatcattctcttcttagaccaaacagcatattcctccctccactcttaccctctataatgttttgcttttgggagttcctttatatgaaatgcctcccctctacttctccttctactgaaatcctactcatcctgaatccagctcagagctaactcagtgatttccttcatacatctctattatctcatcctggaaataatcactcctgccaggtgcagtggctcatgcctgtaatcccagcactttgggaggctgagacaggcagatcactgaaggttgggagttcgagaccagcctggccaacatgatgaaaccccgtctctactaaaaatgcaaaaattagccagacatggtggtgaatgcctgtaatcttagttacttggcaggctgaggcaggagaatcacttgcacctgggaggcggatgttgcgagccaagatcgtgccactgcactccagcctggatgacagagcaagactccagctcaaacaaaaaaaagaaaaaagaaaaagaaaaatgccctcagcactctcatagcattatgtctatatttcatattatgtcttgacatataactttacacacacacacaagcacacacacacacagatgtagcttgcttttagattttaagttgcttatctaagattgggtgatcaataactgtttttttcaaaaaacattaactggttttctatgacttttaaatgacagctctaaataattataatttctcactagtttaaaaaggcaggtggtgggatattcaaaactattggagaaaaaaagctgatgtatgctaccagcataaaacaacaattgccctttacatcttcagaaacccctgtactgtgcagtcattttcaaacctggatttttgtcttgtgttttttccaaagtagtatatatttaactttgtaaaatggtgtggtgttttttggttgttgttgtttttgagatggagtttcattcttgtaccccaggctggagtgcaatggcgcgatctcagctcaccgcaaactccgcctcccgggttcaagcgattctccttcctcagcctcctgagtagctgggattacagtcatgcgccaccacgcccggctgattttgcatttttagcagaggcagggtttcaccatgttggtcaggctggtcttgaactcctgacctcatgatccaactgcctcggcctcccaaagtgctgggattacaagcatgagtcaccacgcccggcctaacatggtggtttttttcctacctaatatgaagatacttaatgtcttaccttggaaaaatatacatttcaaccagtttatattttacagaagtgactgagaaatcataagcctttgtgcaataacatcatcagtcaaacacataagcagattctaatctgccctctctatcaattagtcttaaaactacaagttgttcctctataccagctacacatgtgcattggtagtcttaaattgtgatatgagcccttaggtagttcacacctttccaaaggaagctcagtgaacttcctgaaactgtgtaaagaattgtgtgtgcagtatgtgcatgtacattatctgtatttttctgggtggatgatccagtatcctcatcagagtcttaagtttgagaaacccaattatatattagttgtaaatctgtttactttcttagaattcttctcacattaaaactaagattatatttctatttcataggtaaccaatttcttctggagcaactggacacttacacgaacacttccatctgtctttcatctttacattttatttctaggtattactagtgttaggtcacactccctcctatggggagattctctatcacatctctagaacttcaccaatgcaagccttcttaaattgacccactcgctactgagtctgacccctgggccagtcacatcggtgcttgttagaaatcagaatcttggaactaaatcagaatctgcaatttaacaagatttctaggagtttccacagcatatttaaagcttaagaagcacaaagctggtgcatctaataccccactttctgctttttaatcttgcaggatttatgttttaaattctttataatactattaacaattatcatttgatttctattttcatatcatctgacagttttgattaaatcctttaacctcaggatttgtaaggggtaaggggagtgggttaactaactgatctgattatcaaataatgctaccattcaggacttatgcatagtttctgtgattctcaatagaatttgatggtacctacaacctctactccttgttttagtgtctatgtttttccactgtgcttaaaaacatttaaagggagaggctggaaaattattttaagatgaatactataaatgaaataactaagattagaaaaggcaatgataatactgaattacattggaaaaattcagtttacaaaactctgaaaagttcctaaggcagaattttgctgccccggtttctcataatagacccagcagttctaagttaagcacacatctttttggctatatggtgtatataccagactatcctttttctccaaaatttgactttcatctcaaagagtttaaggaatttgtgacttggtgcgtttgatgtggcacagttccacatgtgagggatggtgatttggatagcacgacagaagtacgtgccaagaataattggcttctgtcttgcggaacagctcaaatactatgtgtatcacagtatgtaatttgggtgtacaaaatgcctgtagttcaaagtgctttactcctctgcagtggcaagctgagcttcctgttggctgattccttatgtttgcagtaaacaggctgggtgcagttagaaagaaagcatccatctagtaagtgcattcacatcatccttcaaatgccataggccttagctccaggacattttctgcctgtctccttccctccctcctttctttcttttcctctctccttccctctttcctttgttccttctttcctccctccccttccctccttttcttcctagttccccctttctttcctttcttctattgaataaaacgcaaagtaattctttttctacttactttgattcttatcagctttcttaagcagtttccttgccgctgttgtgaattacatggggctgtggtaaaatgtggcacatttcaaggctatgtatccctttagattctggttcagtaagcttggaaataaataggagagcttacgcttttaactactagcctgcgattcgtataatcatgttagtttgagaaacactacagtaatcacacatgtaagggctttggagtaagatggaccttggttatccaacgcttactgtgtgactttggtaaattacctaaacttttctagccttggattttaatgtgtaaaagatagataatactaactcagtaattctttatgggttccatgagacaatgtatttaaagcacccagcatactatctggttcatagtttacagtcaataaatgttaattccattatttgatcacaatgtaagactattgaggtttaattttgattgttttttcaaaagtttgtaatctgttaggaacaatttctaaagtaaaattcagaaaacaaaaccatcaaaatttaattcagctaacatttttgaggttctatatagtctcgaacatatattatctaattcgattatcactataaaccctgtgtatagtagatattatcattcccattagtggatatgcaaaccacggctgtgggatagttttacatttagtaagtggcagatccaagtctagacagcccaggctggttctctttatactctgcctggcaacatttgccttcatcactgtctgttttcaaaagtaactaacctctacatccctgctcacacatacaaatagctctaaaggtacaaaataaagctaattttctgagcaattcattttattcaaatcagtctaatgatctgttccatgaaaaatgattatgtagctcaaaggtcttcaaactcgtctcaaaccaggggtcaggcagatcatattcacataaagggagaagcttgccagccagaagtcaataaagattcctgggactggggtgacctggaagctacaacctgtttaaaggagacagcttctgcctagctccaggctagtgctcaagtgccaggatgtgggctccctattgtcaaatcttttttttttttgcttttttaagactggaagaaatccaatatttaatgcgaaacttcccatttttgaacaacgtgtgtgggccaaacaagtcacatctgtggaccagatctggcctgaggattgccagtttgcaatcttgacctaattgcccttaattcttcacttctcttgacctggtaaatactccatttaaatgagtattaggtatgttctgggcccttttggactgggtctttgtaatatatacaaatttcaaagactgacctttagtttttcaggttcagaattgattttctcagaacccaattagatcaggtgctgtcactgacactcagaactcatgaactttatgcaagagcaagaacatgaattagggaattcacagtgagaaatatattgacaagtagacaggataccatattggccagatcagttcattctgtccttgtagttcagccccttgagaaacaaacttctaattagaagctgctttgacatatatggagtcagaaactaggaactgtagactttaaagggctttcctgcattgggttttgagattcttcctccttttatggtagtcttaacattcggctgttaagtgttatgctccccctccccaggcatgccaagtatatactgaccaagtgtcttctttatttagctaccatatgagtggttctcaaacccatgcccttgttaaaacacagattacagagccctatgccccacaaattctgattcagtacttctggggtgggtcctgagaattttccttcttataagttcccaagtgatgctgatgctgatgaactgctggatggggaaccccctttgagaagcactgggttcctctatcatcttcagctgacaggctttttcccctttgaagggttaccgctattgtctgtgtctctgctttaatatgctaatatagcattatggtcatatccagatcctgaggttggaacctgggtcttagaacaatttttaaattgtttatatttttaaaggtatttgatttattaaaactatttgattactttatttcatcaagtccaaggtgccattgattataaaaacatrtctggattttagaggcattaaaaatgtaggggccaggcgcgatggctcatgcctgtaaccccagcactttgggaggccgaggcgtgcagatcacctgaggtcgggagtttgagaccagcctgaccaacatggagaaaccccatctctactaaaaataaaaaattagccaggagtagtggcacatgcctgtaatcccagctacttgggaggctgaggcaggagaatcgcttgaacccaagaggcggaggttgtggtaagccgagatcataccattgcactccagcctgggcaacaagagcaaaagtctgtctcaaaaaaaaaaaaaaaaaaaaaagtagggaaaaaattaacagtttcagaggtactgcaaattagtaaataaagcctcrgtttggggcagtctcccctggattatgttgtatgtgtgtagctcaactcgatgggcacagttgaaggaaggattccctggtatgtttgttaaacaaacataaggtgaattttaagcctcccttccccaattcttagtggaaaagacactactggtactgtgtcctatggctgactttgtcgtctaattgaaatatcttattattgtatgcatcctctcctacttaaatgtgaccctgaaatgccagatctttcctttggaatgaatcttttttgtcttattggactggtagggctatgcacttaaaaaaaaaaaaaagttgattattagactcactgtttccttggccagtcaggaaaagatatttaggacaagagtttctcaattgtcctcatccagttttgcctttatagtgaatttcaataaatattaccatgcctatgtaagagggtgactggagaggcagaaattctatctgactgtccacttctaactctactattggaaaacctgctaggggtttttgtatttattatttttggaaaaatcattaagtggattcccttagctatataaacataaggcctgtcatctttttctttggagaaagagtgtgacaaaatttcccccttcttattaaaagctacccctcctcttggtacagtttgaggatagcgtggaccaaactacctaagaattcaggagtctaccaggagaaaagagactttctcactttgtcccacaattagaagtactgaggaaacccatgagaatggatgaaaaagggcagtcccatggtgtattgtcgggagagaatgctgatacggcgggccctagagggattaatgtatctgtgtagaggaaggggaaacctaagctgcctgctcaagaagagcatcttagattgttgagtgagggctgatctttactaaatgagttaaatcaaagagccgaactcttggagtccaaggctgggcatggagacccaaaccagcaaggacacaggtctggacaggaccattgttcactgtgataccacatggcagtggcagaagccttcataccaattgccgtcctctctacacctgaagtttagaagcacgactctgctttagactgaataatccctgaggttcttgggttatttgaaagaggggtagttttcaaaaagagagatattagatttcctattgaaagggcagccctggtctccagtgattaactggaaaaacaaaagagatataacaatttttacatctaagtactgtgctagcttctgtggatctagaatcaaatgagacaagatgtagtatgacaagcagttagactctcaagaaaatcattcaagtctgtttaggaaaactgacattcattcattcagcaaactattgagtagctcctgtgcatcagaacctgtattcacagtcaactgaaataaacacaatttctacacgagtggagttttccaaatagactaagatgtcataatggactgtgtgtagagtaatgttcaagttttttttgtttaagcttccccatcccccagaaaatactggatatatatagcaaaacctttcatggataataattgacatataccttggagrccatttggaatctccataaacgaaagaagaaagggcatttcagacaaagggaactacatgtacaaagtcacaggcatgtagaaaaagatgaatgtttcggagtaacttacagtatgtagggcgcaaacagaggaaayggcaaggaataagactatgtgagaaagcaagttagggcgaccttattaaaaagtttatagacagtggcgcaccgccaaagatgtagaaatgtggcttgctgtgttctgtattttggagcaatcactcgggtaccctgtgttgtgagtaggggtgaaagaagagaatcagtggaaccatgggaagcagtttgggagataggttggaaaaatattggaatgttctaagcatgacattgtgaaagaatgctagaatctttttcatatgaggggtgttatggaaaataaagaaagtattggccctgccctcaagaagcttggaacataaaagaagtaaaacatgagagcagggcctaataatgtatctcaaagtgctgaaggaagcatatgcattatagaagttctcatcctggactgtggtttgttgagaatgcagctgggtggagtctgaggaagtaagtgatggccataatcgaagaagagataagaggtaagagcaatggcttaaaagcaaaaaagcctcaaaacattcaaacttcctttgtataatagtggatgttattttgagaatgtcagtttcaggagataccataatcatgtgtttgtctgtatttaaaaagccaccaccataaaagatctagagtcactcatgaagttcaagtaccaatttttacccatgagtgtggaacattctgctcttttacaaacagtaactcgtactgtcacattttgcggcgcatctctcattttgttggttatttagtggccatgtaaacatgtacatgacttgtggtgaatatggtgattctcactttataaccaaagagggtggatgttacagcatatgagcagttatgactgtaaagcctgaagtgtgagtcacagggtctgacccaggtagtaagatgtgttatttgttcatgttggttagctgaatttcctgggctgacctcactgaagtttgctccagtaaagaaccggatctttactgatagatcaaggatctgaattctgcacctagttctttggctaaccagttgtgtcctttgggggaaatttcttaatctttctgctctccatttccctttctgtaagtaagggattagaccaaattccatccaggattgagaaattctatggtgtgacaaagactgctggtgctgactgaatatccttacagatttgttcatttagtaaccaatataataaagatgactgactgaatcttaattatattgggtgacatctgcctagtcaaaagattgcatttctcaggctttctaagagattgatgcagccaactacatgttagcagagggagctcctgcctagaagcactcacttttactcctcctcccgtttgtgtagtagtgatttggtgctggtgctggctggagcatcagtagccatcttgtaacctaaatggcagaattgagaatggaagccatgtgttacggatggtggatcagaaagataataggaacctaggtccctgataaacatggtgtcaccattccaaccttgacctgtttctagattattttctttacttttctttttcctttcctcttttttttttttttttttttttgagtctttctctgtcacccaggctggagtgtagtggtgtgatcagggcttactgcagccttagcctcctgcactcaagcaattctcccacttcagcctcacgagtagctggaaccacaggtgcatgccaccatacccagcaattttttttttttaattttttgtagagatgaggtctcactatgttacccaggctggtctcaaactcatgtactcaagtgatcctcttgccttggcttcccaaagtgctgggattaaaggcatgagccaacatgcccaggctacattttcttaatatgagataaaaataaacctctttcttattgaagccattactagatgcctaattcactttctaactaacatattagcatcagattatctttatgtaatttccattgctaggttttctctttgcagtattggagacaatagcttaccaactagcttgggaacttcttagtgctattagagtttcaacacaatttaccaaatttctaaaattatttagttattggatatatgaaaacataatcaccatatgtgaagaaaaaaccaccaatgtttagtacaaaaattgggagggggaatattatattagagaaagtttattaatccagaaaaccacagaatttaaaaaatattggaagttgggaatttgggagttaaaggtacatttgatctttggttaatggcaagttcacattttataataggatgtaaaaccctatttctcactgcacctgtactttgatcttcttgtctgtcattgcaatgtgattatgaggattactgggtcactctcagcctaagatgtttttgtgacttaattttctaggagaggaaggggatcattaaaggatatcattaaaaggagagacacaaggcttgtaattgaccttccttgaaagtagtcccatctggaagattttatcagtaaacatttatcagtgtatttggcttttaagcagactcttctcctcttgtctttgaaacaaacaggcaaaggctaaaaaggaacacgttagtgctcaaagtttgcttcttgtgcatgctgaatgggaagaaaaataatatttaagaaaaaagctttcttctaagttaattacatgattcttttttcagttttgcttcaatgtttctgtttgccaaattttaattggcaagttatggtgttcttcaatgattatgcyttggtgtgatttgcttggatgtgtgtttagagagtggagggtagaagggatgagatttttgtgaaatacagtgagcaggggcttagaaaacctactgcagttctctgtgtgactaagcccagcactagtctgaaacttcgtattgtacttctctggaatgcaataactatcgtcaggaagacaaacgttgctgtggcttaaataaaataaactgacatgatgtattaccagtcaaaataaattacccaaacagtcttgtaaagttgtgttttttggtcatcagaactgcctcattattcatgtgtctgtttgtctctttggttagttttgcttgttgacttgcatgtatcaatgatcacaatccttgtcatttgccaattccatataaactttcagaaagtgaaaattgcttttaagaaatttattttgaagtttctacttatatttacccacataatgcccctcactgatagccagctttgtttcttccattcctttgagaatactccctagtgaatttaaagagtaaaatctgatgttgtggattataatattatacaccaataagtggttgttacacacttgtgtccacacttggtaagatgtccttgtggatgtatctcttctatgtatagtatattaatggctttatccgccatttaatgtggttcccatgaggtttaggtagaccatagatactgtttcaattagaacacttcatgaggatttagtttctctgtctatgggtcctgtatctgaactctccatttttattcttttgtttgttttttgttttgttttctccctgatgcctgatatcagaagaactctccatttttggcttcattctctgctctatccacatgagacagaccaatgtctgcaatctagtgccatacctttccaggttttttatgtccaacaaaaaaagagagcatctctttctagtagctcccacataattaagggtatagcccctctcctgaaccaatcagtcaatcacagtggtcccatctgaccatggggatgttccccaaaggaaatcagggtgttatttttcaaaaggaagaagaaataaatgctggaccttcataacaaccaattgcccactaaaagtgcagtcatatttcttgatgaaatagaacctctccttgtatactgggctccatgacacattgatcatggttagctagaagattctgaagtcttattatccactttgccagttacatttatttgtagctcaaggggactgttaagggaaaggggagcagtgctaaaaacaaatcccattccaatattattaaaaaaaccattgctctgcccttcctttattcacaacttagttcctcatcctcatcttccccagctcctccttttcagcaatttcctctgtaggtgcccctaccactaactcccacagattcccccatctcctttgaagaaaaaagctagatgctcccactccctttatttcttccacagtaaccagcttaactagcacacggctttgtacatggtacacagttaagtaatatttgtgaaataaatacggaacacttaagggaaataaaaagcaatctatcctcatcaagaatgagctgagaatccctgagatagcctatttagcagcttagcctgaattctgttttagtttctgtttctggaaactcttcttattttaagaaagaatgattcttataattatttcatatttgttgatattatccagtcttagccagttatcaaaatggtcttgagaattaggaggggaaagcataatgttataaacatttcagcatattgtgcaagtaaagtcctggtagtctgggtaattctagaactcgagtagacttgaagtgatatcagaggaaagctattacccaagtttactgcttgctaatcaggcagccagcaataatgagatggtacaatagaaatgttcaaagtaaggtttcttggcatacatagctatttaattattttatttctgaaagaactatagctccactgttacctaagtttaacctttaggcatttaatataatagtatctctagtgtaacagagggaatcaattactatgataaaccatatcctttgtaaaagaatactataataccaagaaaggcttttgtcttcatctttttagtttttggttattttttgttccattccctttaggtaagaataagcatctagaatgcctcattatgagattgttaatgaatattttccattgtaatttaataagcctaaaaataagaagatactcctctactttgtcatacaagatcgttgaatggtgggtcattagttgatagcaaaaagtcactcattcttagttatgtttctgatgacttgaaaaattgagtggcagtatacaaagtctgagcaaaactgacttcagaatgagtatttggctttgatttctcatggcatcttgcccattgagccatcttttcagaggtctcagctgtatgaaaaaatagtacttttttttttccagaaacatgaagtctggcaatctttataactttgtgcagcttgttgattcccggattcaatggtgttagtgaaaaagaagtctcaggagctccagagtctcagaagaatgacaagaagacccctaattcttgcctgtctctatatttagtatccaagttggggataaaagctagtttttaagattttctgttcagaaatcttttctatatactattcagaggcagccctttgtttaaacctttttttgtctcaggcatggattaactgcaattggattctatgttaaaaatgtatttttttgaacattttgtaggcatcactccagtattttctattggtgaaatcctgatctttttctgtgtagaaatttttgtgaccttcttttctttactgaagttcccacatttcatgatcaattgtcttggtctgcatttttatccattgccctgggcacgcaatagaccttttcactccagagatatgagtccttcagttctgaaatgtttgctcttattcattgataattttatgccctctattttctctgttctttcttccttgaattctcattatcttagttggatctcctagatcatatcctttaatttcttaattgttttcttccttttttgtctttttgttttttggtcttctagaagatttgttcacacacatttttattttccaaccttactattaaaatgtttattttggtcatgatttaaaaataatttagcactctcattctctcctttttttttttttttttttttttttttttgagacggagtcttgctctgtcaccaggctggagtgcagtggcataatcttggctcactgcaacctccgcctcccaggttcaagcaattctcctgcctcagcctcccgagtaactgggactacaggagcatgccaccacacccagctaatttttgtatttttagtagagatggggtttcaccatgttggccagggtgatctcgatctcttgacctcatgatccgcccacctcagcctcccaaagtgctgggattacaggcatgagccaacatgcccagcctcatcctctcctttttaatggtatatgttcttatgtcagaagtgtgttttatctaaggtcacagattattatcctcttgaggttttcctctgtctctctctttcctgtagatttctttcttcagttgatgtttgcttcttctagtttctcttcttcattatggagagtttccttaagaggctgttcattcttagttaaaagcaagacatatacaggtgcatatgcacacacacacaaaacaaagcaacaatgacaatgatggcaagaaacaatgtcagaagttctgtgatcatggatagggctcgtcaactgtagggttgcactgttgcatcataggttgttcaatcaaagccggtgtgttctttgaaatgtttccccaaggtcatgattagggggtaccccactttctgcctgcgagatttgcgcctggggcatataactgactgctaatgtctggggagcatgacaaataaaaaagttgggtttcttattgcaaactctataggctttcaaataagcacctatttcgcaacctgcagcctctcctagtttgctacagtgcctagtatcatcagtttcaaatctctctagccgatttcctccaaaaaagaaagactccgcttccagtaggtaagggaagtagttagtttggatccaaaggctccatataattttaatacactttcagcccctcgctaaactcctgccttccttaattctgctgcctccaagcagtaagtctttctggattcgggagaacacattagtccactttctcttggaatttactctccgtaaccatttcctcgattatgctaaggcacttcagctattttctgatttcaaaaaatcagtagaaatctctcctttgctgatcttgtttcctttattatttgtgcctttgtgggtgggtgtgttgtgtttttattcctttactttcacttcagtgaagtatcagtaaaagagaaagaagataagcaggcatgatttcaccctctcttactggaaatccaggggaacgatagctgaggaggaaagtagcttggaagagcaccttagagtagaaaaagacgggagaaggtgagtttacaaaagtacagcaagatgatgatgatgataaataaaactcaatgcgtgctcactatgtatttgcactgtgcaaagttctttacatggattatttatttgtgtttttgtaagaacacctcaggaagtagctattgagacacagagaagtaatatgacttgtttaggttagtaaatggtagaggtggtattcaaattcagatctgatttcagagaccatcctctcaactgccacactatcttgcctcctacaaattgcttaagcagggatttaaaatgaaaccrtacttttacaaaaatcatttttcatgtccattatttaggagtctctctactctatcaaaagtattaattgacctatttattaatatcttagtaatgtaaaatgcttttaggtttgcaaattagtaagagaaacttcttcagattaatagatgctgtctttatgaggactgcatgagacttatgtactcatcattatatacacccacagacgatctatttgaattctgtactcttactcttttgttaaataaatgtactctttctaactatgttttaaatcatctgcaaagagatggaagctgtgtgtatacaacagcaaacatctggaagaaaagaatattcagccaaagcttgttaaagagattcataagcaaagtatgcctttgaattatgaaaatgaattcatgtccaacatcataaagaactctgacatgtctgtttatgtttcaaacatggcttagagatcactgagattaaaattcaattaagtgtgctctgttgtctttgctgtcaatttcagttaaaccagacttgtttggcagttttggggagaaaaatcttcagtgttttaccttgctaacattttaccatttggactttgtgttttttcccaataaatgcatgtcatttaaggagatgcttcatgttatacacacctggtgattttcatcagcagttgtacagatgaaagagaagtaaaagcccccaaataattcatcttttaggctttgtaaaattatcattttataaatttttaaattgtgaaatataacaaaatttaagaaagtatgtaaaatttaaattttaagtttaacaaattgttctaaagtaaatacctactatgatcacccctcagaaagaccctataatttcctgtttcatcctctccagataggtcaccactatcttgactttacttttacttttcctacttttctttatgatttaccacgtatgtatgcatgccaaaacaacagttcaatttagtttgttttgcattttatgtaaatggactcatcttgtagatactcctgtgttttgctccttttgtgcaatattatagttgtaaaattcatcaatgttgtatgtagctgaggattgcacatcataatatatatcatgatatatagcattctrttgtataaaggaaccacaatttactgtccaatcttctttctttatgcagttgaacatatccagtttggaaatattatgaataaagatatttcgaacacttatgtgcgtgtatcttgatgcacataagcgtacatttttgtgggggaatatacctaggagtggattcatgggtcatgcatatctttaacttcagcagataagcagaaagcatttgacaaagtggttgagaaggtaatgagaattcctgttgctccacgttctaataaaaaacacttggattttctttcttttttttcaaatgacagggctctataatgggatcattgcatttctctgattactaatgagagtgagtactccttcatatgtttagtagatatttgaattgtatttgtttttgttgttgttgtagctcttcatgaaaagtactttctaaacagcatttytgagcaccctttagggagccaaaggccaaataagttagagtatttgtcacaacatggcaataagagaggcgaattcatccattaattgcttgccatatgcttatcactggaatatattttgcagcatctcctgacatcactatttatcccttttaccaaaaaaaaaaaaaaaaaaaagaaaaagaaaaaaaaaacatggctactgataatacttgggagcactcaacgaaggtcccgtctgaractctgtagaatatattatagaatgcaaatattctttggattccgtcttgttgttgttgttgctgtttcctaccctacaacttttggcatctctacccaacatttttataatacaggactgtctctgaggtttgttttccttatggttgttctcatgtataaaagagatgatgatagcgtttctcatgccagtatgtctgtgtatgatttatgttgtaaacagtgcaaagagctttacagccattgtctcactaatcttcagagcatcttttcgaaatagagaggagacaagtgaatcaacatcctctatatcacgggaggaaacatatctccctgtggagagatgtccactgctttatcgacaaggcacaaagctgcgaacagaattcaggttgtattctgactcctacactaatgcctatggactagacatggtgtaaaattttatatgcgtgaaacatgaggtgtattcatcaactgatcactattagcaactggctagaacatgaagtgtttgtttgtttttcaaaagaaagatatgatgaaactttatatgcttttacacagttctgatattttaacaatttgactaatttttatagttttattccttccagaaattcctttaactgtgcttatcccgtaagtaattgctaatgttcttaaactaatcgagaaaatcatttctattagtccctaaatacccagacttcataccttcttgcttcccactctcctcatatctaatctctcccttaggtttagcaacaaaatgtgcagcttgacrtggtcagtgggtgtctgaacatttagtgctagtgtttcctctcatctctctgcttttatttggacttctcaactcttaaaagtaattttaacatattataagaaatctttgaatttataacactttacagtttatgaaagactatataaaggttccttctcacaggctgtaaggggtacaaggacaatgaaactcagatgacatccttaaatgcactctactattatatggctaatttaagattaaaaatctggtttcataattattagtctagtggtccttttataggcagcataatacagttgtaaggagtacagactgcctgtttttgaatcactggtccatgctaactagctggcttaccttgggcaagttacttgaggttctctgtgcctcagtttccccagctatcaaatagatctaagagttgtgaaaattcaatgagttgatacatataaaaatacttaaagcagtgcctgtccaacataaatgcttaataaatgttagccctattatctttcctcattatttagtgttaaagagcaagaacatctataaaaataaaaatcaaataatccttcaaaaattcctgaatattataaaactaacatataatgtcaactaaaattgataccaattagtttccttatcttaatgaaatcagtattgtagtcagagccaagctactgacctggattcacatataacattcagtttctcttctgaaactccagctcacttagcacatttatgccaaaaacaacaacaacaacaacaacaaaaatgtataaattgcctcatttgtttgaagtgtaacactcaggttttccatacagcaggaaactctgatagaagtatagattaataggcaaggcattgctccattccctaaaggcgtaataaggctattccacaaatatgtattgaacttctacacaggtttaagaattatgaggaggagagaagatattgtaatgaatccctactattctgtttattttttatttctttttaacttttaagttcaggggtacatgtacagatttgttacataggtaaacttgtgtcatggggtttgtagtacagattatttcatcacccacatattacacctaatacccattagttgattttcctgatcctctcactcctcccaccctccaccctctgataggtcacagtgtctgttgtttccctctatgtgtccatgagttgtcatcatttagctcccacttacaagtgagaacatgcagttcctgtgttagtttgctaaggatattggcctccagctccatcagtgttcctggaaaggacactatctcattcttttttatggcttcatagtattccatggtgtttatgtaccacatttgctttatcctgtctactactgttgggcatttaggttgattctatgtctttgctattgttaatgctgctgtaatgaacatacacatgcatgtgtctttataatagaatgatttatattcctttgggcatatacccagaaatgagattgctgggttgaatgctagttctgtttttaggtctttgaggaattgccacactgtcttccacaatggttgaactaatttacactcccatcaacagtgtataagtgttcctctgagtacctgttattcctttgaagaaaatacctacacaactagataattagagaaggagagaaagagaaagagagagaaggatggcacaataataaagtgttttttggaggcaaggatgatgttttatgaatttttgtattcccagaaaataacagataagtggttattagtgaatgaagaaatgaatgagttaactaattgtagcagaaaagggaaagataaatataaataaaggtcatccatctatttaacaaacatgtattgcatgcctaggaattgtacttggcttgaagactttaaagtagattaagacagtcccagacttcaaggaccagcaactgagggtgttaaacagaaaggacaatgacattacaacaagctgtgggttcacacataccatttcaagactagagaagagaagaaaatcagagattcttccagaaatgaaaattcttgagctggggctttgaggatgaggagaagttagttagttagaaaggaaagatgagtaaggttgggggtcaatagttcgagcaaatattgcagtatgaaaggtgtgagagagcctcaaacaggttacagattgtggcactataggtgatggggaaggagtgagagaggtaactacagagaagtaacctattaggaactgctaagaaatgttagatattatgctaaaaagcttggaatattttttaaagcatgggggcatcacttgatgatctttctcaaggacaggactattaatcttagggtttattatattcttcaattttgacacaatttatacttcaataattctctgtaagaatttttttcctttgtggtcttatttatttattgagatagggtcttgctctgtcacccaggctggagagcagtggcaatcatggctcattgcagccttgacctcccaggctcaaacgatcctcctgcctcagcctcccaagtagctgggactataagcacgcaccactgtgcctggctaatttttaaaaatttttgtagagacaaggtctccctatgttttcttggctggtctcgaactcctggtctcaagcaatcatcccacctcrgcctcccaaagtgctgggatgacaggtgggagtcaccacatctggccttatttttttaacgtattttttaaaaacccaagaacaggcattttctgcgtaatgtgcctgcattttggctttgtatttactaatgcttgaattattgccttagctatacataatcaactgaagaaaagtatttaacttttagctacagtgatttctcatatggaaactgtatacttctcagggattgtggaaatgtccttggaagtctatgacccctcaaatttgagaaatgttgatgtggaggtagaattggagtaggcaggggaaagacaggtaccaggaaaaccagttcagagcctactacaataatcatatgagaaacaaagagggcttgaactaagggagttcagatgaaagaagaatctaatagttatttatagagtaaaatagacagaacttggtgacttccaggattttaggcttgagagagggaggactcaagaattgtacatgggtttctggtttcagtgattagatttctggcatctgctgtccataagatagtaaaaactgcagatagggtaaatgccagtattggaaatatgaagtttgaggtgtctgtgmacatccagatagaaatttatggaatgtggaagagcaatgtaagctggggttttcagcacaatggtaggtaggtattgtagttttgggggtgaaggtactcacacaggcaatgagtagactaaaaaaasaaaaatatagagaaagaagaatccaacaaagagattgagaagtagtggctgagaagtaggcagaaatttaggagagtggtgttctcaactccaaggtaggagagaattccaagattggaattgttagaaaaatttgatggagaaggtattctttgaactgtgtgtgaatagacaaagagctctgacagagcagaaaggaggaggtatggattctgggtgaggaaatgttataagcagtcccacaaagagtgacatcagatttatacaagaagccagagcttgactgtagtgggcagtacagcatagggtggaaagcatagactctgaaaccaactccttaggttcaaatctcagctctccacttttagctatgtgacccttggcaggttatgtaaccttctaaagcctcgattttctcctgtgtaaagtggaggcagtgatagtacattgttaatagattgtttactttttactcttctgtatagacggaccccttgcaaaagtcagggtgattttatatatacaacatygttatcagctacctctgaatacttgattcttttccttctacaaccccaacctccatttgaaaagttctcattattctttttcttacctattctaaaagtatcactcagtccccacttcctccagggagcttttytgacgagtattcagctcttacttcttagacctccagtaacatctaatgtttgtcaagtacaattaagcacttgcttttacaaaactaattgtgggagattatttctaatggtttcatgttttttaatcttctatccccaagaaagattgtaaacttcttaaagtcaagatacatctccagggtatccgcacattttgccgtgcctgggacactcagtttatgcccattgtcctgatatagtttatatgaattcataatttatagtgtccacttttgactctctcaagagggtagttgtttgcatgataaattccatgaacaacctggatataataatacatactttttgaaattagtaacaaatatttattgagtggctatagcatatctattacaaaataataataagcaagggggagaaaacgaactgtcaataattatgccattgagagataatttttctgtctctgtgtgtgagagtgtgtatgtagagagagaaggagttttactaacaacaatgagattatactgaaggtaatattttataatctgcttttaaaatttcacagtatattgcatcatgaacacttttcttaccattaaatacaattctctatataacattttaatggcatttccttacatgaatatactacacttaagcaattttctattattaaatatttgaagctctccccagatttcacattataagcactattgtgatgaatatctttgtgtagagtctttatagcaaggctgggttgttttcttactatatatttctagaattagaattgtcaaactaaagaattgcccaatattttaaagatttatttttgctattattgtcatattgccctgcagaaagtttatatatacttcatcagcagtctctatttctacattatttccgttgctatattttatcattttaattgttctctttatttgatgaatcacatagtattttgttttaataagaattaatttagcttcaagaatattaaaatctgttttgtgtgtctaatggcaattatacatatttgctttttattattttattatttattcgtgggctgatttgttttttcttgttgattttatttttatttattttttaggagacaggtgtctcactttgttgcccaggctggtctcaaactcctggactcaagtgatctgactgcctctgcctctcgaagtgctgggattacaggtgtgagccaccacccctggcctcttattgattttagagtgttctttagagattaagaatattaacttttcatttatgtttgttttttacacttttttgccatttattcatttctatttttacttttacagatactctattttaataaatagaagtttaaatagtccctatgtagcctgtatgtttatattgtttatatagtctctatataaatatattttataaatccttagcaattcttttccaacaccaatattttcttctagtatttaatcattttacatcatatatttatatctctaataattatggaatttattttactttatttcagggctctgatgttcttttcctagattttctaaattgtcagaatcctaggtattacataatctattatttccttattggcttgaaatgccacttctactgtttatggttagttccttttttaatctttacatcctatttctagacaaaaagccccatgttataattattatggattttaagaaatacattttaatatctgggagaacatattccctcttaatcttattttttagaatttcctgggttattctcacatcgttgtgctaaattatacaaacaatctacttgtcaagtcccccccaaaaaaacccattaagattttgattgaaattgcattaagttgcttataagcagtttataagtactacagagctccttatgatatccctgccaactacttaagaaactcctagttcttaaattacaaatattcccagtcaagaaaggatcaccagacatttgaaaaaagacaaaaaaccaaaccaaacaaaaaaaccagtagcctaaacaaaaaggaactaataaataaacaggacaaatttattttcctgagacaatttatcttctgctttccagaagaaacagagacaatgaaaagtgtgggaaaaatttgtcaatattaaattttcagagatattcagggggagaatataaccattaagtatgatctgatttccataaatarcagaatactgaatatatatgtatatataaagattggataaaatgcaattcaagtaatattcattcttgaatattgaattaagcaaatatcttagaatatagagcaaaaagccaaggatataaaataygatggaaaagtaaaaaagatatgaagaatgtggtagaagtggaggaatgggaaaggatgtgggaaaataacagaaaaaaaatccttgacctgaagagtaattcaagtcctcagattgaaaagtttcatccaacaccgaacaaggaaaaaaggatacatatctagatgtgtatacacatgctgatgaaaattttggaattctaagtataagaaattaatccttccagagaacaaaaaaaaaggatctttcaaaggtatcaaacttctcatcagcaagattagaagtgaatgcagactaggcaaggtttcaaagttctcaggaagaagaactagaacccaaaattgatagtcaaactatcaagtgttaagacaaactaaagatgtatttaaacatggaaggactcaagtttacaactttacctcctacagattcttcctaattaaaaggaagtattactcgaagatatattcaagcaaaacaaagcaacgggaatcctatacagaaaacctaggatacaaagagcattggaaccaacccagatgtttatgaaaataaatcccagtatgacaactgtgtagtagtaggcctagaaagcaggcagcctaagttagagtcatcagaaggttccaggaaaaatgctttcaagaagaaagtagacatcacatttcgaattgcataattaagagccttttaacattttagggcaaaagtaactgcatttaactcatagattaatctaagacttgatatctttataatattgactcttcccatgtaggaaactagatatattcttcaagtttttaaaaatgtccttcagtgatgttttgcaataatatttatacaagagttttacatttttcgttgtttatttatacatatttgatatgttttattactattatgaataggatcatttatctattttctaactggtatatagaaaaaaacctgttgtggatacatgctttataatgtttgacctttcttataaatcataatggtctaccttttttatacctttcagttgattctcctgaattttgagttacagaatttttatcttaaaatagaatgatttccttctctcttaaaaatatttgtacagcatatttggttttcttgtttggttgcttacgttagaattttctgagcaacattcagtaatagtggagacagcttctttttgtttctgatttcattgttaattatagatgtcgaagaaaagctattcattaccatgaaaaggaactattctattcttattgtactgagagtgctattttactatcaactctttaataagtgtgatatactactgtattaggccattctcatgctgctgtgaagaaataccctagactgggtaatttataaagaaaagaggtttaattgactcacagttctgcatggctggggagacctcaggaaacttataatcatggcagaatgcacctctttacagggcagcaggagagagtaagcaccagcagggaaaattccagaagcttatataaccatcagatcttgtgaaactcattcattatcatgagaacagcatgggggaaactgccctatgattcaattatcttcacccagtccctcccgcaacacatggggattatggggattacaattcaagatgagattttggttagggcatggccaaaccatataatctacattaaggacattgttaagtggcaggataaatggtgtgggctcaactttatactatagaggaccattatagcaatatcataaaagtaatactttgagagactaagccaataataggacaaatataaatttgaggaaaagatatacaaaaccatttagtaattcaagcatctagtgataattgtataaccatatggacaaaggtagagaaaaatacctatagaaagtttgaacttaagagataggtcaggtaacaaacccactttttttcttttttttttttacctgattacttcctggtcatgaggttcaaaatatttgatagcaaaatgatttaaagtccaaattaatattgaattgaatatacacattacagccaaaaccagacctatttttctgttgcttatcatatataattatagaaagcataactgaacaacaggaagttattacttcttaaatatcagaaaacatttgactttctcttctgaaataaggaayggcagtaaccgaattctagttactgctcttaatagttttgtagttctcataaaatattgcttatatattatttggctcccacactatccattttgatggttttaaatttttcaaataaaaataaatgagttttcrtactatggatgacttgacatcagttaaaagtgtaaattcatacttgaagatagcaggactctatgctctttcctcattgttctggtcaaatacatttccaatcatgataatcaataatgtgactattaatttttacttgaagttaatctattcatgtttgattagaagtgtctaaaacataaacttgggatgtcaatgaagaactttttaaaattctcctccacaatggctgataatcaggccatgattatattttgaagattttacctagttagtcatatttggggtaagaatatatgctatctccttcatattaatagttcagatctttaattataacatgtttcatggtctataagattaaattgaacattaggaaagcttagcatttctcatttgtgagtctkacattcacacctgtcaggattggtacagattcaagcttgtttttaataaacttcaaagaagatcaaaactagggatcatctgtttcatgtctttgacgtgatagaagtttggggcccccgttttgccctgyagcttttgcctaaggagaaagccacccttttcagctgatacttgctcccacaggtttttcacartttttgagtagcgagtggcaagaagcaatatgacgatgttggtaggtagagagatacttcttcaccatctggtgagcattctggagaacagagacaagtcccacactgttaaaggagtgaagtcattttgcagccagttttaaggattgatttaagaactctaggagcaggccattatgtagtcatccattcagcacgattcttcgtgggactgtttacactagaaggaactgtagtgatcaatttagcgttgaggaaactgagggctacagagtgccagggtcacgttcatcacacttatttgtgtttcaaagcagaatccacactccaaaatgtgcaactactgtcttactatggaatttacactgacacattctgaggtcakgcaggaaatagaccagagtaaagcattagcaattaggtcagtagcttgagataatgcaggctctgaggcaatcttcactttcactgaccacagactgggattgggaacatgggaaacgtgtgtgtgtacagacacagcaacccttttctatgtgtcatgtcttcagctgagttttaagttgtactagtggaagccatagcctatgttggctcataggtcctagtgccctttccccttcccttgcctctgcccctgcccctttccttgccttgcccctgcccctgcccattccccttctcctctcctctcctctcctctcctctcctctcccctcctctcccctcctttcctttcctttccttgacactgggtagagtgtaatgcaatcatagcttactgcagccttgaacttccagggctcaaccagtmctcctgcctcagcctctgggtagcaaggacaataggcacacaccattatgcccagcttattattattattattattattattaattttgtagagatgggtcctgctatgttgcccaggctggtctcaaactcctggcctcaagcaattctctggcctcagtcatgcaaagtgtagggattacaggcatgagccatctcttccagctctagtgctatctctttataggaatcaaaaatttgttttggctatttcaaattttgtagagtaagaggtcaattagaaaagactcagttatgttttcaaaaatgcactgtgtgcatatgtgtgtagaaatgtattagaatgaaataacatttttttacagtggctaccattggtttgtgaaattatgcatgctttttcttaattttctctaatttttctctatttcctaagatttctaccatgagatttttctcttaatgtctagttttattacataggtaatagataaatatattcatgtcataaaatatttttaaaattcagaatatgagaaagtcctttttcatgctccttagtcttgctgtctttcttgaaagtatccacttagtgatggatacaatatggtgtatatctgccttaatccattttgtgctgctctaacagaatacttgagactaggtaatttatcatgagctgaaatttattggctcacagttctggaggctgggaaatctaaaatcaaggtgctggcatctgttaagggtccttttgttgcatcaccacatggcagaaagcaaaagggagagagatagacagattgggagagagagaggaaaggggaccaaacgtctcactcttttataacaaacctgctccagtgataacaggattaacccttacatcagggcaaagctcacatgacctaacacctcttagaagtcccaactcttgctggatgtggtggctcacacctgtaatctcagcactttgggaggctgaggtgggtggatcacttgaggtaaggagttcgagaccaacctgcctgagcaacatgaagaaaccctatcaatacaaaaaaatacaacaaaatagctgggcatggtggcatgtgcctgtagttccagctactctggaagctgaggtgggagaatcacctgagcttgggaagctgaggccacagtgagctatgatcatgccactgcactctaacctgggtgttgaagtgagaccctgtcaccaaaaaaaaaaaaaaaagagtcctacctcttaatactgttacaatggcaattaaacttcagcctgagttttggatggaacaaacattcaaaccatagcagtatcttttcagaatttttaactgaatatttatatatatgaacatttagaattaggggtaatttttaaaaatcaaaagtgatatactacagatgttattytgtgattgatctttgcacttactatgttttggagattattttattttagtacgtataaatctataccagttttcttaaattgcagcatagtatgtatatcaagtttatcctttaactattttcttactgatggccttttttaatattgcaaaccatactacactaaacattgtcgtgcatacttccttgtgtattacattggtttttaaatcaatgaactagttgtaaacatggagagaaacaacaaggagggagatggatataagagaagaagagattaaaggggatggaatcagttgtttctggagcacagaatattcaccaaatttgaccagatgcgcggttgctcatttaggaaagagcaactgcactgggatgaagaggttttttaggaaatcagaggtcttcagagaagttttggttaaaatctgcagtatacactaccaaaatggtttttgtctttgttgttcttatgcaagaaagactagctctttttatctagagctggaaggttgctgtcttggagtgggggagaaaggagacaagtatctgatgggtgggaatggaaggtgtgtatccttgcagcagacctccagagtagctgactgactgatatgcatggtagtcctaagatgtgtttgagaaaagaaaatattaggagctcttgacaaatcttgaaaatcaatacaaaaattagccaggcgtggtggcgtgtgcctgcagtcccagctactcagggggctgatgcagagaatccctagaacctgagaggcagaggttgcagcgagatcgcaccactgcactccagtctgggcaacagagtgagactctgtctcaaaaaaaaaaaaaaaaagaagaaaaaaaaaatcagttgcccatcctgcagatatacagtatagtgtaactgcttcagccgcttgcaaatctcttttacaattcaaaacaaattatggagaaataagagtgaaatattttcctggaaaaataatgtgaaaaattgaagttttaaatatcatagttaaattgaatgtaccttagggacaactcctttatttaaaactccaattctccaataacacacctaatatttgttattttgttgttaaatatttactctatgtagacattatgctaagagtataatgcctttttaatattcagaagagcactctaaaagctattacagctttacagacaagaaacttgagaccagagagargttaagtaacttgaccaattgtcatatagcatttaagtggcagagttaggatttgaacccaagtttttatgtatttaaaattctggctattaacaccacactgcaaagaaacttatttagtagataacaagttatatccatatatttttagatatcaatatatatgttgtggatcggtagcttggggcacattactgctttgaattgtggtatcttttattagatattgaaatactggattattgataagaccatgtagcagtgagaaaaatagtttttgctttgatttgtgtcagttatactatgttgttggagcttttgaagtagggagtgatcaggtagagacaggcagaagagattagtttgtatgtgttatcctgaaatctgagttatttgacatttttaaggcaaggcattgattgagttttatgaagataaattggcaaagaaaagtaatcccatctgctcaataacaattctttgcttttagccaagaaaattgatttcaacttgagagtaataatcatatttatcacacttgttaattgcatgaactgtatacaaattgtcaggcttattaaggtagatatttacggtcactgggcgttcctcacattccacattttcattgttatggcattaactattttttctgtttctctctttgtcactgaagacttcacgtagtataatagccagtattttctgtgattatatagcaatattctcaaacctaattgttcatacaaagtacaaatcagggactttttctactaggttctgaagtacttgttctctagatttaaactccagtgttgtactaatgggagtaagtttttcttttatctgccaaggagctcctcttacatgtaaaaaactgttgtttttcctctttgtaaatatcagtgtaaagtacacactgtataaaatgtaaattactgatgtgagagtggccattttattcacattgttcaatgccaaagtgggccaaaggattctggctcattaactttaaggaaactatagtattcttttgtctctttagccttccttctggtttattcaaagaattctcatcaggttgatcaagagttgaaaagtaaagcactgttcttaaaaactgctctctagaaagatctgcaatggttttgaggactgccaagcaacaggaggtagaaaaatggataactaaataacctcatttacagaaaatatgttaggttaaattgcataggaaaagatagtatgggtctttaaaaaaaatggatatttataacaaagaaaggataaaattaataagtaagttataaggaatatttagaaaaataaaaacagtattctraaagacaatacttatatctttctaatgtaaatcttagaaaatggtgagaatttcttgtatgctttatatttataagaagtaataatagcttttgaaataattccatattataagaagtcttttcttcatatgtacccaattccaaataagtggatgctggaagaaaatctgtaatttattttatttaaaagaaatgcagtatattaataaatacctattttttggataataaaataagcaacattttccagaatgaggtttttttttgcaacaaatgtgcataccaatgatttgaagtatttaaaagaaacttttctacttgaaaggaaccaagatgactaagtactaattttgcggaatctccaattgggaggatatctactgctcagaaaagcaaactaaaacaagacaagaaattaaaattgacaaaggagaagttccatataatctaattcaaaatcaaatgagtttttcaaagaaataagtttcatcatgtaatctaagccaaaatgagctgaaaatttacacacaatttcttttctttttctttttctctatttcccattaggtggtttccatccatggaaactagttacatggcattcctaccatcccatgcccatggtagacataattaagaaattgtgtgtgtgtgtgtgtgtgtgtgtgtgtgtgtgtgtgtgtgtgtgkgttttgtaagctttttactccttctcaacaaagcatttcaaggagccaacagcaaattagaattgamactccattatgtctctcaggtcttctgatcagctcttattatacttactcttagtaaaataatctctattaatagtgagaagtaaggaactatatgatataataaaaagtgctctaaaggaagtcagaacattgtgtggaagtcctggttccaccattaatggtaaactctttgaggacttccaatttctccaggactggttttcaatctgtataattaaggggtttaggctagactctctttttattttttgaaacagtgtctcactctgtcacccaggctggaatgaagtggtacgatcttggctcactacaacctctgcctccctaggttgaagcaatccttccacctcagccacctaagtagctgggattacaggcatgcaccaccacgcctagttatgttttcgtattttagtagagatgaggtttcaccatgttggccaggctggtctggaactcctggcctcaagcaatctgcctgcctcggcctcccaaagtgctaggattacaggtgtgagccaccacacctggcctagacgctttctaaaattcttttcagtttcaaccttctatggcttttggattcttttatttcttatactttcatattactgaatctcataactcactttttcctccattttatattttcaacttttctagtctagggctctgcacaagttattactctgcccttttattactactccaaggtaattcatgttatatgtagatgtatattagccatgacaataaatctacatactgtattatcatctttccagaatttttcaaaacagaaagtctttcttgactaatcatttattccccatataatagtatgaagttattaacaaacgttccttgaattatgtgtgacagaatttgctgggagcttgaatcagtatatttgtttaggctgcatataacagaaggcttcatttaaaatagcttaaataataagagatttattgaattatataataagaaggtagtgatagaatgattctagtagtacaaacatgcatcaagaatccagattctttccttctttctagtcacccatcctcagcacagtagtttttgatctcagttttatcctcttatggtctcaagatgactacagcagctctaagtatatttatacaacttccttttcttctgtcactttttaagaaagataaaaactttaccagaagttccttaacagatttctttctcagatctgtattagaaacaaattcatcatatgcttatatctaagccattcattggcaagagaaatgctatgaaattggctgggaagtaatcatggttcatcctggtcctgggaggggcctgatctcccttgaagcaccaaccgcctgacacctgaacaaattctagtggctgctgggtagggaacaacagtgtctttacaagttggtgcattataaatacatttccataatttgaatcaagcctaccatctcctcctcatctccaaccacccgccccccccrccccccactttattttctgtatcttcagcaacttccagaaacttctcattcttccttaaatacacatttttgtacctgccatattttgcatgccctcttttatcagcctggaatgcactttgtcacctttgcagcctggtaaaaccatcattgtgctcatatttcaagaaccacctcaaatgtctgctctttagatctgaacccttcctgaattccccagcttagcaggtcaagtgagttgttctcagctttgtacttctgctatagatcagccctcatcattttataactatgtattgacccatttactcctgagaatcctgtaaggatgggactcagttccttggtattttgttctcagagagatgatgcttcatacttaccaactgttcaataaagtttgttgaattaatatagttaaaagcagatayctttctgttataagttcaaagcctagtgattgaagatttttctttacattatttaaatgtatttattttggtaaaatatttagagcaagtttcattccatctgttccatctaagcgattcatgacctgcatacattctaaatgacaggaaccacaagcaactcagtcagcaggcttcagaatcggtcatcctaaaagatattgcaggycaatggctaatacactaacaaagaaagagcttatgcaaataagtaaggaaaatactgtttcaatgttaaatcattaaagacaaattcagactactcacaaagaagatctataaatgccaagttagaatagtaaaacagaaaacaaaaaaacaacatgaagacctctgattacatctatagtaattaacatatccatttaactcctctgccttcagaaaaccatcaatggatgtttataggcataaatgacaaggacaaagaaagtgggaagggagataacagcaacaaaattttggaagctgaaaaacaagtatacaaggggtatacttcctgatgaatgtaaaaccgtccctagacaaggggggcctaggcaggttgaagactgagtgccattctgaaaacagagggattaaataaacacttatatatttgtgttcatgataacacaaggctttttaaattctgtttaccactgtgtctccggtggctagaatagaggctgccaaatatagatgctcaaatatttgttgaatgaattccgaaggttgaaagtcccaaccttcttcccctagtcagcttccaactatgcttaagccttctggacaggagattgatataacctttggagaattcaccaacccaagagaaaaaacccaaagataatggtgcaaggtatttctgaatgaaactgttcagttggatcatcaaaaagtggatgtagttgacaaatcttacctrtgcaaacagagcttccaatctgatttttagtactctagccttaaatatgagtagacagataagatttatcaaatacttagaaaaagtaagtgaaagaaaccaaaacaaatggaaaaagaccaacttcaaagtacagatgttggccgggcgcggtggctcacgcctgtaatcccaacacttcgggaggccaaggcggggggattaccttaggtcaggagytcgagaccagcctggccaatatggtgaaaccccgtctctactaaaaatataaaaaaattagctgggcgtggtagtaggcractgtaatcccagctactcaggaggctgaggcaggagaattgcttgaacccaggagatggaggttgcagtgagccaacatggtcccactgcactccagcctgggtgacagagtgagactccatctcaaaaaaaaaaaaaaaaaaaaagaagagaaataaaaaagtacagatgttgcaggaagaaggtatcatcagagagaggagaagaaatacacttgatattgtattcataaatattaacattgcttccacgaaacaaaagcagatgctatggaaaaaaaaaaaaaacaactcagagaataggaaaagagctcttggaaagtaaaaacatgatagaataagttaaaaactcaatagaagggttgaaaggtaaattgaggacatctctatggaaatggagcaaaaatacaaaaaggtagaaaatacagaagaaaaagtgggaaatcagaggaccagttcaggaaatctaacatctaaaatcagaaattctagaaaaaagagaaaactgcaggaggacaaaattgaagaaaaatttccagaactcattaattggagcatttagcacaatataaagtattaaaaaagagacttgtgacttgttctaaggatcattatcgtatcgtatagaaggatcaaaaatcaaaagggcatcagacttctgaagattcgttttgaaacctagaaaagaatgaagtgatgccttttaaattccgaaggaaagtgattctcaaccaagaattctatactcaaccaaactattgatcaagagtgagcatggaataaagattatttctgaggtgcgagcctttaaaaaatgtatctctgatgcatactgactcaggaagctactggaaaacgtgctcaccaaaacaagggaataaactctaaaaacattacccttgggataataaggaaagaacatcccaaagtgacagctgagcaagagacatggagaataaccaatccaggtcaaagaggcctctggatgagatttcttcaagaagatgaatttaataaaattcttgatgtgtttgagccatacttagatttttgtaatatgggaaaagtttgggattgaattagtgataagtatatatggacatctaagggaacaaagaaactaacaaaagacaagaattttcaagaaggaaaacaaagaaaaaaaggtaatcagggtatgttacatagtttagctgcttatagtttttctttggttctgctcatggaaacacaatgactatcaatctaagtaagactataatatattagaaggatgggtgatgagaagtgtgaagtgttgcaaaggtaaatccttatcttccgctatgaagtatcaataagcaatgcccaaaaaaatgaactattaagaagtaactgtaaagttatatcatttagagatagagtggagtatagcaaatgaatcagctaaaatatttgaaaatgggtaccctctggggagtggaagatacatgtatgtattgtgggtgggggatgcactgcaggagatytctttttttaatccttgtggtactacttagttctctaaactatttgcatctataactttgctaaaaataacatttaaatttaaaaattgatcactcttgtaataagttcaaattgaaacaaggagataacatagttgctaagttttatttttggacatatttataacattgtatatgtgttagtgagaataccatgtaacatcactctcaagcagtacttctaaaagtagaaattgctgtaatatttctcaaaaactatctggcaatacacattaagaggtataaaaatgtttattccttctgacttagtacttctgcttcagaaatctcttacagtgatctaccttctagaaagactggagataaatacatcaaaatgttcacagtagttgtctctgagtggtagaattatgggtaaaaaaaagatggcttgtttccatttttcttttgcacccctctgcattttttccaaataatctataatgaagacaggctccttttatatttggaaataatttccaaatataaacattttaattttataacattttaaatttttcaaaacactggtcctcataacaagaaaagttatttgttgcaaccacagtagaccaggttaatggtgccaagagtggaatgcggataaaggctgacaaggccatctggaactgtgagtcattcagagcatcacagaagagagattttctgcaagtactagctgtgttgactgtgactgctgttttcctggttgctcaggaatcacccagggaaggagagggcttccccacgggattagggaaaaaaaaaaaaaagcttcttgttccataagagagtctacagataggatgagtaataagggatagattttactaaggtagaacaaaatgttaggacgctggtacgagcaccactgaaatatccctatatcaagttttagtcttttcattgcatcttctgaacctgctggagatgctttcacatggaacgtatttgctataaacttttctttatcttttgttcaatgctgtgaagtttgctaatcttaatgaaccaagtctcttcatgctgacaactcattgtaaaagaggtaaaactgtgtttccatggtatggggaatggagaggtataaggaggaagatggatttaaattgatttttggaatgcttgctttattttatcagttaaagaaaaggtctaacggattatttagataactttaggctccaactgcactgatctgtttgtcattcctttaagaaaccattttgattctgactacttgaatttgcacattttgttccttctctctggaataccctaacaaattctttctgcctgataaactacttactcttccaggtcaagttgaaatgttcccttcagtgtgaaaactttcatgactcaaaaaataacaattataataattacaatttgatgagctacctggctgtttacctaattctcacaccattagatgagcgaggtagttttaggctaactttaaaaaggaggaaactgagacttacaagacttgggtatgtggcccaagagtacatagctagatttgaaacccaagtccaaacccaggacttcctgcttaaagccccttctttttcaaaaactacattacctattgattattttgctttacatgtgcttacatgttgatcttcctcagtggactgccttcattccttaataggaaataaattgtcttttttggaggtgttacatttttgcatataacattaataagattaaaattttcatttgttgttgacattctttgcttgactctacactccacgggataggatccttgggcatagaaaccacgaatgctttgctcatcactgaatccagcatctgtcagtgtctgccatataggaattgctcaatatacatttttgagtaaataactgaactaacaaatgagtgaacaaaagaacaaatgaataaaaaacctcagatctagcccctaacaaaaaatacttaaaaaaaagttttagtgtctcaattgtctgtatagacaatgatttcacaagttcacgtgaaatacactaccaatatcaacaatcatgttaaatcaaatgaaatctatatcctctgggaatgcttgtggtatggcttagggacaagctttacttatgaacaatgatactgagacttcacaatagtcagctgtgcagatgtcagactttgcatttcacacatgcttttaacctagagctcaaataggcagttttaagccctggacctcaagtcaatgtggttcatgttttgtcacttcaagatctacaattgaacttcattacgatagtcttagatggtttttcataaattttgagtcatgaaaaactgacaacatatgagwctccaagtaccttttaatatatgcaatattttacctacttaatkaatacatgtgtttatttgataactaaaaagtttataaagtctagaaataaagaaaagtccatgtcctttttcttttttgttttcttttaaatgaaaactcatgagaaataagagggcagaatgcattaaattatttcttctgtaacagcacaattctatatcagattttaaatacaaaagaacatgcaaagggataacagcattgacttcagttctaatataaataaggcaggaaattgggtgaaatcagtttttcctctaatcttacatggaaaaaaatttgtcatttggcaaacccatatgaatccgatctgtttggtttattcatccatgcagtgacattcagactccaaaaactgtatcagaaacctagtcaatatttaaatgccatcatatagattagaaatggaataaggtataggtaacttactgcatttcaaaaaaagtactaattgaaacatattgtcaaacatatatctttttctctctttagaaacctatggctattttctgtctttcagctcacgctacagaaaggcctatttttccttctgtcttagtccattcaagctgctgtaacaaaatatcatagccaggcacagtggctcatgcctgtaatcccagcactttgggaggccgaggtgggcagatcacttgaagtcaggagtttcagaccagcctgggcaacatgatgaaacctaatctctactaaaaatacaaaaaaatcagccaaatgtggtcacaagcacctgtaatcccagcaactcaggaggctaaggcactagaatcacttgcacctgggaaggagagggtgcagtgatctgagatcatggcactgaaatccagcccgagtgacagagcaaaactctstctctaaataaataaataaataaataaataaataaataaataaataaatcacgagctgggtggcttataaacaacataaatttatttctcacagttctggagactagaatgtccaaggtcaaggcacggtagacttggtattttgtgagggctcatttcctgggtcatagatagtgcctctggctttgtcctcacatggtggaaggggcaaggcagctctcttgggcctcctttataagccactaatccccttataagggctgtgctctcatgacctaattatctcccaaaggccccacctcctaataccatcacattggtgatgaggtttcatcgcatatgaatgtggggagggacacaaacattcagactatagtatctgctttttgccacagaatgaagaataaaccacgtcttataaataaaaatctttccatggtcccccaccacataaggacatgaccaacttcctttgctagtcatccatctctcataatcctctccagcccatctctgcagcctcatctccacccacacatgcattctgctgtaacaaatggtgggcaggcttccaaatgtactgtgttcccatgaagttgcacctttgctgatgttattctctttgcctgggtcccctccccatctattcactcctttctgcacttcacccttgctcttcttgtgccctaatagctcctccttttgtgacacatcaaaaattgcccactgtaggaagcccctccaagactaagagtgcctctctctgtgttcctgcatgtgcttttggagcccttatcacacagttgctctagaattgttagcttgaccacactgtgagttttcttaagggcagggacttattcctctttgcatatctggaatcttacccagtgtttagtacatactacatgttcaataaatatttgttcaatgaatcaatgaattgataggttttcttttagtagaaggaataaggtacattttttttagaacagcatccgaaaagcaagcaggaaaaattgggacatctttgcttaaggtaaaaatgcttttatggggaccacctttgaaactccatctacttggatccttttagtcttctttatgagataggaatattaattcttagatccaattaaagaaggtctagttaccaaggaacaaaacaaattggtatagaatggactttcttataagagagtcccaaatcatagatcataaggacaatcttatgttgaaatgtctcaataacttccaaatgccgatgtgaatgatatcatcaaacagtgtgagtcaaaggaagaaatgggattcctaagttttcattgtactccttgactattttattggtgtacagtctcttgacaattattttctcatcttctttcccaaggaaactttagatttaatatgtttattctgcaagatgtttggagacaggtatacaccctaaaaccaccattacaatcaatgccataaacttattcattgcctccaaaagtttcctcccatctttttgggtttttttgttttgttttcctttcatggtaaggacacttaatataacagctacccttttaccaaatttctaagtatacaatatagtattgttgattgtatacttatgttatacagcagctttccagaacttattttgcaagactaaaactttgtaacccttgaccacatctaccaattcccatcttcccccagcctctggcaactaccattctactttctgcttccatcagtttgactattttggattatacatgtaagtgagatcatgcagtatttgtccttctgtgtctggtttattccacttagcatgatgtcctccagttccatccaacttgttgtaaatgacaggatttccttccttttttagggctgaataatatttcattgtatatgtgtgtgtgtgtgtgtgtgtgtgtgtgtgtgtgtgtgtgtgtgtrtatatatatatcacatttcctttgtccattcatctgttgatggacatttaggttgcctctgtatcttagctattacaaatatgctgcagtgaaaatatctctttaagatccagatttcagttcttttggatatataccaagaagtgggactgctggatcaagttacttcctgtttcgaaagtagggcaccctctggacatttctacaactgaagtgattgattcttacttttggaagtcaggctatttgttggaatggtggggaaaaaagctagagcttaaaaataaatctaaagttggagaggggattattactgatggatgcattaattcaagggttactgatactctaaatacatttttaaaagttgtttgattaacaagtcaaaacagatggtttaatgacattttagagaggtttaatagagatccaactgaattaacaaatcaccatggtgtgcagaatattgaaaattcaccactagtagatttatggcatatttctgggtatttcattcccatttggtttattatgataaatcactgggaaacgggtagcctgtaggacatgacagcaaaccacactttggcaggaccagcatcagggctgcgtgcttttttaggaggctatgtagtctagctagcacagagtgacccagtgagagcttggttggctaggactttctggtggtagcccacagagctcacctgaaagagtaccaaggatgaaaatatcatcttggctaattggtctgctagttgatttaaaaaataaacaataaaaaaaatttccagtgtattttagcaaagtttaatattttgaagggggcagaaatgtagcatattttgggatcttaaatctgaatttgtgtctttttccagactttgtcagtgtctttgtctctctctccctctgccccctccatgtctccctccttccctccctccttctctctttcctttcctggtaagtatactagaaaaaagtatatttttttctcattttttttaacttaataacaacagcaacaatgacaacagtcaaactcttgaattctggtcacaatccagatcaataattttttccttgtagttaccttggaattaggttcttagcccctcactgctctctgtatatttctgtacaatattcatcagtttaaataagtacttcaatttcataccaaagtgccaagactatcctattttcactcatctttaactttcttctttttcatttcccacacccctgccattgccaaacaaaactgattatctctgtttttatctttcttttagactttttaaggcaataaaaaattggcttgctcagaaggctgatacactgagtgttagaataacccaaaggttagaatgctttggtcaacttatgggtatttttgatcacgtatatccatttttaaacctgccattcatgatggatcactgaccctggccctggccctgacccatctcaaaaagttactagcatgattactgattaacacttagactgttggcttgaagtttagtagcctgaaggaaaatttccagaggcattataataaggaagtttaattaagagttaatgttgactcaggaatattatgtatagcattgatccacagtgttgctaatgaattcattatgctgcaaatgcaagtgatttgttagtacattggccaataaaagtgaaatctgtctcaacaagaatgttgaaagaaagaaggcagtgaaactttcatctccactgggagtgaactaacttgccaaatctgggtcatcaatcatagtaaaatgttcaaaacaaataatgcatctttcatggttcactgtattcatcagcacttttgaagtcaccagtctagagtagtcgcctttggccaagttttcagtagcctgtggtttaggcaataagcctcaactgtctttctcgaggatatgttcccaggtggttgtactccatgggccattttcaatcaaatctgaaaggacaaaagggcagttctgtttatatgaaatgacatcatattataacctcaaaattgttgtcttaaaagtcaaatcattatctaaaaggtctcttagaattacttagagcttgaatgcaaaagactgaatttcccactcacgtacttcgccaacactcattacataggcaaaaaagtatagtaagtgtcacttatgtgagcctatgtatgtatgtagtgttatagggggtgggggtggcaggaaagacagctcaaatatgaaataattgaattattcattgccactgttctgattgcctttaaaaaaagttttatctggaagttatttcagacacactggaaagcttcatgggtagtgcaaaaaaaaaaaaaaaaccacatgcattcactcattgtaaacattccacctcatttgcagtatcactctatgtgcacatacacacaaatatacatacacacacattgtctttttttctctgaaccacctgagagaaaactgcacacatcatagccctctatccctaaactcctcgatgtattcctcccaagaacaaggacacttttctgtataactatagtctcaaacatctgattgcctttgaattttatagcatgacttatttatacctttttacttcgagttctaactcagatactgagctatagaggaacagctcaactattagttgagggatagctcagatgtctgatggaaaaaagtcacatcagtaacattttgaattctgcaaatatacacaatatgccaatgtatgggagataactaaatactggttttagagaaaatagatgagttaatacaaatagagattccccttaattaatagatcttatatgtttggttatatgtcttatccatgctattatagctagctagcattcattaggacagccagagaatcttgtctttctgtatttttatactgtttttcttcttctgatcagccgattccaggttttgaaagaatgaagtagttcctacttagataatgctattgccttgctccttaacagtaagcagtggagaagcagagtggacgctggtgatgctgcctttagtcctggagggagtgtcaaccagtgggtaatcattctgaccctgcaacacaaccatcccttcactatttcagtgaaggtctctacttcggtggtaggtctctactcaacatggtacttatagccgttttatacttgctatcttaaaaaaatatgcaggctttcactgctgtgaacagataattgatatttatgtttcataatctgtgaagatagctaacacatttctgacagttgcaattttttttcccaaaasgagtttgagcatgcctatccctctctacccaagtatatttaacagcatttctatctattggggaatctgagtgaggatgacaacgtgtcagggattagaatggacaggaagagtctctgtaagaggagggtgtgatgctggagcaatttatgaaaattgggtcccctggtaactgtagtgsatgttatacagacagtcctgcagagtcatccacgaggctgactcactgacaatgtacacatagaggtgggcctcgagtgtgtgcaaataacaagtttactactgcaggcaaactcttcgtttattcatttgacagatttatattgaggggcactgttctaggagctggggatttggtaataaataagatagtcatggtccgtaacctcatagagcttacacataaactgttttgctttaaaatattgtacattcagaggtgtttgtgctccgaccatatgactgcaatatgtcatttgataaacctttcaggcatgacttggacccacccagaacttagctttaaagctatcagattgacaggaggagagaacactggctttagatgacaaatcatggaaataattatgaaaagaccatccagtttttaatgactttacaagaatagtgttcttgtgagactattgaataagaagaaatatatgaacatttgtaycattcaactgtctaactgataccaacaccaataaatatatgaacatccttattattcaagtgtctaatgagtgagggacagtgcctgtaggaaggagagcctcccaacaatggaagcagtgttattcttcatggtagggagaccattttttggttcctcacaatgacttccaggctggaatgatttccaagtagggcagggaagacaaatatctgaagcctaagggaagctccagggtgattcttgtagttttgtttggcagactttctaaaaagcattgtcagatagttttggagcaagcagtttagccatctactaccacacaatatattcaaatcagagtaagctggaagaaagtcatccaacatccaagtctcagcctggcctatgtgaacatacttcttcttaagactaagctgtaggggtactatgcttattacctcggtgtgaaataatctgtacaccagcaccccatgacatgcaatttacctatatgactaacctgcacatatacccctgaacgtaaaatttaaaaaatttttatagatatgttaaatttgagatgtttattgaacatcaaagcaaaaatggtgaatgaacagatatatgacacaaaaaagactaaggtataatcctatatcatgagtgaataggaattttttgttattggtgtttgcgttagttgagattttattcagcagtaaatagagagatttaaaatagaagtggcttaaggaagacagatatttctccttcatgtaaaatctgaaagtwggcagtccgaggttaatatggcacctctatccagtacagtcttcaaggacacgtgctctttccatcttattgcactgtgaggtgtagcctctgttgctaaattcaactcaccatccaatatggctgctccgactccagccatcaacttcacattctagccagtaggaaagagaaaacaataaatacaggcagataaaaagatagatgacaaatttctcttaagggaagtttctagcacatcatataatatctacataacgcttctactaccaactcattcaccaaaacttagttatatggcaacacctggcaaccaaggaggctgtgaattttctctattttgggcagtcacatgcttacatgaaaacaggtatttgaaaacaagtgatgaagaaaagcatcaatattaggggacatttagcagtctctgccacaatgttgcctattaataatcctgcatacattttaaatatttaatatcagtctgcaacactctatttgcaaggtaatgtatagtataatctttaccatatgaacttagtagccatggtgttcaggaaagttgtgttattttgtgctagaatattttacctgccctaggtaagggcctaaagataaaatgtgctagactaattaattttaatggcatatagcaagagatttccagcgttaaagattgcatctccacctgcaatttgggaaaggaaaaactgatagcacaaaataaaagtagtgggtgtcctgaaaactgtctgatgctcttcatgttcttaccaactcatatcctcatctaaatttgaatcacaggtacattctgaccttgtcgtagagagagtcctaaagtctcaygagagaattaccgtgcttgttctaacaagactgtgttccagcaggcatgccaaaatttgatagctacaaatagggagatttgaaaggaaagaggtgggagaggtaatttcttttaactcaactgcatctggtggattaaggtagacaatattaccattttgctgacagaaggcagacatggcactaaagagggagaatgagcaaccacagagctgatttaatttccagtggggtttatggaagcrccaaaacatgatgtagccaaatgttcctaaaagtatgaagtaatttaatttgttccatcattacaagaaattaaagccaagcacaattacatcccagtagtaaaaggaacccgctgaattgccattgttattgactaaatgaagtgagatttctgattaccttgtccagcacattttaatttctgtctgtccatttattccaaatcacattacagggccttaactgatcttgacaaaataagctacattattaaggtgcagtttaacctgagaagctttaattactagattagagttttcaaatgggcatgtcttctagacttcagtacatttagggatgtaattattagagattctttgtttctgatgtgcaaaagagacccaagtttaaaaggaagacttaaacttacggaagtgatttttttttttcttccaccaagagtctctttgtagacaggtgtctgttctgttgggagtggacttacacctcctgaatgctgtgattgagagagctgcctccatagtggaaagcccccggtagagggtagtacccagatttccaaggggaggggagttgggggactaaacgatgtacagtgaaccctctcataagtagggtgtctagatgatttagcattcaaaccagaacactttttagaatgaaaggcaatgctattcataattacactggtataacaggcatagaccttggaagttccaggccaattaggatgtatggactctgtacctataaggaagacaaggcaatagatatgtaaacaaatcaatgtgatagtcattataggcatctggagaatgaaaggctctataggacactgtgggtgggtgggcatggagaacagtcactctcttagggatttctctcccctggaacaaaagttacactaatcatgtgacatctcagagcatgaagtttgtagctccctcaaccatattcatattcctctaacagtccagttaatgattctcagatgcattagaaactatggaaatattatagaaaagaagccttaacaggggaagtgtttcatgctttttcagttccattcaacaaacatttattggatacctagtatatgacagccagtgtttagcaccagagatcaaaaaatgaattcattatggttccagccccagagaaattcagtctagtaataaacacataattgtgatagactgtttagtgatttaataacttaaagagttaacttctgatttggttctcatgcatcaaacataatatttgccagtctctatctctacaaggagccctggatttttcccagtcccctactaatgctagataatatggcaaaatacacaggctgatcaggctgttttagagactcttttaagcagagatcttttgttttccagactgctaatttatttttttctacccagaaagcccttcctaccatctgagctattctgaccaaatcagcgaagacaagctacagagatttaggatgtctgggctaaaaaggtttgcttgtttaattagataaataatttgagaatgctttccaggattactgttcctaaccacattgataaatgctgggaagactatctcagttatccagcattggataacagactgttggagaagagtgaagcttcagtgtgagctgggaaagatcccaaaaatcctaacatgctctaggtgcctgcatataaaattcatcatcatagtgactttaggaccacttgctatttttcaggcactgctttacatacatagtcctatttaaataattttcagaatcatactgtgatataggtactgctttctccattttataaattagaaaacaagctaggttaattcacttttataaggtgccaagctagtcartcagtggcaaagctcagatttggaaacaaggactgccttactccaaaaactgttctcttaaatttcagtgtttgtaaggtccctcactgccccagcataacccagcatttggtccattcaaggattaagaggaacagggatctgccagccttgtttctgcagaaaraaatgggggaggcagagctggatctaaccaaacaggttaaatttaagtgccaggtttccgtgaaggagaattatgccagcaatggtttctcaccttaatgaattcatttctaaccattctttgccctgcaaagacagcaggatcctgggtccacagggcccagttcatggagaggagaaagaggcacataatgggagcaaaaagtgaagaattcaagctgcaaaatgtaacggaattctcaaagtgctgggttctcttcactcccttatctggcagctcctgttttttctcctttgcctcccacagttgccactttaaaaagtcatttttaatgtggcacatatacaccatggagtactatgcagccataaaaaagaatgagtttatgtcctttgcagggacgtgaatgaagctggaagccatcattctcagcaaactaacacaggaacagaaaacgaaacactgcatgttctcactcataagtgggagttgaacaatgagaacacatggacacagggaggggaacatcacacactggggcctggtgggggttgggggagcaaggggaggaagaacattagtacaaataccgaatgcatgcgggtcttaaaacctagtttgggttgatgggtgcagtaaaccaccatagcacatgtatacctatgtaataaacctgcacgttctgcacatgtatcccagaacttaaagtaaaaaaaaacacaagaaaacaaacaaacaaaaaaactcctttttaaacattgtctcagcgtccagtcagttgagtttctgcacttttagacactcaagccccttctttcgtcctttgctccagtggttgtagcttcctacctccttcttaccctcacccctaggcttccactttagagaatttggagaactggggaaagaaaagactgttttgtgcatggtgtgcctgcagcctagtgccatgagctggttcttgccgtgtctgagccaccagatccactccttctgtggttcacacgctattccctctatcccagccaagcttgcaaactctgatcatgaactaccaggtggaggsggggcatggatatcctccccaggaagcctgtctggaacctctgaacttttctgacctgtgcatgcctctaccacagcacaccttaatttcttttgaaatcactgcatttgttcatttgttagttgtttgcttctagatggtagacgccttgaggccagaattcttctgaactaagctttggaagttgagcacctcatagaataccaagcttctcgtattactggtggggttcaacaagtatttgttgagaagtgatgaatcaagctaaagtttaagtaggcaaagatgaatcacgtcataacctctggtttccyaactttgtctatagaaaaggctccttgctaggtaaaacaaaaacagaagaagtatgtggattctcttcaactttgggactcatcaccctgaatctctcagttatctcaagactgattccctccaccctggagggcctccctgcccctcctttgtacagcagtgaaaggcagaaattgaatagaaggagggaaagagggaaaaaggtctagatgatcaagtggcaaaaacaaataacccagcatgaacaagtatgcagagagggaactctgaggaaactygctgacaaaagatagagatggaggtgaggtcaaccacaggggaataatgggggcagacaagtctaaggaggtagattttatagggacttcgaatagatgaactgaagtttggggaagacctaaaggcattaaaaatccagtataagttcttgattaaggacagatatcataataattattattataatacaaggggtgctttgggaacataggctatgtaggagggattgacagaggaagggaggaaagatctaggaaaatgagggccaaacggaaaggtgtccttctcctgttcatttgccaatgaaatgcctaggatatatggtggtctgctcctaccctccacagttctagccactgcaaccaggatgcccagcaaccatgtcattcattcattcatatggtctatctgtctcctataggcatttcagtgagtggccgctgctttatgtgttctgttggtaaacttgtagtaccctgagaaaactcacacattatggagaaattacttcaaaaaatatgcacagtagttaactgaaatctttttatgtgttctactctcacgtgaagtagagaagtagagggagagttttttaattataaaaagggaggaagagggaagagggaaacaaaactaacatttattaagcaaggtaatttcttacctcagtgttttcaaaccaattggtagatttcaaaatcaatttaaggggtcacaattaatactttaaaattaaatwaaatagaaaacatcagagtgaatcatacatagtaaggataaatgttatttcatgttaaattatgtttcaattctctgtattggctcgaatatatatttactcttatgtgtatggtatatactgttcctatatatacatttcctttttattttatatatataattctttttattggtttaatttatactgaaatgcatggtttgttaaagactgtaaacaaattttgccatgactattatttataaaacacaagagtttctttaaataggagtccactgctctcctctaccttttaaaaataaatataggtataaaacctttttgtacattttttttatattactgaaagccagcatccacatgccttcaaaagtgagcacctcttactttaaacaaatctaccaggttatagtataaaatataaattttactgtagtttactgtcaataaactttgtaagccactgcttcatttcatttaaacttccccaaaaccttgtatgagtggagtctggggattcagaagaagacggtggtcatcacagaagttgaaattctctactgtttacttcttttcaaaggtcttgttagcggtggccttgaaggtgatgaagaaagacactttcaaggtggacaggtataattattgggtcaccaagaacaaatttgaaaaacaaaatatgccaattgaaattagcatgtagcayctaaatacccagaagcttcttcattgaataatttattcattgaataaattatgtaaactgaattagtaattcctagtgaaatagtggatgaattgagaatagtggtattggtaaaaatggaaaaaaatttttttcttttgagacagaatctcactctgtccctgaggctggagtgcagtggcacgatctgagctcactgcaacctctgcctcccaggttcaagtgagtcttgtgcctcgcttgaggcacaagattagatttagtagagatggggttttgctttgatggccaggctggtctcaaattcctggcctcaagtcatctgcccacctcgacttcccaaagtgctgggattacaggcatgagcgaccgtgcctggccaaaaaaaaaaaamaamaamaaaaaaaaacaaaaaacaaaacaacttaattcataaaacttaattcaacaatttaagagttatacttcaagaatgaagatatataatgaaaatatgaagtcttcagaaggacacacatataataattttagtaaatctcaaatttgtctcaaatcaaaaacttgctacacatatttttgtcttaattatcataattaaaaatgtctacacattacataatactatctagtaaatatgccctagagattgtgtgtgtgtgtgtgtgtgtgtgtgtgtgtgtgtgtgtgtatgtacacccattatgttttcagacaattggaagaaaattgttaggcaattgtttttcttttatcaaggagctgtcatttaagtgcaaagctggagtattcaaaataaaatttgggcttacaagatcagggcatggcaagacctatccagattgctgtggaataatatatgcttccaaacgctaatcttaaggatgaaaaacacataaatgacatgccttcttccccttgcttaccttagtgactacagtttaaataatctaaaatagcagataccatcaatactgttgctaattatgctacttttcagagaggtacaagagtccttgtacctctagtagtagtgataccactactagtatcaaaaatacaagattgttttgttaattttgaccatgttttaaaaaaagatagggaggagatgaattactattaaaagcagctcttatattttacatgtaatagatgataattacaagtttttaacaaataacacatttaagttgaactgaaccgccaaaaaagatagagatatgaatatatgatttttagattaaagttagttttaacattcaaataaagtgtgggaaaatggcctggaggccaccttctagggaatgtatttttagccctattttacaaaaaagaaaactgaggtacagagaagttaatttgcccaaatttgccccatggttgctaagttgcagagccagcatttgaaccactgttcccaagtcatactctttctattgcttgtaactgtcatcgtagaccactaaagtggatacctccacaactctttgctttccactgcatctggactaccacaatagctccttagtctccatccttctctcttctccattctatcctcttaggctaccagtgcacttatccaattcccacaatatccactagctcaaggccacacatttaagtgttcaactctatatcccttctcctccctggaatgtgtctactccacccagcccatttactgtccacacatacaacctttattcaggctgcagacatttcctacacctgaaaacaatgccagcggactccctcctcccacagccattaaaaccacagtcttccttgaagacctacatccaagttcaccttcttcctgaaacccagcacactgagctatagtccatacctccctctccctgctcgaactacagtagcactcccaggctgaatgatttatatgctaccttacactgtctctaggcagcagccgatcatgtgtctgattttctcagcaggttattatggttccttcctgggcccaggctgctgaatctttcatgttcttgtatttcacagcaactatcacatcagagaggctcaataaatatgtatggattttttgactattctctttcagggggaaaawgagagaaagaaaagaagaaagggagggaggaagattactctctgaccatttctcgatagcatacaaagtcaggaggaagagaaataaaatgtcgttagtggagatttcaaccatatgggaacctactaaacacatgtatttgttaatgttttggagttacctgacatataggtataggtataggaaaacctattccaggtattcttcaagaggtgatagttgttgtgtgaaaaatgcattctaaaatcaaacaggtttagataatgcttgttaataaaattaaatatctcattttgctgtggaccttctagcttttggtaggttcgtgtccattagaaatcactgtaaaaagcctacatatacaatatttcccaagcttgtttgaccacaaaacgtcattagtaaggagaatcttataaggacaatattgattggaacattctttgggaaatgtttgaaatgatcttcccagtaacctcagtgtaagtgatgctctgtcattaaccaatgacaaatacatattcttcctacatagttgacttttcatgatttggtgtggtcttgtaaaagctattctattttgttgtttgtttgtttttgagacagagtctcactctgttgcccaggctggagtgcagtggcaccatctcctccacctccagggttcaattgattctcctgcctcagcctcccaagaagctggaactacagacatgtgccacacacacctggctactttttgtatttttagtagagatgcggttttgccatgttgtctaggctggtcttgaactcctggcctcaagtgatctgctcgcatcagcctcccagagtgctgggattacaggcgtaagccactgtgcctggtctaaaagctattctaaatcataggttgttcactcacatttggctcagaactggttaatatttgagggttgatggtgawgatggaaaaatagtaactgttttaggattgagaatctgtggaaaaggaaggaaactctcaaatattaactaccttatttaaaattaacttatttaaacaactctgcaaagtggttcagtatacctactattgattgaataccttctatatgtcagatacagcccttggtactktacatttcttatgcatttctcataataaccctgtaattctcaatgtatacaatgtgctcaggtcttttaaatggcttatttcasataatacaactagaacaatggcaaggctggaattcaagttctgagtgactcaaaagtccatgctctttctgatctatcacactatttcccatgaagagctcttataggttgtggattcttctgtgtgtataataactttcttagccaaatctaaatctccatagatattcttgtaaaattataaaactaatttatcttattcgtgtatggagccagttcatatacaactggataagccaaatataaccgatatactcttgagttctgaaatttgttctctataatgcacacacagttaacaaatgtaggtttaccagtaggccaaaatagtttatcactcatatgtgttgcttgtaatgcaagtaatgagattaaaaattgtacataagaaattacctttctgagactctgttcatagcctgtttaaaagggcctagtcttttcgggaaatcttttgtgtgttttttcttttctttttctctttttttgggacagagtttcgctcttattgcccaggctggagtgcagtggcacaatctcggctcactgtaacctccgcctcccgggttcaagtgattctcctgcctcagcctcccaagtagctgggattacaggcacccgccaccatgcgtggctaatgttttgtattttctttagtagagatggggttcatcatgttggccaggctggtctcaaactcttgacctcaggtgatccacctgccttgggttcccaaaaggctgggattacagacatgagccaccatgcccggctgtgtgttttttcttaatcccagtcttcaactggacaaatgtctctttggcattacttcttaacccttaggtatctcatagtgagagagatataaatgctaaacagagatttatgagaaagttaaaaaaaagaagaagaagaaagcagagatagcgattccgaataaaagattctggggcagtgttgattaaaataattgctttcttttcttcactcaggaaagtattcttaacttggagtccttggtgacttcagggaagtcagtgaacacttttagagtgaaaaatattgataatatgaacttatgctcatttttctgggggtgtttgcatcagatgcacctttgtgcattcatctgtttctcccaaacatcatactggtgtattggtgaattcttttaaaattttactctattttgtaaggatcattacatatgaatgatataccataatacttgtcatttttattttaatgttaatatttcacttcagtaagacaccatgatctgcttgaccattaccaaattttggcaatgttagttcctaatactcttttaaaaaaagagaaagagtttgaaagcaaaagactgagaacaagagatagacgagggtgattacatgtaggaagccacacccaggccagtattactgtttgaatctcrtttggaaataaatattcttatctgatagaaaacaagcatacttactgattattcactcacaaatatttgctgagtgcctgtaaatgtcaggaattttctagacagttatagaaaggcctagacacaaatataaaaatgacattagaaaagtcatacaggcagaagccagcaaattatttccaggtggaaagattggctaagatgggcagtcttggatgggatagtcttagatgtaaataaaagggaaaggtattgaaaagcagccgaaaaaggcctatgtgaacagaagtgtgacattaatacaataagtaggagagagttgtgcagcaggttcttaaaagaatgaaacaataaaaccagggtttaaggaagattattctgactttataaataggactgtgttgagaaaaagtgaatccaaggagatccagtagtagaccattatatgaatctagaaatacacagatgagaatttgactgaaggtgacagttacagaaattaagaagaaattggtaagtcaactggcaaagtattggatgggaatatggtaggggtaggagtggagataagcagagtgagtgtaaatatactccagaactttctatttattaatagctttatttctgagratacctcaatttcaaatagaaaacatgtacccctgaagaacagttgagctaaactcacagaattccaggatcatggtattggatgggatccttgacaagtaactggtcagtttaggaattccctctacaaacatagctgaccccatccaggctaactataatgaacaaccttaaaaccaacacctaacccagatagtacaatttcagaaatcagataataaatgaatgttagagctgggtaggtgctaaagataatctgttcaaactccttgttttctctaaggaatactgtatgcagtaattgacaaaggtgaagaacaaaagactgttatatcctaagattgatagtatatgatggaaacacagatgctctcctacagtccccccagggaaataaaattgattcctaaaattacaacaagaatacgtaaatagcatacataattgtaactttttttaaacctgtttgcaaaaattgtcctgtaactttgttcaaacaacttcccagacaaaagcttcctcagtagcattctttaacaccctctttagtcttgtgttgctgaaatatgtgtttggaatgaaaattatcttagcgcaaacctgtgggtatatacggtctgtactgaatatcaatggcaaagccttgatatttgtcttagctcaagctgctataacaaaataccataaactgatggcttaaacaacaaacwtttatttctcacagttctgggagctggaagtctgagatcagggtgtcagcatagtcaggttctggtgagggcatcttcagggttgcagactgcccacatagcatgtatccacatggtagaaagagagcaacctctggcctcttcttataatggcacgaatctaattcatgagggctccattctcatgacctaattacttccgaagggctttccctccaaataccgtgacaccggggattagatttcagcatatgaatattggagagacacaaacattcagtccataacaatattttcctttgacatttcctttttctttgctcctgagagtttttcctcctaactttctgcagcttctccttccccttcagggactgcttaggattttctccttatctggtcaccaacctcttaactggtctttacttttctgatctgcctttatactattcccagagtaatctttttgaaaagcaaatctgaccatgtgacttcctcacttagaagatttttaatggcctctttagaagaaaatattgtcttagaatagtatacaagtcctccaagactagttctccatctttatctttgtccactgtctgatctaaactttatatccctacctgtttgtagcttcctgaatggcctgtgttctctaagtgaacttcttcagaatgaatccctgttcattccttgaaattcttttttctttctaactaccctaaaaactgttccaggtawctattaagtttctggaccccgaggttatacctaggtattagttgataggctcactaaaattaatagaatgtttgcatttaagttagagacttgagtccaggagaaagtgaagatacaatggaggaggaagggaaaagaatctattaggcaatcaatgcaagattatttaactcacaacctctcacttgaactaaaataacttacaaggctcttgttattatctccaatctataggtgaaataaggccctagaaagattagtagctgaattgcctggaattgcttgtatgaagtggaatagagattggaatctttctccactcttccagtttctttcaaagaataatatcactcacagttgcacacatgtcacatgaagcccccaacctagatgcctaattaaacttagctcaaactccaattttttggacaaaaggcctccttattcttataaaagctttctcctctttctttgactcttctcttatgtcagctcagagagacatttctgcttgggccaatctggccttcaagctcagtcccttcaatgaataaaacaaaacaaaacaagtcgggattttgtaccttcagtaaccttattgacgattgggagaaagggaaaatgcacgggttggagttaccctttagaccaagctgactcctttctcttatatgcacacacacacacacacacacacacatcttcaataaccttattgatgattgggagaaaggaaaaatgtacaaattggagttaccctttagaccaagctgactcctttctcttacacacacatacacacacacacacacacacacattctctctctctctctcactctttcatgcccttacatacatgcacacacagagaccaagctgactcctttctcttacacacacacacatgcatgtgcacaaacacacattctctcgctctctcatgcgcttacacacatgcacacacatacatattccctctctagcaactggcatattcctcccctttcctgtgtagatgaggcacagattagttccacccaaaccaaagctcttcaaagtctcaccttctgtcataaatagctttatcgaacattttaatgcaggcagactctcgtgaaagaaattctggtgaattccattgtttttttctccatcttattacagtatgattaataagttagtgactacaaggttgtagtttttaagagcaagaagtccactccctttcaagtcacattgggcagtccttctgttcatacctgacatattgtgggaacatatgtctgcgtaggattttaatacagagattgtcttagataagaataatcgtcagagaagcaaatggtctataagttatttaattttattcttaatatggtcaaagataatggttgcactgacttcaactttactttcttmaattccattaattgcatagcactagaattttccatataaaataaaatcagatcccatgtcacacagtactctgagtcactctgtgactcctactcttgaagatatagtcctacctgcagatgcctgacatggccagtctttgagatggccagtggctgaggatttctcagatttctccagaatctgttcccctaagcaaggccctactcatggttatttcttttttgacacacacatcttttttttttttttttttttttttgagacagagtttttatgctcttgttgcccaggctggagtgcaatggcgcaacctctgctcactgcaacctctatctcccaggttcaagcgattctcctgcctcagcctcccaagtagctgggaatataggcatgtgccaccaagcccgactaattttgtatttttagtagagacagggtttctccatgtggatcaggctggtcttgaactcccgacctcaggtgatccacccacctcggcctcccaaagtgctgggattacaggcgtgagccaccacgcctggccgacacagacatcttgttcatcataggtctgtgtgcttgctcatcttttctcttaaaaatccttcccactctcttttatttcattcttgaggactcagccttttcccactccacctctgtccctgtctgatttaaatagtcctcttttactgtcccatagcccacatgcttccttctgtgagagtgcactctacagttgtttgctgaaattacctcctctgctggactctgggtaagggacacactcttttcatcatcttgtttctgcagcctctaataaagtgcatggcacatagtcagtgctaaataaatgttgagttactggtgggactaaaagtcaatgaaagccaacctcatgtttatttcatataaaaattctactagaggcataggcaacattcggaaaaacaattgtagttagtgagaagataaaagaaaaagaaaaccgtcacaaaattgcacacatctttcctttggaagctttatgaagtactaaataaagttttatatattttrtacaattttaaaatacttcaaaacaataatttgatgccagaaatacacttggagatgagagcagcttgccactagcaaactctgcttaaacctattacatgtacacattgaaagagaatccaaagccttcatgtatttcccatcagataaaatgtatagaggaaaaaaaattaagtcagcaaaagttagacctaacctacacaaatcttttactgtagcaaactaaaggaatgactagctcaaagcaatacacggtgaaacagaaatcattttttccagttctatctactgtagacagtatcaattccttccktagaacaaaggggaaattttgtaagaattaagagaagagaagctggaactggttagggagatttaagtatttgctcttaggagctttttgttgtagttcttttatttttaaaaaatctggatcagtgctcatcatgactggccatcagagaaatgcaaatcaaaaccacaatgagataccatctcacaccagttagaatggcaatcattaaaaagtcaggaaacaacaggtgctggagaggatgtgaagaaataggaacacttttacaytgttggtgggactgtaaactagttcaaccattgtggaagacagtgtggcgattcctcaagggtctagaactagaaataccatttgacccagccatcccattactgggtatatacccaaaggattataaatcatgctgctataaagacacatgcacacgtatgtttattgtggcactattcacaatagcaaagacttggaaccaacccaaatgtccatcaatgatagactggattaagaaaatgtggcacatatacaccatggaatactatgcagccatgaaaaaggatgagttcatgtcctttgtaggaacatggatgaaattggaaaccatcattctcagcaaactatcacaaggacaaaaaaccaaataccgcatgttctcactcataggtgggaattgaacaatgmgaacacatggacataggaaggggaacatcacacaccggggcctgctgtggggtggggggaagggggagggatagcattaggagatatacctaatgtaaatgaggagttaatgggtgcagcacaccaacatggcacatgtatacatatgaaactaacctgcacattgtgcacatgtaccctagaacttaaagtgtaataataaaaaaaatctggatcagttgttataattttttttgtttttttgagtcggagtcttctgctgttgtccaggttggagtgcagtggcccaatctcagcttactgcaacctctgcctgccgggttcacgccattctcctgcctcagcctcccgagtagctgggactacaggcgcccgccaccatgcacggctagtattttgtatttttagtagagccaaggtttcactgtgttagccaggatggtcttgatctcttgacttcatgatctgcccgccttggcctcccaaagtgctgggattacaggcgtgagccactgtgcccgacctcagctgttataatttgtattttttttttaaattaagggcatacaaatagtgtccaaaataagtggtattttttggacttgttctcttcatgtataccaataggtctatctaggaattatgacaagccgatacagtcctttagcagaccttcaagtgttggcaaagaaactaatgtccacatagttacacatcccgtacagtggatccttttacctcaatggtcaacatcactgtgagttgtgggtaagagtaatggactgaacatttcacaaaaaatgacctcaacctctagctaactgctgtggctctgaggtgattacttttttcctttttcaaaaggaagctgcttcttcagcatcttctcctggagcccctggcacagtttcaggccatgtgtcaggggaacctctaagcatatcactgtgacagaagccaagtgctggcccgcaagaattgaggactgtttgttcacagaagagcctcagcagaatgcgggtgttacatagttcaaaggtgccttgaagaaaactgatgctgttgtagcaggggccttcaaggctcaatttatttctcagttgctgttccatagccctctcccagcctttagggagtttagccaatagtttttgcktgggtgtttttctctgtttagttccttgacttagcaagatttggtgcagttaaagagttttcatgtatttttaaggagagccacagtgtatactactctggcaggggttgaggggaagtattttattaatgaatgcagtatgtgttcttggtaaaagccaaaattaaactggctcactgtttttgtcctgctagctgtcgacatttaggtgtgttgcttggtgtggtgactcaatttcctgtgggatagttggcaactccactttgaggtttgttcggcgggatgaaaaggtcagttacttgatgtcttagaacacttggggttaaaattcctaaaagtgaagctttacaaatgatcctgaaaaatcgtggctagctatattgcctactcacctaggaatttggaaaaaagcaatattctcagctctatgctaatatcaagaataattctttatttgagcaacagtttcacagagcaaactttactctgttagtaattattttctcactagcatgtagatgtgttccagtgatttttcatttttcttatttatacagatgttagaacttaaaatatatgcttaccccattttatcatcatactcaaatcctgtctgtcaaaagtggctggtgcatggcttggacataaaatggatattctgaagtaaattgttcctcctgtcactatactaccttcttaagaacaaatcctgtgtataaagtgcatgatgtcttgaagcattagccaaaactttcctgaattattttccacattaaaaaataacaactgaaatataatgtgtggagccacatcctgttagatttgaagcctgagtctgaamagctttgggaacttggtgaagatggaggaagggggcagtttacttarctactgggaaatcacttgaggctcaggctttgagaaagttggagtgcaggggagaggagccacagaamgccgaacctcagaggggactcccagcttcattgtaaccaatgattgaaaagatggcactgaacaaatcccagacacaatggttatgcatctttaatccactggataggctaactatggacagctcaaatgatcataaaacaagtcaatgtcctcttaaaatttcctacattcctatattatgggaatgagagagagaggaaaatatcaaaaccaaaccatatagtagatgcactaccatggcaactaggtgatgctatacttgcatatggaagttattcagtaaaatgaaaatgattgtgttagagccataggcgaaagtattgtttgtgatctttagggtgtggggttacaatggacttcctatatttgtgtgtaatgcttcaatttttataacaagcatgtaatattttttacattcttagaattggggaagctatacagagcaggtattttatatttaccatttaaaattattaatatctttaagcttgttaagggggaaaaaaaagmttcaatctgaaactttaattcacctggcaaggtttaggcagttgtttgtccatctaaagtatatatttacatagactgcggggtggaggaagtagaacaaaaaagaggcaaattttaacctagagtactcaaagtgaacagtaaatagttcaagtattcttgataacaataagccacgtggcacatgtaacaactactttaaaagttactctaacttttacaaagttcacataaaaagctatctcaaaaatcccaggagcctaaattcagtccatgaactttatttgttgtgccatgttaatttatggagtctaaatttcaagggcagaatttcttctccaatacctgtagattcaaagacaaagacaagggatcccaccacttagtgtaagtttctcagtatcttctttccactcgacaatgacaaagttttatcaaatggacccttgggagtttgacttctcctcactatgaatggtttgcttattgcatgctaatgtagaaaagttctcccacaactgatctgcttagggacagtgtccctggtgccctgggtcagcctttgtaaacagaacaggcttttctgtatgcctttgaatatggtctttccgttttctcaaaattgtagtgtactctgcacatggtgggtagaaacacccttccagattttcttccttggcccaagatcatctaggtcttatgcaattcacaggggaaaggagtagtatgcaggacatgcgtaaattctccttaccatgtggttctttcacattgctgttcctttaagagaactcttaggcaattcggcatatgaaaatgcagcctattgtcaaatttgtgaattataaagcgttccgaccccacaacattgtatattttgtttgcttgtttctgtccgccccaacatttagaagtctggtacttagtagggactgggctgggtagaaaaagaatgcggtcttaattcccacaaccctgcctccttgaagtaggtgaatcctaagcctttagaaacgaacccccagaaaccctaaaacttaaaccctcagaaaccttgagggtcctaaataaccttgtttgtgaaacttcgcaggaagcagccggtcgtggagtcgcagaggctccagcggtctgggcaacctggagggcagtggctcggcggggcgcgcggggttctagcgagacaggtgcgcggccgtgcgcgcctgcgtgccggtccctcctgagccccgcggcgggcgcgaccccggacggcggactgcaggcgctccacgccgggttttccgccgctctcctagcacagacagtcccacagcagccccacagacacacacgctcgcgcccgcgcctcctcgtctgcacttcaaagcgagtggcgcccggctgcgccggggggatggcactgcgaggtggcrgggcccccggggcagagctcgaggggaaggacgcggcgggtggcacggacagggacaggcttttgcaattcggaatcttttcgtaagggggttgaggaggagccaggcagcgccgagggccgagaggggcgtgagggggagtgttcccggaaagctgcggcgttggagccgcgctgcgcctgccgcccgaggagttgagaaagaaaacaggaaacgtggtggccgcgcacccggccgcggctgattcattcacttcaagtgcmgtgcagaaggctcggcaggcggggcgggcgtggggccgcggctccgggttggggaccgaggagatccggctgtggaccagacgctcctctgcggggcgggcacccaagcgcgctcgccaccccctcgccatccgctagagccgggctcctggactgggactcgggcccgccgcacagttgaaaagtcgcatagtggtttttccgctcgcgtcgctgtgtgaaagttggctcgccgctctttgcacgccctccctggaggccgacccgagacgccaagctggagagaccgtgcctccccgaggccggccgccccgcgagcacagcctccgcccccgttgcactgccgggctgggcaatatgaaggagcagccctcatgtgccggcaccgggcatccgagcatggcggggtatggcaggatggccccctttgaactcgctagcggacccgtgaagcgcttgagaactgagtccccctttccctgtctcttcgcagaggaggcctaccagaaactggccagcgagaccctggaggagctggactggtgtctggaccagctagagaccctacagaccaggcactccgtcagtgagatggcctccaacaaggtaagccccggttctgctgtcactggtgcccccaggctgcngattcccatgccggygagccactggtacccatagccccgggaaataaattgagaggttttttaggcttactgcatgttggctattctgctccttagagggaggttcctgtttccttgctttgcctcccctagtcacgccagataaacattttccaaaagcaatttgacgtgctaaatttaagtatctcccaagacacagggttcctaagtaacactgagcccttgcagcagaaacccagtagggtccatgggcattgcatgtttaaaggtgttcttgggattcccggttgaaaataagaattggtggatgtctgtgaaatcacttgaatgtcaccacctagggcactcaaactcagaagagttcatcgaacttggaaccttcaccctaattcatctagttgtcagggtaccccgcaagaactgagcctttatatattcagttggccatacatatccgcaggaaacattaacagagttagaaggttccttatgatcattacttttgtttccattaatcttggaaagaaagcccagttttttgaggtcatttagtacaaggaggcttcaactaggcatctgtgccatatgtgctaaggtgctggtcttggcagttaatggagttttgagggctgagaagtaaccttcagcctgggacagccttaaaatagcacggaaggcaaggtatagtgttttcagttttgctgtattttttggatttcctgttctttttgtctttagttatgcaaggagataattggaattgtgtatgtttttagtggctatttgcctgtgcatgtcgtatgcagatggctgaaggattcagccagtaaggactgrtaatgttgtgagacaattagtaatagttgcctcgtcmagatatttaagtatttttggccacctatttacaaggtcaagaaggttatattatcttacagttcatctatgtgcacatatctttaaatgagtgatgcttttttttttctacctttctatggtttttatcccacctgttctcatgcagtttttacaaaaaggccacggcataacagccacttgattgtcttatctattaacagtgcttttgtaggtagcattgtcaagtgaaaagttggcttcaaataaataaaaggggctctgtagacacggccagcagatactaacctacccatatgcacactgacctacccatgtccacactgatgatcaatttttttgtcatttgtgcctcatttctaaatttggcacagctcctcatcagaatgaccaattattgctctcttactgggacttttaccccctgctgtrgcattaggcacctttattctcatytgagtaacaaattcttagttttataaaatatagtttgttttcataatttgattctcaatagcagtagacatatgctgaatatgtccagtgtcctaactgctaaatgggagcactttgccatgggcctgagttcttaattctattgtgtggttgatkctgtgtaagaaaatgaagagcagaatcaaaagccmcttagcaatgtgcaagcattagtgtatrttttcaaggtgattcgacagtagtttttcagctaaatgaatttgagcagctagttrctttccctaaaatccatattcttaatgttgagatctatgtttggatttaaaactgaatgtgaaatttaataatgtattgtaaatgacttcagctgtcaaggaattaatctatacgttaagatttaaaaattttttaggtcataataattgcctaaaatgattcctttcttttaaaggcaccagataagacagggatttaaaaaaaaaatctttattatgaaggccccagattagactttgagttaatttacaggtttaataggagaggttggtctgtttggttaaaatgaaatctaggtaaagtgagaagataattttttcaaaatgtagtcattctagcaatgtttatgtcttgtggctgaaaaattaggatattttttcctagcccacgacagagctgaattgaaaaattattgctgtcacactaatttttaacattaaacttagctcagcttaagctgttgcttaaacttttaatgtccaagccattcgtgtcttctttaacttatttatttctaaatcagtgctaagcttacatgactgttatagacaaaaaagggttagcacagaaagaaaaaaaagctcttgctaaaggttgtaaagttacccttcttcttcataacaagggcatgaataagccacatccacaaaagctgtaaactgagttggagcagctgatcggaaggcccctgtgagtgttgccacaccttcagtctgaactggaaatgtgtacagcttgcatcatctccactcagttatttgatatttcttgagtatgaatgaatgagtcagaaacattgcttttcagttgttagttttattaccatccattctttttacatacacgtgttcaaactgatattttcagtttattctcctttagcctttgaaaaattatgacagttttctgtgttctctcttgaggttttaaaaaatttactctaayagattgaaaagcacaataaaaacactagtaagagatcaggatttttaaatggtgatagagaatacttattatggagatggatttaggtattaggaaggaggaaactgattcctcaaacccatttaacaaactgggttaacacattatttctgtttcttagacttctcaataaaaggcatcttagccaattagcagcttttaaatgatgctctaggagcaactagctgtatttcctgtattggtattatatatgtttcttgcttgttgatggcattgaagcagraaaattattgaattcttggccaaggctagggttggctgtaacacatgtaggatgcttgtaccaagtagggtaagagattccagatggcatttaatttgagtgattaaatctatggcatttacccttataagcacattaatctgcctgagatttgtacagatttcctttggaacctcattgctacaattgagggtaattttagtgaggtctcaaagctttggaggcaggcaaacctggaagttgaattatggttttgtttcttgctaatggagttacattagagaaatgacttcaattttttttagcttcagtttccttagcatacaatgggcaccataataactatcttgaaaagtcagtgtaagagttcmaaagaatatatacaaaagagctagctaatatagtatctgacaatagtaggcactgtatctgttgttattgctattatttgggttttaggtcaaacttcattggttgcctacgtggctaaaatgtctttttaccattcggttgtaatttataccagacacttcaagtttgatggatttttataattcttagataactgtctatagcrcacatttctgtatcataaaaatgcttaaattatatttacagtttttgtggtataatacagacatgaacattctgaagttctaattagaagtttaggcttttcttaaattccagttacagaatgccagacagaagagctaactaagtacttttcctgttttactctaaaactgaaaatgcagaccttactaatttttagaacatgtgaaatgtaataagggttagtggtcaatgtgccttttcagtaaaacaccttttaagcagaatagtttcaccatgtttttggttacctttctctcatggaaagtatattgaggatgggagtcagtagagaggagagcaggacagcggcctgggcctcagggctttcaaggattatgctatggaaccctgtaacgttatcctcttgtgacctaataatgcacatttcaccaggccttccctgtaagttcagtgaggttcaaaggagaaaacgaaatcattttgagttattcccaagacatatcactataaaaatgtattttgtttctgctctaattttgggggcagtttgaggtttggcatggctggaaatgactgtgtttcaagctgaaagtctgtcttgaagttagaatccagaccctttctaagagacttcagatttttctatacttcattccaaatatacttaggccagctttacaaatgtggtcatgacttctttatggaatttattttgtgtatttggcttttggcaaacctctctagcatgtttctgttgcctataaattaaattgctttgctgggtgctttgtctcagagctttctctggctgctccccctactgctttgtaatagtcaatgcagaacatatagtaggactttttgttgatgtattttcttctgggcaagaggggtgttataacaaatataggatcttcatagaagtggctaaatcttaagatatttccacattatgcaactacagtgtaactcaacagatataaatgttaaacttttgctaagaaggaaactaagttaattggaaaaggcatgttagttttatagagagaaaacagcctcagttgttttctacattaacatattaaatcttagattaaaaaagtgttaatatgcctaaatacaaactttaaatttcaaaagaaaatatcttctataattatagaaaatcaacatttagatgttttgagttcgatatctgctttttcatctactcaataaaggtagatttgggaaagatttatgtagcttacatgtagtaccttaaagttaatatgaaagattgagaatcctataatcactgttagaaaaaatactttctttgcttttaagtaataatggaagagggaaacaattttaaaggaaatttttctttcactgaaaagtagagcccttgatgttaccttagcataaaacttaggattaaaacaaatcttaacttgtctctgttgtcatccgttcagttcctgtgccagtatttagtgaaagtttaattattcccaacatttaattatcaaaaactcctaatttttaattattcaataaattaatcattactagataaatttctttttttcagttacattttgacttaatatttggggtagtagtggtaacttctgtctgagagcattatgaactgtctacgttttcgaaaaaaattccgaaacataaggattgcccatgataaaagaagtattttttctaatgttatgggtagattaaacaaactggtatttttctagagagaaaggatgatagataatgcttttgttcagtttaagaagatttctgcgatagttacatagactgtagctatcacttaagatataaatacatgatggatgtgcagtgctgtttatgtcattattttcagtggattcacaaaatatgtagggtttggttttctctttttcagcaggagggaccaactctttttctagaactgtagattgctggggttaattttgtgatagcgtagctctagtaggggagcagtttttacatggctatttgttgtaatagtttaattgacactgttagtctgagatctttctagaatgtagagagatcagtagcactttattttaatattcacattagttttgaaaggcatttgaagaagactttttttattccctgtaacagggattggggggtatgccttgatatttgcttaaacaacaaacaattctgctgcgtccattaggaaattagttaagttcagtgaccaactacaatgacaataggtttattatcttttactcttagagaatagtttatcttttataaagtatttattattattatttagtattcagagcttcttgtttttgttttgttatactttgtatgtgataaggatgaatgatatttactccctggcctggagtaggcaccagtgatacttacagcagctttgtacagtgaaaagaacataaatgtttttcattaggcaaacttggtttcaaattccagctctgttgtttcctatctaatattttgggcaataggccttaccgctctggagctcagttttttcatttataagtggcgataatgaaaggggaaaataaaatgaaaaagttattgagaccattagctataatgtatgtaaagctccgtttggtgcattagcacacactgggtgctcaataaattgcatgtgcttgcctgtctagaatatactaaaaaagagagattaagaaaaactctgtgtcacatatttcttgcaatgtaaaaacataatatttcttagaagaaaaacatgacttttctattctttaagaatttacagtccaaattaatgttgctcaaactttgtcatttttgagacagagtctcgctctgtcgccaggctggagtacagtgatacgatctcagctcactgcaacctccgcctcccaagttcaagcaattctcctgcctcagcctcccgagtagctggactacaggcgcatgccaccatgcccagctaatttttgtattttgagtagagatggggtttcaccatgttggccaggatggtctcgatctcttgacctcgtgatcctccctcctcggcctcccacagtgctgggattttgtcatttctgtgtacattcatatctgctattatatgttgaatgttttaacttaatgtattttttattaatctttaaaatttatttrtcaattattcttaattgacaaatattaattgtatctatttcttgggtataatgtgatttttaaaatgtgtacatcatagaaagatttagtaaagctaattaacatatctatattacctcaccaatttatctttttgtgatgagaatgtcaaaaatctattttagaaattgtaaaacatataatacgttattaattactggggtctccatgcagtgcaataatgatcactaaaacttattcctccaatctaactgaaattttgtactgtttgatcgacatcttccatttctctctccctcctcctctacagcctctggtaacccacctttctactctctgtttctgagatcgacttttctagattccccataaagtgagatcatttattaaagacaatatttgtctttctgtgcctgacttatctcacttagcataatgtcctgtagttccattccatgatgttgtgaatgacagaatttctttcttttataaggctgtgtaatcttttttttttttttttttttttttttttggaggtggagtctcgctttgtagcccaggctggagtgcagtggtgtgatctcggctcactgcaagctccgcctcccaggttcatgccattctcctgcctcagcctcctgagtagctgggactacaggcgcccgctaccacgccccactaattttttgtatttttaagtagagatggggttttactatgttagccaggatggtctcgatctcctgaccttgtgatctgcccgcctcggcctcccaaagtgctgggattacagatctgagccactgcgcccggcctgtataatctatatatatatatatatatatatatatatatatatatatatatcacattttctttatgcacacttgatgaacacttagattgcttccatatcttggctgttgtaaataaagctgaaatgaatatgggagtgcaaatatctttttgatgtaccaatttcagttcctttgggtgtatacctagaagtaggattgttggattttatggtagttctatttttagatttttgaggaaccttcatactattttcaataatggtggttctaatttacattcccaccaacagtgtagaagggctcccttttctccacatccttgccaacacttgttatcattcatctgtttgaacatagccattgtacatggtggagagcaacacatactggggtctgttggcgggtgggatgggtgcagggagagcatcaggaagaatggctagtggatgctgggcttagtgcctaggtgatgggatgatacgtgaagcaaacatggcacatgtttacctatgtaacaaacctgcacatcctgcacatcctgcacatgtacccctgaacttaaaagttgaagagaaaaaaaaggaaaatagtcattctaacaggcatgaggtgatagctcattgtggttttaattgcatttccctgagaattagagatattgttgagttttcgtttgtttttgagacagggtcttgctcttttgttcaggctggagtgcagtggcgtgatcatgtctcactgtaacctcaaattctcgggctcaatgatcctgcctcagcctcccaagtagccaggactacaggtgtgtgccaccatacctggctttttattttttcgtatagagagggtcttgctattttgcccaggcttgtctagaattcctggcctcaagtgatctcctgcctcagcctcccaaagcactgggattacaggcatgagccactgtgcagggctggggaacattgttttttttttttttttttttttttgtatctctgttggccattcatatttcttttttgaggaaagtgtgtctattcagatcctttgtctaattttaatcgatttgttttcttactatttggttgtttgaattttttatatattttgaatattagcctcttatcagatgtatggtttgcagatattttctcctgatccatgggttgtcttttcactctattatttggttgcttgtgcaggtactttttagtttaatgtagtcctatttgtctatttttgttttagttgcctgtgcttttggagtcctatccaagaaatcattgcccagaccattgttgtggagattttcccttatattttcttctagtagctttacagtttcaggtcttatgtttaagcctttatatctcttttgagttgatttttatatggagtgtgagataagagtacagtttctttcttctgcaggtggacatccagttttcccaacactatttgaagagactgtcctctctccattgtgtgttcttggaccctttgtcaaaaatcaattgactgtaaatacttggatttacttctgggctttctatcctgttccattggttgatgtttgtttttatgtcaataacatgctgttttgattacagtagctttataatatattttgaaatgagggaatatgatgcctgcagctttgttctttttgttcaagattgctttggctattaggtctttttttggttcatataaattttaagatttttttctctatttctgtgaaaaaaaaagacattggaattttgaaaggaattgcattgaatcaatagaggaactgcattgaatctatagatggctttggatagtgtggacattttaacattactaattctttcagtgcatgaacatgggatatcttttcatttatttctgtcttcttcagttgtttaaatcaatgtcttgtagtttccagtgtatagatctttcaccttgttggttagatttgctcctaagttttttttttttttttttttttgtgatggagtctcgctctgttgcccaggctagagtgcagtggcgcgatctcggcttactgcaagctccacctcccaggttcacgccgttctcctgcctcagcctcccaattagctgggactacaggcgcctgccaccacacctgccttttttttttttgtatttttaagtagagayggggtttcactgtgttagccaggatggtctcgatctcctgacctcatgatctgcccgcctcggcctcccaaagtgctgggattacaggagtgagccaccacgcctggctgctcctaagtatttttttgatgctattgcaaatgggattattttcttaatttcttttttggataatttattgtcaaagtatagaaatgctaagagcaacttattgttaaatctaaatactcacccaagtgcctcatcttaagtaatggtatacatgaaatcataggtttgatgttcaagttatattttttctgtattttttctaaaattaatgaataacaaaatgagaaaacattcatcttgcaccaccttaaagcattttgcctaccatttactaacactgggcatacttttggacacactagtctaaatcagctgcaagaacaatttagagactaatttattgttttaaacaatcaacatttttccttctttaccctcagttggatttctccactagaggagaaaatggcaaattcgttcagcagaaatattccaattcataaaatattcattccttaggcagaatggtccgtggatttagagcaccctactatagacagcctgcctgaattggattcattctctgccttttaccaaacgtaaattgggccaygttgccttctgtgcttcagttttctcatctgttaaatagttgctgtggtgatttaatgaattaaaagatgggaattgtctcgactgagtcaggaatcatactagatactcagtagaactcattcatttccatatgtgaaggaataacattagtttttattttattattttggggggtgagggttagagaagggtgtctgccatcctgatttctatccttttgataaagtgacctaataatattgatactaaccaaagaggactattataatgttttatttactcttctcccccattaatcactttttttggtggtgttttatatgttttattcctttattttcatccttcaaggagtttgccctttgtttccttctgtaattttacagtatagctcatcaagcaagcctgagatttttgtcagaatatctgaaaatctctgagctttttctagcagaaatgcataatgcagtgcagaagaatagtctagccagtgtttttcataaatgaatgtacatacgttcttcctctgcataagactgaaagtaacccaggcacacaatatcttattaatatttaatattaagaaaagtatattaagaaggtaactctccattctacctctcaacatcttaccatctagtatacacacaaatatttccttgctctatcagccgagagggtctagaagctaccataccccagtagcaatgagcacacttagcaccctcattttggtttctaataccattctctggtaaaaggaaccaagactctttgaaaaaaaatagctgatttctagggactcaggaaggaaatatgtaagatgagcctggagcatcttgtagtgccaaaaagtaaggacctgctcaaacaaatggaaccctacacccgtgggaatatactgaagagttgcaagagcaaactgaaagagctcccaatggccaaagctagaacaatttgagcaagaaaataatatagtattggattatatcccaaagggtaaaataaatatccataaacccatattgatacaatttattaaataaatacctaagtgggggaaaatagacaaatctcctcctgtgcggaattcccaataacttctatagatactctactctcaaggagggagaacataaccccctacaccgtaagtgtgagctgtgcatattgacttccttctaaacagtacagtgtagaaagggaaaaaaaagaaactgtagtggagaawcctatcactacttcagccaggttatcaaggtcaacattgacagtgataagtgataacatgtaccctcgatatgatctgatgaaaatggcacttttaatctgtggtttccctactgaaaacatataaccccagtgtaatcatgaggcaaataccagacagatctcagttgagggatattctaccctcgaaacttgaccagtatttgaccagtactcctcaaaactgtcaaggttatcaaaaacaaggaaaacctgagatacctacagccaagaagagcctcaggagacatgaggactaaatattatgtggtatcctggatgggatccagaacagaaaaaaggaaattacgtgaaaactaaggaaatctgaatgaagtgtggactttgtttaataataatgtatcagtattggttcaataattgtgacaaatgtgccatactaaagtcagacattaaaaatgggaaacagtgtagagtatataggaattatctgtaatgtctacacaagttttctgtaaatctagatctgttctaaaacaaaaagttttatttaaaagatcgaagccatcttttaaggcctatctggaatgttacatcctttataaagcctttttttttaatcccatcttcttcccatcctatatctggggtgtcctatgtctcccacctcaggctttcctaattggatacctttgactttccacagaacttttatttgtaattctcttaactcttagtacaatattttgtgtctctgttttattgttctgatgaggtcttctrcrgtgtttttagcccaacccagtgagtgtctggtgccttagaccacttggccatcctgacaccctacacagtgagtgtcaatataacattttgtagttagtcacataaattagtacaagaatgcatgatgttggttaatgcaaatgctgttttttaccttgtattggtagatggagagtctgagcattctactttgtgcctttcaagaaaggtttttttctttttctttcagtgacaggaatcctgagcatttctcacttaatctcagttctgcttttagatactcatgtctcagaaattttatcatagtatatgctagatcaatctcatctcgtttaaattamaagtttgtagtgcacaggcaaaaaccatagaggccatattcatggtcataaactgctctttctcatctctacctattttagcaataacattcttcttattagtttgttccaagtgaaaatgacataactgaatactttccctgctagtctgggaagaaaggatgtgtttgttggcttttgcctgtcagagagtattctgcaatgtttgcctagggcatgcttgcattcccatcagcatctctggtctgctgcactgtaatccctatagggacagcctctggcttttattactgacaagcagtgcactgtgcagccataggcaccataataggaaacaccttggcctgtcataaacaggtctggagagtagaaagtacaggcctgctggggatgtgtccatagcaaagaggcaaagatgcggctgccatattggagtaagtgcaggctaatgtctgccatctccatttcagaaaataactggctgattttgaagctgctttttgtataaacagtagtgttttggttgctttttgtttttggcttaaatatgaataaagccatcttaaagagattatacccttcaaagtattttgagaagatctataaagtattttccttttgttattttacatttaattctacctgatcattccaatccaaacccaatagagaaggaaaaacagatatttcactatagtgggaaattaggaaaaaaagaaccatgcaaaaatacaagtgattgtgtgtcttttaaaagaattacaaatcacactgaattacccaaaattacaaagaaaagtgcatttattattaaggtaacttgtgttgtctgtgcctttacatcaactccaagttttataaaaggagtacattctttgaccataaagactttatatttgttagtgtttttttcaatctttagggaaaaaatgaactgcaatattaatgataggctttgtagcaagaatttaggaagacaataaatttcaaaattggaagggttatcacagtttttaataaagagataaaattatttcatgagtgctttaaatatatataggtgtcattttattatttacaaggaaacccatttcacaaaagaggctaaagactgtaaagattgaacaaagctataatcctgttaaaaattaagataggtttaggaaaactaaagtcctaattttttttttttgaccactttggccagagctgttcataaattaggtaatcaatrtttgttgactagtcccctcccttgttaaaaactaaacacttgtyctcttgtatcttttttaaaaaaatatttcaagtaagtttcaacagtatgctgtgataaggatgaaacctattaacattatccttggtatatattttgattttctgttgttttcttaatcttatattgtcagtatggtttctaagatctaagatctccataagggtaagtgataattgggttttgataaatcataaggaatcttctactagaaatatgtctgtttatttattgtacatcaggaaamgattagtttactttatgccagaagataatgtttgggcctaaatcttaatttttctatctagtgttaatacagtagaatgcctaaaggatatatagaagaaaagacaaaaaaagaagatgaagagaatgcatcattacagactgaatcatcagtccctacagaaggggaatttgttctttcaaaagtagaatttcagcagccgggcgtggtgcctcaagcctgtaatcccagcactttgggaggcagaggagagcagatcacgcggtcaggagttagagactagctggccaacatggtgaaatcccgtctctcctaaaaatacaaaaattagccaggtrtgatggtgcatgtctgtaatctcagctactcgggaggctgagcaggagaatcacttgaacccaggaggcagaggttgcagtgagccaagatcgtgccactgcactccagcctgggtgacagagcaagactctgtctcaaaaaaaaaaaaaaaaaagtagaattcagctgggcatggtggctcacacctgtaatcccagcactttgggaggtcgatcacatgaggccagaagtttgagaccagcctggccaacatggcaaaacctggcctgtactaaaaatacaaaaattagccaggtgtggtggtgcatgtctgttatctcagctactcgggaggctgagcaggagaatcacttgaacccaggaggtagaggttgcagtgaatggagatggcgccactgcactccagtctgggcgactgagtgagactccatctcaaaaaaaaaaaaaaaaaaagtagaattcatgggaaaaattatttgttgctatttagccttatttttaaatatttcagtatattgtctgtttgatacatatgaacaatctgactacaactcattgggaaacaccagtatttaccttaccttctaatgtaaggcatgattccaggtattttctcatacctcaaaccttaaatctctaatttagtcccagaaacagtattctacatgtcaaaacgttttttgttttgttttgtttttggagacaagttctcaccttgtcaaccaggctggagtgcagtggcgccatcatggcttactgcagccttgatctccctggctcaagccatcctcccacctcagcctcctgagtggatggagccacaggcatgtgccaccagaccggcttttctgttttttaatttaatttaactttttttttttttttgtagagacagggtctcactatgttacccaggctggtctcaaactcctgggctcaagtgatcctcctgccttggcctcccaaagtgcatgagccagtgcacccagcctcagaatatttttaaagatgaaaacctaatgctcagttaaasttttataagatctatgtgcttctaaataagtgtaaagatgactattttctggatgttgtattggtggggaagatggagagatagaagaacaagtgtttattctctggttgtattttctctctctctctcttttttttttttccttgagttagagtcttgcactgttgcctggactggagtgcaatggcgtgatctaggctcactgcaaccttctcctcccaggttcaagcaattctcctgcctcagcttcccaagcagctgggattacaggcgcctgccaccacgcctggctaattttttgtatttttagtagagacagggtttcactatgttggccaggctggtctcgaactcctgacctcgtaatctgcccaccttggcccgccaaagtgttgggattacaggcgtaagccactgtgcccgacctctggttgtattttcaaaatatatccaaataatattttaaaaatgtatttagtgagcactagattccaaaatagcaagagcaatttcagcaaagtataattcctagagaggaatcctacagtacctcgttttgccttttttgttctctaggtcatgtcaggatgggagcataactgacctggccctagttcctaggaggagcatgtgccctctaacatgtgcacagaaggataatagggtcagtgggatgaggagaccaagtgactaaagcagatstgagaatctgagctgtaaaggatttggaggtgggatggagggataaaaccttagtgggaagcagacagcagatagagaagatataggataaactcacggaaggtgtaagcaggttcatgattttaaaattagcctrttaagaggttgtgttggaggtctgttttcttagtgggggcaaagtggcaagggaagtttcacttctgaatagggtggaaaatgaagatataaggaaagaaagagagaaagaggaaagacgtattaggcagtgtgaggcagagaaagagaagagtgggagaaggaggggagtcagactttccttggctggaggcaaactgaccaatgcccgttgctgcccctttccaccgcagggttcatttggtgaaacctggttgkactgaacctttaggagarccttgaagtaaaaaagaaatcccagacaggtcagtggcggatgtaaatgtttaaggaagaacagacagtcagctgtagaaatggagggaggggtagagctgactggagagcgatttatggatggtatatttcatgaggcttgagtcttttttagcactaatagttggcrtcagcttcacctgttgcctccatgagtcatgccctggtagcagaggatggtgggccaactgccaagccatcccctgaaggaccggctgcctgggagtgaggaaaggtggttgatgggctctgagacagcaaggtacaaactgaaatggggtgaaaagagactgtcaaaataagtatgggctgatttgttctaatatatcataggttattattagatgctggaagagtaaaatggaatagaagatgaaaaatgtgaacctttatcttgattccattttaaatctcctaaattctgaggagctttgcaattcctcttctggatataaatctgccctacagtagagttgcaaccttggataaataaataaatttggcctccctgagcctctgttttccctgtaaatsaggactaacataatctacctcaaaggattgtgttgaaaattaagtgaaaacttacataaattatgtagtgtggtggggacatatgataggtactgtggcctatccttaggagggatgaggaatggaactatttttaaacrtaaaaggtcaactttatatgctgccatataagtaacccagtgcaattggagcttgaatcaacagggctgggagaaagcttacagagtgtgcctttgaaatcccaatacccagtcatggtgatttatgagaccttaccagcttgcatatgtgatggcccactgagtttgtttactttagttttagctcagttacccagcactctatgatagcctattttttatttacactctcactaactcctttattatgatttctttgaaagaatatgaagacagccataaaaaagactcttattgaagttgagagggtctcctgtaggycttcacttcactgtgtctaaacattggtctgttgcttgtgctttgcttttctctcaccctggatgaccttcaaggctcttccaaatgatttctctgattccctgaaatactgaaattgtgattaacagaagtttcaagtgttaatcaatatcaagatagtagttgtctcttcctggggaaactagaaatgaaaaccaaacataggcctctgtaatcattgcacagattaaaaatgaaaatgcagctgagaaacagaggaatgaatgagaaaaccctaaacctagttctagccccaggatgaggtctttgtcatgagtctgacgctagccacagccggtaagagaaggaattccctagtagtgtagttgttacaagggaatgagtcattttgcaggtaattgttcttcttccattttccacttgctgtcagccactttacagaggagtcggactttgttctgcttaagagaagtctctttccttttattgtttaaaaaaaaaaaaaaattccagaagcccttagaaagagatttgtgagatcaactggtttaccttcttcattcagatgaagtaacaaagcacagaaaagttattttgtcaaggtttctgtcttgtagcaaatacaaactttctggtgttaaacatatgaccctgatttgggtcttkactgacatcatcacttttttttttttaattttctgagacggagtcttgctctgttgcccaagctggagtgcagtagcacaatctcggctcactgccacctccacctcctggattcaagtgattctcctgcctcagcctcctgagtagtgggtataacaggtgcatgaccacrcccagctgttttttgtgtttttagtagagatggggtttcaccatgttggccaggctggtctcaaactcctggcctcaagtgatctgcccacctcagctttccaaagtgctrggattacaggtgtgagtcaccacacccggccaacatcatcacttttgaatgaawtttttagtttggtgatgactttattatttgtatttgatccttgtccatttttctctagatctggtactaatttcatgtggaaaataaatcrttaggaggttttcattttgtacgttttggctgcaaacaaccacaacccagtctttaggttttcactgagggatttttgttttagcccaattattgtatgacatgtatctgctccaraggttcttataggtgaaatgagatttttatgtatctgtattcaaacacatagatagatagatagatagatagatagatagatadatagcgaaacatatagacatacctctgaaaatacaaccagccatataatgtaagcctgtygtgtgttaatgaatgatagggtaataatacattatgttcctgtcctgtagaggagttcgagtattcaatacagaggaccagaatgattggtcccagaaaaagtgctccttaagctggatcttgaatactgaggatttatataggcatctaatagggaagaggtggtattccaggggctggataaggcagggtaggatgggrtattcatgtggattcgctttattrtatgtttgctggagaggagggtagtgggcattctggaggagtgagcctctctggaacagaggatgtgattataggaccagtggcaggtgtgagaaatgtagattgaggccatactgcagactgtcttaaatgccaggtcaagccatttgcacattgtcctataattcatgaagaacccttacatttgactataaggaaaatattatgaagaaactaaaataaggtgactttagaaggttatatctggtggtagtgtgcaggatagattatatcaaggggaaattgtactgaaagcaagaagaaaccgttagggaattaggtgtaagagtgataagggcctgaaataggatagtgatgaaaagagaggaatgagtaggagaaagattgcacagagaagggtgacagcatacataagacttggcaggaccacagccagaagaaagcatgaaattctaaacctgaataatggacagaattatagttggaaaatcatgaagagaagccagttgggtattgggggagggctggacaatatgacagttaagtttttagacatataatttaggtaaggctatgtatctaagcggaaatgccctataagctttcagttgtcaggactggatttctggttaaaaaaaaaaaaaaaaagagggggcaggattttacttgggtgttgtctgcaaagttgatagctaagaccttaaggctcatctgtgaaacgggagtgacagtgctcattaaaggttattattagaaataaatgaagtaattccaggagagtacataggactctccttgacacatagtagaccctcaataaacattaggttttattattgtttattatgggttttagggaacaacacttttktgaattattaraaccttatttgggaagctataaaagccatctgcgtgatgtgttttcttagtacaccaaatggaagttcatatgttccattcatatacatgcttccctagctgttaggggaaggtgatagcgcatgtttaactgttgatcactgtttgtaaggcttttcgtgttttttacatatttggttaaggatcttaatccttgagcygtattttgttctcatttgtttgtgtccagagtcaaattaagtttaaggaatttataaagagcttctttgcaagaatgatattaactcaatgtaytaaagctacattcacccaaagtgtaatagacttacacaacatggaagaaatccaggagaggcagacagttattcatgaagagtggtagtattcctgtctgcctgtctgtacatttgtcagatcagtgcattctgagaaaattatgccaatttgaaatctccaaaagcattctcagccagtatccgtgattctgatagtttacaaactgttgatagcataagctgttaggaagatattgtagaaattttaatgcagctgttttaattagattgctttccttataacaagtttcagtgtttctggtcacaatacaatttattagctcctgacacatgacactgctggatcaccaaccttaactctgattctctccatacaacccagtatccttaagtaaaatgctgcatatttcattgctggtaagagaggcagggccaagattcgaactcacatgaagccaactagagaagcctatgctctacactattttacatctcataattctcatacactactaacctgttgcaaatgaaaaagaagtcttmttattgtaccacttttaattgcacttattattgccttcagtaaagtcttcatttctaaaatgtcttagtaaaacagtaatttcataaaaatattgccaactaggagtactaaattctaattttggttatattatgyggccttggataaggaagtttcttaggctttcatattccaaattattggactattctaaaaacatttttaatattttgatggatgtagtctattctaatataatgtctttcaagtgtttgaaagttactacttattcaaaactcaactgtctggcagcttttcttatcctgaactctgtgaagaacttcggggacaggaggtaaaatgtctttgaagagtaagaaatccaaaacttcatgtatttacatgttctggtcttgtctcataggattcttctttctccttacataccctcctttaaatccgtacctcccccggtcttctccatcttgcaaatggcaccaatgtccatcctagacattgatcatcccagaagtctaggagttgattcttctcatttcttcagttctgttgtgcaagtcttcaagtcttgtcagttttgcctcaagcacttttacaaactatcctctacagagacagctttacaaaatgtaaatcacatcctatcattccctgctcagaaccttctaatggtatcctcacaccctctggaaggctcataccctcaggacccacgtgatgttgccttgacttgcctcggctctcattccgtagacctgtcctccctcagactggctgtgttactcagcctttgttgagagtgctgtgccccaaatctggttggcttattctaggcattcgagtctcttcccaaataccaccttctcaagtgcagcttttccttactacttaattttatagtcccccatcaatgtacgatgttaccctcttttccttcattgagagtgtttgtaatttttttttgtctgcttrtttattgtctttttgccccataagtccaaggtttacatgaacagggaacttgtctgttttgtttattactgtatcccctatgctggcacatactatgtaataagtgtttgttgagtgcrtgagtgaataaccattctaaaaaactctgatgtttaaagccctttgctttatataagaattttacttggaaccctggtattttygtttgtatttgtttgttaataaatgtcaagagttcagtagtaagataggtttcrgaaatgctaagttaaacagaataaagaaagaatatgtattacaggtcctggcagagccttgaatatgctaacatttgacagtgggagtctttgagaattatcacatgaagctgctgtacattacaacacattctaggaaatgctgtcttagacaaaaacctgtcatattagaattggggtaaggggcacgatactgacygtgaggcagcagattcctatggactayattaaaaaaaaaaaaaaaaaaaaagaacagactgataatctagggctcagaaaaaaaaaaaaactrtgatatgaaacagtggcaaaaggattcaaaaagaatacagcggttgggactatctacttttttaawttttttattacactttaagttctagggtacatgtgcacaatgtgcaggtttgttacatatgtatacatgtgccatgttggtgtgctgcacccattaactcgtcatttacattaggtatatctcctaatgctatccctcccactcccctcaccccacaacaggccccagtgtgtgatgttcccccatcctgtgtccaagtgttctcattgttcaattcccacctatgagtgagaacatgcggtgtttggttttctgtccttgcaacagtttgctcagaatgatggyttccagtttcatccatgtccctacaaaggacatgatgaactcatccttttttatggctgcatagtattccatggtgtgtatgtgccacattttcttaatccagtctatcattggtggacatttgggttggttccaagtctttgctatcctgaatagtgctgcartaaacatacatgtgmatgtgtctttatagcagcatgatttataatcctttggrtatatatccagtaatgggatggctgggtcaaatggtatttctagttctagaccyttgaggaattgccacactgtcttccacaatggttgaactactttacagtcccaccaacagtgtaaaagtgttcctatttcttcacatcctctccagcacctgttgtttcctgactttttaatgattgccattctaactggtgtgagatggtatctcattgtggttttgatttgcatttctctgatggccagtsatgatgagcattttttcaygygtctgttggctgcataaatgtcttcttttgagaagtgtctgttcatatacttcacccactttttgatggggttgtttgattttttcttgtaaatttgtttaagttctttgtagattctggatattagccctttgtcagatggatagatagcaaaaattttctcccattctgtaggttgcctgttcactctgatggtagtttcttttgctgtgcagaagctctttagtttaattagatcccatttgtcaattttggctcttgttgccattgcttttggtgtttcagacatgaagtccttgcccatgcctatgtcctgaatggtattgcttaggttttcttctagggtttttatggttttaggactaacatgtaagtctttaatccgtcttgaattaatttttgtataaagtgtaaggaagggatccagtttcagctttctacatatggctagccagttttcccagcaccatttattmaatagggaatcctttccccatttcttgtttttgtcaggtttgtcaaagatcagatggttgtagacatgtggtattatttctgagggctctrttctgttccattggyctatatctctgttcttgtaccagtaccatgctattttggttactgtagccttgtagtatagtttgaagtcaggtagcatgatgcctccagctttgttctttttgcttaggattgtcttggcaatgygggctcttttttggttccatatraactttaaagtagtttttccaattctgtgaagaaagtcattggtagattgatggggatggcattgaatctataaattaccttgggcagtatggccattttcatgatattgattcttcctatctataagctttgtgtcctcttttattttgttgagcagtggtttgtaattctccctgaaaaggtccttcacatcccttgtaagttggattccttggtattttattctctttgaagtaattgtgaatgggtgttcactcatgatttggctgtttgtctgttattggtgtataggaatgcttgtgwtttttgcacattggttttgtatcttgagactttgctgaagttgtttatmagcttaaggagattttgggctgagatgatggggttttctaaatatataatcatgtcatctgcaaacagggacaatttgacttcctcttttcctaattgaataccctttrtttctttctcctgcctgattgccctggccagaactttcaacactatgttgaataggagyggtgagagaaggcatccctgtcttgtgccagtgttcaaagggaatgcttccagtttttgcccattcagtatgatattggctgtgggtttgtcataaatagctcttactattttgagatacatcccatcaataccgaatttattgagagtttttagcatgaagtcctgttgaattttgtcaaaggccttttctgcatctattgagataatcatgtggtttttgtctttggttctgtttatatgatggattacgtttattgatttgcatatgttgaagcagccttgcatcccagggatgaagcccacttgattagggtggacaagctttttgatgtgctgctggatttggtttgccagtattttattaaggatttttgcatcgatgttcatcatggatgttggtctaaaattctcttttttttgttgtgtctccrccaggcattggtatcaggatgatgctggcctcatcaaatgagttagggaggattccctctttttctattgattggaatagtttcagaaggaatgttaccaactcctctttgtacctctggtagaattcagctgtgaatctgtctggtcctggactttttttggttggtaggctcttaattattgccttaatttcagaacctgttattggtctattcagggattcaacttcttcctgatttagtcttgggagggtgcatgtgtccaggaatttatccatttcttctagattttctagtttatttgtgtagaggtgtwattctctgatggtagtttgtatctctgggggattggtggtgrtatcccctttatcattttttattgcatctatttgattcttctctcatttcttctttattagtcttgctagtggtctatcaattttgttgatcttttcaaaaaaccagctcctggactcattgatttttttgaaggtttttttgtgtctctatctccttcagttctgctctgatcttagttatttcttgccttctgctagmttttgaatgtatttgctcttgcttttctagttcktttaattgtgatgttagggtgtcaattttagatctttcctgctttctcttgtgggcacttagtgctataaatttccctctacacactgctttaaatgtgtcacagagattctagtatgttgtgtctttgttctcattggtttcaaagaacatctttatttctgccttcatcgcattatgtacccagtagtcattcaggagcaggttgttcagtttccatgtagttgagtggttttgaatgagtttcttaatcccaacttctactttgcactgtggtctgagagamartttgttataatttctgttctattacatttgctgaggagtgctttacttccaactatgtggtcagttttggaataactgtgatgtggtgctgagaagaatgtatgttctgttgatttggggtggagagttctgtagatgtctattaggtccgcttgttgcagagctgagttcaattcctggatatccttgttaattttctgtctcgttgatctgtctaatgttgacagtggggtgttaaagtctcccattattattgtgtagaagtctaagtctcttagtaggtctctaaggacttgctttatgaatctgggtgctcctgtattgggtgcatatatatttaggatagttagctcttcttgttgaattgatccctttaccattttgtaatggccttctttgtctcttctgatctttgttggtttaaagtctgttttatcagagactaggattgcaacccctgcttttttttgttttctatttgcttggtagatcttcctccatccctttattttgagcctatgtgtctctctgcatgtgagatgggtctcctgaatacagcgcactgatgggtcttgactctttatccaatttgctagtctgtgttttttaatyggaacatttagcccatttacatataaggttaatattgttatgtgggaatttgatcctgtctttatgatgttagctggttattttgcccattagttgatgcagtttcttcctagccttgatggtctttacaatttggcatgtttttgcagtrgctggtactggttgttcctttccatgtttagtgcttccttcaggagctcttgtaaggcaggcctggtggtgacaaaatctcagcatttgcttgtctgtaaaggattttatttctccttcacctgtgaagcttagtttggctgggtatgaaattctgagttgaaaattctttyctttaagaatrttgaatattggcccccactctcttctggcttatagagtttctgctgagagatcagctgtaagtctgatgggcttccctttgtgggtaacccgacctttctctctggctgcccttaacattttttccttcatttcaastttggtgaatctgacaattatgtgtcttggagttgctcttcttgaggagtatcttcgtggcattctctgtatttctggaatttgaatgttggcctgccttgctaggttggggaatttctcctggataatatcctgcagaktgttttccaacttggttccattctcccatcactttcaggtacaccaatcagatgtagatttggtcttttcacatagtcccatatttcttggaggctttgttcatttatttttactcttttttctctaaacttctcttcttgcttcatttcattcatttcattcatttcatcttcaatcactgataccctttcttccagttgatggaattggctactgaaacttgtgaatgcatcatgtagttctcatgccatggttttcagctccatcaggtcatttaaggtcttctctatgctggttattctagttagccatttgtctaatcttttttcaaggtttttagcttctttgcgatgggtttgaacatcctcctttasctcggaaaagtttattacccatcgtctgaagccttcttctctcagcttgtcaaagtcattctctgtccagctttgttccgttgctggtgaggagctgcattcctttggaggagaagaggagctctgatttttagaactttcagcttttctgctctggtttctccccatctttgtggttttatctacctttggtctttgatgatggtgacgtacatatggggttttggtgtggatgccctttctgtttgttagttttccttytaacagtcaggaccctcagctgtgggtctgttcgagtttgctggaggtccactccagaccctgtttgcctgggtatcaccagcagaggctgccgaaccgcaaatattgcagaacggcaaatgtagctacctgatccttcctctggaagcttcatctcagaggggcatctggctgtatgaggtgtcagttggcccctactgggaggtgcctcccagttaggctactcgggggtcagggacccgcttgaggaagcagtgtgtccattctcagatctcaaacttcatgctgggagatccactactcttttcaaagctcagttggaaatgcagaaatcacccgtcttctgcatcactcatgctgggagcagtagactggagctgttcctatttggccatcttggaacctcccccagctatacctactttattggatttttgtgtctccatcagctgacatggtacttacagcctagaatgagcatacaaaggatactcattygctattcgatgatgactgacaaacagtctcccaggatcaccatgaaataactaaactgagtttgatttatttaaaaatcaggtccaggtaacaaactgcacctgtccccttgaattgatacaaataaaaataaaacaaaaaaggacaatattttactttatggaactttttattacaaagaattaaaaaaaaataaaataataatacttaaaagaatactttgactattattttatcacctaaagscttytcttattattttatttttggagacagaatctctgtcaccccggctggagtgcagtggcgcgatctcagctcactgcaacttctgcctcccgggctcaagcaattctcctgcctcagcctcccgagtagctgggattacatgagtgcaccacmacaccctgctaattttttgtatttttagtagagacagggtttcaccatattgccgaggctgatctcaaactcctgagctcaggcaatctgcctgcctcggcctcctaaagtgctaggattacaggcatgagccacagcgccctgccaacctaaaggcttttcacaactgggaattcactgaatgttgtatcattaaagctaatgtggaccttggataamtgtatgcctrttttctgggaaataatggtggagctctttgaaagggtaaaaatggtgttttatcatacataactatgcctgaggtttttgttttgcatttatctttgggcaaagttgtaaagttaagcaaatctggaattgaaataatttgataacatcagctaatatttttcaaagttagatttttgaggtataatttacataagagttactctttytagaggtatagttgaatgcattttcacaaatgtgtacaattggataaccaccaccataatctagatatataggtaatgtgtaattataatatatatgtactatataatataggatatttataccacccaaaaagttttctcttgctttttatagtcattccccaaaccccaygtccagtgctgattgtccctatrgttttgccttgccagaatgaataatacattaaagatatagccttttgtgaatggcttctttcacttacaatacttttgagttttgagttgaattataagtttcacttataatacattttgtgttattgcatctattrgtaatttgtttcattttattgctttttagtatttcatttttttccagtatgtcattttatggacacaatttgtttacccattcaccagttgactgatatctgaactgtttctgggtttctgctatagagagttgctataaacattttcatataggtctttatatagacatatgttttcatttctcatgggtagatacttagaagtaggattgctgggtcatatggtcactctactttttaactttataagaaactgtcaaacctttttccaaagtttctataccattttgcattctcactagcaatgtatgagaatttaatttgctctgcatccaggccagcattttgtattgtttgtattttgtattttatacattctagtaagtatgtartgtggcatctcactgtggttttactttttgtttccctaatgtctaatgatggtcrtggatcttttcacatgcttattgatctttttgattcttatgaagtgtttgtttgttcaaatcttttgaccatcttttcactggattgtcctcttattgtgttgtaaagattttttaaaaaataatttctggatacaagtcctttatttgatatgcattttgtacatattcccttctcaagtctgtggcttgttgttctgttttcttaacagtttttttcaaagagaaatttggtaaagtccagtataccattttttattttatgcttcatgcttttgtggtttaagaaatctttgcctaacgcaagatcacaactactttctactgtgttttcttctagaagttctttagttttagattttacatttagttctatgattcatttcaagtagatgttagtgtggtgcaggataaaggttgaagtttcttgttttatgagtggatgctcaattgttcaagcattctttgttgaaaagaatatcatttctcttttatagctcaaattttattacttaaaattattttaagatgcacatattaaagtgatatgtgtaaaagattatatatttctggaagcatgcctatttacactagttattattactttaggagacagatattctctttgtttaaattgtttccacaaagcataccacgaagtacagaggggacattagtaactattttatgatgattatggtattcatttaggccaatttaagtgaattggagatcctaattttctctataaggagacaatactttttcatacaagattatttttgtggaggcttcatttatgtgaagtttttgcacccatttattgtcatgattattcttcagtgaaacaaaagtctgtagtagatatgctgctgctgctggttttaggtaaattgactaaatagttatacaaaactctgtctctaccatatatgaattcaaactgtatcaacaattacagaatactatgctaacatctaataagagagttagcccatgtagaagagaaatataaatacagctatcagatcagtctcatgttatttcagcttcaaggagcctcttagcaaaaatggtttcctttctccatacatgttgcaggtgtttactattttaaatgagacttttttgttaaaaaaaaattaaaataagatcatttagagaacgattctcagcttgttcagatgattatttggttttaaaaaagcagcctggagttcctcttaatctcaaatctccataaaacttacaagagatgttttcatttactgaaaggaatagttttttcttaatcaaatgtagagccattatcactagagggcagtaaatacaaacagatttagtggatttactggcactaacgatgttttcagaatactagcattaatcaaagaaagtatagtttttataatatgaaaatacatgtaacattctgttatgtaaaatattggttatgaatcaattctagattattgtctgcctctaaaatatttttaaggcatttgaaagcaaagggaggctgagaaacactagttttctgtggctattctgtttaatacttgaagtttaactttgcctcagaattcttcaagggacatttaaaaattagatttgcatttgttcaagctgaacagtactggatatatgagagaccacgttatatagatttgcttcttgattaataactaccacgacttttaattttaaggtgaaaggtgtaaaataaatgtagattgattataggataaaatattttccaataatgtaagtcctactgcaaacagtgctactgcctggaaaactccttatgttggagaggtcyaagagctaatacacttattttaaacaatatttcttaaatatttcaaacacagtaatataatatacagcttagaattgattatattaacggatctattatgtaggctctaggctaaatataaaataatgcctgaaatagttttctttttttggcaatttagagtactctgaaaccagacagtctgggttcaaatcctggccctgttacttactactggctttgtgaccttgagcaagacaacttgacctctctgagccttagtttccccataatttagttttgtttttccctattcaaaaatgcatcttttctctcttgacctctgttacaaagtcaataatgacagcatgtgttaatgtatcagcagttcarctccatcagcagaatttcaaatatcctgaaatgtactgaaatagttcaaaaagattgttaattgcttgggtatcyggtaaggactgagaaaacaaggaatagcagggaagtggcctctagaaattctgagggstatttctaggaaaagtctgaaaaagagaactaactgaacattatgggaattttttttttcttttttgagacaaggtcttgctctgtcatccaggctggagtacagtggtgcaatcatagctcactgcagccttaaactcctggcctcaagccatcctcccacctcagcacctcccacctcccacctcagtagtatctggaactacaagcacatgccaccacacctggctaatttttaaattttttgtagagacggtggtttctctatgttgcccaggctggtctcgacctcctggcctcaagcaatcctcccgcattggcctcccaaaatgttgggattacaggcatgaggcacttcaccaggccaagaaactattttttctatttcaacaaacacacttgcatatatgtatataaaatcatttgggcatttgagagcagtggattacagataagaaacctgagctctagctgtaacgctgtccctcaagttgtgttgtcagaacttttctggacctcagttccttgtctgaatgtgtcgtcatcattacatctgcatatgagggcagctgtgtgttgttcacatagcgctcccaaacataagcgtgtctcactatatggcagggctgtctgcctgtgggcacctgcttcctcaccctgtccagagatctgaccatggtgatagtaaccaygattctttaattcaaggcactgtaaagttagcaaaaagattgaggataaacaaatccactcctagattcatactgtttatcatagagtttgcatcagcctaattatatgatgagctgtcatacaccattaagagcaaggactgggtttgcatttcaatcctgtcacctatggmgcaagttattgaatatgtaagaaggtccatcttttcatgttaaaatagggataatatttatcttatcagaatgttgccaagattagaaatgaggtatgtaaagttctttgtgcatagtaggtgcctagtaaatgttgtaacttattaaagtttcttcattaaatttggtgaagccaagtctgactataagaattgtatctctctggctctattcaaatttctcttctaaattatctagattctctctgcagatagcagctaccgtggcaataggaaggagattctagtctcctagaaatggagattagggaaaatgaaatgaattttaatttggctcagagatttttgaaaagatttcttattccctagaaatatggaaactttccttggtactttttactcaatatgattaaataatctcccttattgcagcaaattagggacttatttgaataagttaaatcctttcacatccagcacctattagaatgcctggcacataatagttgccaaatagaagtctgttgaatgaagggaccatcactcacattcagcagggagaagaggctgcagattttagagggaagggaaactgtatgtgtgtttctgcataatgttttaagacaaggagtattatctactatatgtaatctgttttaaatgtttttgatgattttgctgagggtgaaaacccttgtcctttcctgtcacctataatcagtataaaaatattgatgttttgcatctgcatcagccaacaatctttttgtggcaatagtacactaccttgagaaatacagggacataataagatacttttctggcctcaaagatcctccaccctggatgaggagtcaaagttgaagacagttgaaaaaaatagaacagtgattcttaacactggggaacattcagraaatttcaggggacagtgactggggagtactcctggtgcttggtgrgcagaggccagggaggctagatgtcctgggatacatgggacagcctttcaccagggaggtttgctgtgtgtcccacacaacttccaaaaagtcccagcagctattcacataggtgaaaaaacaaaatgcatttataattctctgagcctagaacccaactactttttacgtataagtattaaatatttttacatggttttaatccacaccaaattttctagtaatgcagcaatagtgtatattgtgaagrtggcactttgttacatttgaaacctttcaaagaatcattcatcatwtcaggaaaaaggaaaattyttctaacataacacccctgtattcattttcatgctactgttacttttgtggtaattctccccataagagaaatcatagcaaacccttagatagcacttactgttctaagagccttatgtatatgcactaatttaatcctcacaacaaccctgtaaggtagaaactattattctcattttccatgtgagtaaactgaagtatgggaaatttaaatagcttccccaaggtcacacagctaatcagttatagtagtttttgactactttttaaaatgtagttgtgtacaagtatttatattttgtagtatttgatagaaattactcatttctcctttatttcactgataagccattatactgattttttttttwaatctatgtagggagtatttagcctatatgtattcagtacagtattatgaaggaagtgtatttaggaatttcatttcaggatgaatacttgttataaaaagtaaaaagtaactgagtcttaagtttgtcaaagaataaaattgatggatggatggatttttttttttttaaaggagggggaaggcagtgagcctgactgcagagtgtaatttgcatttaaatgacaagtggtatgacacttccacctgttcttcagggagcctcaccaagtatgttttgcctcgaggcctttgcttttgccattcctcacttggttttcccttctctaccctacctctcaccccgcaatccacatggcttgtttcctttcttcagatctcctggtatacgtcatctcatcagaggggctttccatgatcaccttatagcaacctctatccgtaatccttatcccttctttctctccattgtgcttatcaccccatgacgtattatgtatttattaacttagttttggaatataagctgcaggtgagaaagctttgtttctctttctcaggcagtgcctgacatagrgtagragcttaataaatattgaatgaaggggcagatgtagaatcgttagaatttggaaaaaggctggaatatttggtcctaagatgtactttgaatgatttaaatctgactgagaaaaccagtttgaggttggcagagtagaagaaggagggtattttaggccgagaatttggtaagacagagatgggattgtcagctgtatggtgaagrtggaggartactagtctttcaggaacagagcaaatgtaatagagcagctgaaaataggcttggcgytggggattaaggtcagatatggcagtctggaatttacagagggatgtgatgaagcaggcattactagctttgaagtaacaggctgcggctggatttgaggaaaattgatctggcagtagaggtcaatatgagactagaaggggaaaagccaggggcaagaagatgagctaagaagcaattacagcattttggccctgagacatggagtgctgtgatgcaattgaaaggaaatataacatatatattttaaaaacaaatgacaaaccagagaatttttttaaatattagtataatagaatgattatcataatgatcattgtcactgtcatctttactgtctgatacctacttatcttcaactttgtaccatttgttgttttaagtgctttgcatatatggtctcatttaatcctcatatrtatctgttctggttatttattgctatgtaagaaatcacttcaaacctaatactttgaaatatgaatgtatttttattagttttcatggctttgtgggttaactggtcttggctagacattcttgcttggcattcctcatatggttgcagcccagtgggtagctatctgaaagctgaactggctggatggctargatggcttcttgcccctcargtctggctctgggctggggtggctggcattgctgaagactggccaggcatgtgtgctctttcttgtgcaagtgctctcttgcgctttctctcttcactgtctgtgaagttaacatggayttcttgtagcatagcctctcagagtagtcagacctttttttttttcaacctaatggcttaggggtcccaatagcacattcaaagaaagcaggatgagagctgcaagatttcttatgacttagcctcagcagtcatgcaccatcacttgttggttacacaagccaactcagattcagtgtaggacagtgtggctcattaagagtatctttggagactagctgccacagtaatccactttacagatgaggaagctgacacacwaaaaagattatttgtcagtgattgtgcacaaaagatttaaacttgcaattcttkttctcagtaccagagtgaacctgggaaaatcattttttctctctaggtctcaactttatgtggaaatgagggagttagagggggtgatattaaagttactttctatttctctcagtcttttaaatatttggattcagattacgggaggggtaatggtaaggaayaaactgaaagaaacagctctggataaaagatagggcttgctaacaaagttgaatgaaggagggaaggtgatgccgtataggggaacatgccgggttactcaaggattcagctagatggtttatattaaacacctgacagtgtctgacgcacatgaaacacctgttgaatggtaggaaagagtcatagattccatctgagatactggaagaaatataggctcactgactgaaatggaagtaattatactaagaactactttaaatagaaaaatgtctcacagttttgaaaaagtttgtcgtgactagcagggcattcgagaggagaatcttgtattcagaaatatggcactgaagttcaagttagaagtggtcattgaagattgtgggcctagggaaaattaaagaagttcaggatcctgggagttgagggagagtagtaggaatgatcaaacatgtggaacacttcagagaartagggagaccagagaaaaggaggaccttagtattcctctgggggtagctttagtggaatgttggagctttaatttcttccttttgtagaggagtaagagtgatggaaatgaatacaacagatgttaacaaaagcagaggactgtagcagctaaaggccaatagaaactcagagagacacagtgttacaggagtgcttatcagagagcatgctctctaagacagacatgccacatgtggaaatagttaaatgtcaggaagactgcagagtagccataccagcaagttaaagcacagagtagtaagcacaggctttgagatggagaggaggtaaaatgcacagaattatatgcyaaaatcaactaaaacctagtttttccttgtttctcacccacaagacctctttagtattaaagttacagggtaatactacaccaaaccaaatagaaaatgctgtttttctagaaagaactttgatttctcatttaaccctcctcgtaaaatgtctgattactcttgagctcaattctggattcctaagagccactcattcytttcttaactttgtgtacagttattaaaatgttctgttctggctgggcacgttggctcacacctgtaatcccagcactttgggaggctgaggtgggcagatcccctgaggtcaggagtttgagaccagcctggccaacatggtgaaatcccgtctctgctaaaaatacaaaaattagccaggcgtggtggtgggcgcctgtaatcccagcttctcgggaggctgaggcaggagaatcgcttgaacccgggaggcagaggtgacagtgagccaagatcgcactactgcactctagcctgggcgacagcgagactctgtctctaaataaataaataaaatattctcttctgatcaaaatacagatcctgagttctatatacaaaacactgcattccttatgcatacacagtgccctagctttcacatttccctccccccagaattgcaagtggtcccacccctagattttgaaggttttagaactctgtcatacataacaatagaaacaaaaggagctgagagcagccatgscacacaggtgagggaatgtgtcattgccatctgtgccatctgtgaattctggacattagtcgtattgtttaatccctatgcttttatgttggatgaggggagaactacagtcatttctacatcaccagggagccacttgttttggatttgagagagggaagcaattaaaatgctcgattgccatttttggagcagtttttatttggaaggaagggaagccagaggacattaaaattcatagaaaatgccctccaaaaggatgggcaattcttaagaatgaactacgaattttgaggagttttatggtcattattcatcactgcaagagggaagccccgttcatcttttctcagggtggcctcagagctgcagggataccattattcaatggcgtttgtcgggtgaggagaaagcctccccagaggctggcccttgccaaccaatcccaaagcagcctgcaccgaggccacaccccctcgccttataggctaagagctggaatgcaattggtgcagagttggggttttatgggaggggcttcttgtcactcttcccggcttccctgcagttccttatttggtagcttttgacaggactagcctttcttgcaactaagcatcttgacatacattattcattaagccctggagctcgggagagaaagatgcagacccttagatctttagatattcctttatcacgtggattttctttattcagaatagttgctgaattttgtgccattctggagtcttacaaatggcatgtattcgatgggaagacggctggatgggatttaatgcgaggctttcttatgtatacttaattaccaaaaatctttaaaaactcatactctgcgtggcttgtggaggttgttaaagtgtcgagattttgaagctaaatacattttagagcttactatatatatacatatmtatatatatwcatataatcaatcaaaaatgcctgaagcaaactatttactgtcagtgtcttggggctacataaaggtaagacttacttagcttttgaaaactccttactctgattacaaaattatttagaaagcttagactctactgtaatttgttcaaactatcagttatgtattctttccttacacatgaactaggaagaaatacgtgttaatagtggtcaagataagattgtataactttcatcagttgtagtttgagtgttaaaatagcttttttagatacgcagtagttcttctgtttgtcatgtggtatatgtttgaattgtgcttgaaaaatatatggtaattaaatacattcattgcaaataaattatygggccaaattacttatactgatttatggattccagttagtatgttgcacataaagtttataaaattaatttgtggctgtttcyaaaaatctatactactttaacctgacgaggaatacgtttttttcacctttagctataaagccctaggtgacattaaaaattgacattacttaactatgtaagtgataytaaagtgaaaacttgattgtctattatacttgcaaaactgaacaaagtttttattacactgttttgtgaatctcaagaaatgaattaataaacaattcaataagattgtgtccatgcttggcaggctttttscatgccctgtggtaacattagcattgtgatcctgtctccacaatagaaggaggtagaaaaaccttattcagtcctaaatgaaacatcacttcacagatttttggtatttgagccactcgcttgaacctgggagccaatcacaacacattttaaaagattcattttctgttactctgaggatttttcagattggagtgttygtcgtttgctttgtttctttctttttgaaggacaagttcccctttgttttagagatttacttgaattctaaaaaaattagaaaacttatttcagtcttggttrtccaagtagtcatgattccttacctcccyttaaatctgtggatgattcagatttttaaaaatgtttttwaaatatatagacttccattatttgaattttgttagccatttcttggctaaaaatcttcagaaatgcagaaaagtatagagagtaaatataagaagccctcattatccgccagaattcagctcctagcttttagccagctcacaactgatgttatttttgaagggcttcacatttgtactgtgattatgaaccatttgtactatgattatgaacaatattgccaagaatctacatatagaattttagtacgtttctttttgaggaaaatttttcctggacagctttatgtttaatactgtacctttaaaaacatgtaaaaatagcaaatatagatatatttggtcttatgcattttgaaggttttatttttataccatcaatggagtatttgtttaaataactttgaatactgatatctaccaaacttgtaatgcatcacagtgcagcatattcaaatgatttttagcagaatattgtcaggaaaaaataagaaaattttcttactattggacccataccacctccttaaatatatattgggaggatatataatatacccagtagcacactggcgtgatgtagaagtaaaggagattacatttaaggacattttgttttattattttagtttgcttcctgaacaatcttaaatgcstaatgtaaattgaagaattgcagttctgaaaagcaaaatacagtattgagattcaactgcatttttactttcctttatgccttaactgctgtacacagacattctgatgtataatgagaacaaaggattcaaaagcattcacttagaaatcctcccctgtttttttagttgcaaccctaaatctgtgtattgttttcagactacttaggccaaaaacaattagaaattcatcaatggaaaatatttagaggtcacttaaaaaaataaactaaatgcttaaatggttctgcattttacaatcggttcgtttcaaacagcagtttaatgttttgtcccttctaaatatattaattgagaaatatgatgggatttcccagaagaatacattgtattagctttaaatcagtccttccccctttggtaattttatgtagttatcttagtaaatattatataattatttttagatgagagaagtatcacatttttaaatgtttgttgaatgatctagtgcatttttttagtacatctagctatgcactccaaaaccaatttgtgagatcaactaccagttgagaaagcacttatggtaatttttgtggttattcatttagctttgctggaytgaaacttttatatggatagcaaaaaaggaaaacaatgttaattccttttagaaaatacccttgtgttataacttaatgtacgcttcagaattatctttaggaaattccttakacygtcttcctagagtagagaagtaattgcttcaaatattgtcttttataattatgttaaaatgaaatgttgacttccttggagtcccttataagccttggtagggaggtgggcatgtgatggaggatttctccaatccatgtttttgtgttttaaacaaaggctggaaagtactctgggaataatgtatatgaccagaaagatgaacatgcaggatgtcacttatctagtctgtacaatatttagattcctttcactggcttttttcttcagttatctgtactaactggctattttggtgaattgtttaagcaaactgccaggaaaattatacttcgttctttatattcttttagaaaaatccaataatatatgtagcatatctgcaggtagcatccacatgttctctttgggcaacataatccttatactagtttgtgtacaagttagaagataaacctgtgataactgggtctctatctatctttatcaatcactcccagaaggcttcccttgttttgctttattgagagaagtgcaaggagggcagcagttcctgtatagactgctgagattctagcaatggtgaaagctttgcctcatctcctatcttttatgaaaaaaaagactttgtcatgaccaggtagttcttaatagcaacttttagctcataacatgaacaattttaggtcaaagagatatttcattgaatgtgtgtttaaaatgtttagcagactcttttctttggaatatgctttgcctaatgagtatatttttccaagtgtgaatttatctgtaaagcaaattttttttaattattatactttaagttctggtatacatgtgcagaacgtgcaggtttgttacataggtatatacatgccatggtcgtttgctgcacccatcaacctgtcatctacattaggtattttgcctaatgctgtycttcccctccctacccgctgataggccctggtgtgtgatgttcccctccctgtgtccatgtgttctcattgttcaactcccacttatgagtgagaacatgtggtgtttggttttctgttgctgtgttagtttgctgagaatgatggtttccagcttcatccatgtccctgcaaaggacgtgaactcatccctttttatggctacrtagtattccatggtatatatgtgccacattttcttaatccagtctatcactgatggacatttgggttggctccaagtcttaagcaaagagttttttaaacctgtgtatgcatgacattttagctgtgcttttgagacatagctatggtttcccatactaatgctattccaaattctttatgggatttgagaaagaggagctagctatttaagtaactatttttrtggttataactacagtcaaatccttcatctgtctgacctgcaatgataaaaatcagctattactttaaaaggcccaaaagttatggaccaagtgccagaaagtgagctgggagaaagaactcaaataatattgagcatctactatgtgccaggctaaatagaagacacttctatattagctcattaaattatatgatagcccataatttactcaagaaaatataactttgtaaagagggacagaaaaaattttgaactctattataaatgtctacaaatattcttagaaggcccaaagtttatttttttcagtaggttataagatataatgctgagtgaacacaarcagtaacctatgttctgtataccacctgatgccagttttaaaaatatgtattcacatacaagggtagaaaaaaggcataaaaggaaatttaacaaattatctgtggttatcttccagcagtggggatttacattattttcttttttttggtatagctttctacattttctatagcacatgtacattttataattagaaaggagttataaaaacatatgaacaaagaagtgaatttagtgttcctgagtttgagactaagctttctagaccagtaatttaacaaccagaatttgtactggtcatgccagttctttgtttttttgtttgtttgtttgttttttccccagcatttattttatttttattatactttaagttctagggtacatgtgggaattgaacaatgagaacacttgggcacaggaaggggaacatcacacattggggcctgttgtggggtggggggaggggggagggaaagcattaggagatayacccaatgtaaatgacgagttctttgtttttgactacgctggcatgcgaatacacatttctctcatccaacagtccattgaaatggttgagggttttttgtttgttttgataacagttaaatgcggagttaaaacttaatctagatggtctataagattgactttggaagttatttagcaaacggtatagagttaggccatcttggtatgaattatgcagagaagcaaaataattctaaataattaaatactaagaattatatttcaaacatcactaaaatatacattcaacacttaccttcatacttaaatgagaatttatggtgaaatttcaaattttaaaggctaatctgatgattagagtaaatgcatctgacttttttttgtcaagtatctaatagcagttactctatgtgtagaaaaaatacattgtttctgtatattaaggcaaatattaaaggcttattaaaaggcctcgtcgggttgttttcagagtcaaaggactctgaaatgcttaatgcttaagaaacagctgatgggggtgggagaagtgtaaaatctttgggagatttggatactggtaatgccatgtggtgttggtaggttaattccagtgtttctttcaatgaaataggcactatggcatcagtaataaaaactgtgaagtagattgttgaaaattgacctgtttcctatttagtgacttgggaaaatggtaaattttgtggatgttgagaaacaataagtgttatactcttacttgaaaaacaacttttaaaaggaaacattatacagtatttatttaaatattttacttctccatagtcctggaagagtactcaagtctattaagttttgctttggagtaaaagactaaattttgagcccttgatcagtatatatattcatttctgctaatgataaattaattgaagaaagcattccatgttttattgtatggcaacacttttatgtgctataaattagtttctctcttctctaaataactaataatacatcttaatttttaattcccttttctttgcttatttctcctgattttcccttcagcccttgggagtctaaatttgtgctggtcagtctggtggccatgagccacatgtgattatttaaattaaaagtagttaaaattaaataaaattcaaaatttggtttctcatttgcactagccacatktcaaatgcttagtaaccacctgtggctagtgactgctataattggcagcaccgattatggtgttttcccctcattgaagaaagttctgctggaaggcactgttctaaattgtcaggacaacttaaaaattctttgggcatatcttcctgtatctcagagtatgcatatatatttcacttaaaytttcctcttctattatttcattttacttttctgtttttcagtttaaaaggatgcttaatcgggagctcacccatctctctgaaatgagtcggtctggaaatcaagtgtcagagtttatatcaaacacattcttaggtgagaataacaacatgcaattaaatttttttcttcagttgtttgcttgtttgtttttgtaggaggattggggtgccaactcattttggaaaccaaacaagtgttagaagttctatttgttttcattcgtcatattaataattcgacactatmcgcctctgagttttagagttgcaggtgacaaggtacattttcttagttttatttaggactttaggaattcttgaattaagattatatattgccattttttcatagtaccaaactgtaaaatatattttatagagaggtctattcatatcttcaacaaattcttattaaatgccagccattgttgggcaataggtgtttaatgataaattagaaatgattcctgccctcgatgaatttaccgtcttgtgtacatcaagcctagtaaactggtgggcagataaaatacaawtgctaaataaaagtttgctaataatagctgagtttggtgtcctgggacaactcttgtacctcatccacagaaagaaaatgcagtaaataaaggtcagtaatttgaatgtatcctggacttactttcaaaacaaaattgctgttatatatagttaacatttattaaacacttagaatatgttctatatataaggatgagttagagttgctcatcactgccttgaaatcgtggatgaaagtaagaagatatcttaggtcttttactatagaacacaattagcttatgtacgtattcacttatcaggtaatatttatgattctctatgctcccataaaacctggggatttaacccttatctcactatcatacagaaataaaaagtagcagaattaatctaagtcatccaaaacctgctgtttcagctcccacagtgttacccatttcagttagctgttagttttatatactgctgttttcatgacatttgcktataaagtttctaccatttcaaagtatgtattgaaactgtagtccttagttggcaagaacaatattcagttcattaagtcagtttcacaaaggaatggaattgaacagtggaaataaccacctgttgtgtattctgagtctgctgtcatgctaagtcttgcagcattttttattaggacattgtatcaaagaggtaaccatggaatacatttgatattattattttgtaatggaacttatttgcttaattttgtgtttgaaganatcaaattaagtccaattcaaatgtaaatactgaactctctaaaaggaaactttttagttggaaacatttcctggaatatataatgatcaattataatccttccaattatgcatatgatataaaacagatagaattaataataaatatagaacattttctaaatttctcaagataagcaacatgaagtggaaattccttctccaactcagaaggaaaaggagaaaaagaaaagaccaatgtctcagatcagtggagtcaagaaattgatgcacagctctagtctgactaattcaagtatcccaaggtttggagttaaaactgaacaagaagatgtccttgccaaggtatgatgatttcaaagatcaggatcataaatattaaatgrtgccctttcatgaattttcacttctagtcttttaaatggatagaaaagtttattaattgggtttttttttttctttttttgaagatgggaaggcattttataaagctccttttaaagtgccttagacaggtggtttggtatgttttaggggtttggggggtgattatttgcatcttcatttcattgtttggccttaaagagttagaaatctgtcatgtcttctgggttttaggaaaacagttaaggttttgtgaatagattttatccattaaagaagtgctttgtgattgatacttaaaaagtacataaatgtgttgtaatgtcaaagtcacaaggttaagccatactgttcaattttcagtacatttaagtaaatgtgcctaaagtttgcctatgcttacatggtgtgtctgttaacatttaaaatgaatcattgtttaaaacaatctaacaatctttacactgaagtctgttttgttttgttttgttttgtttgttttgagacatagtctcgccctgtcacccaggttggattgcagaatgcagtggcgcgatcttggctcactacaacctctgcctcctgggttcaagcaattctcctgcctcagcctcccaagtagctgggattacaggcacacaccaccacacctgactaattttttttatttttagtggagatggggtttcaccatgttgggcaggctggtttcaaactcctgacctcaagtgatctgcccgcctcagcctcacaaagttctgggattacaggcttgagcctccatgcccggccacctaaggtctgtaatttttaaatgattgtgttcattgagtcatattttactccactttctaatattttagtatctttttttttttttcactccaggaactagaagatgtgaacaaatggggtcttcatgttttcagaatagcagagttgtctggtaaccggcccttgactgttatcatgcacaccatttttcaggtaagrtggttgagttstattacatttattttatttaggaacttaatgtccagtctgtagcttatgcatacattttgtcttttttaatattccccaccttttgcttatttttatacttttatccttatttgctcctttgccaagggacaagtaaagatacagaaaggtggagtgtggataaaccacaaataacatcaattttgttattttttttgcatttaagaaaaagatgtgatatagccaaattgaagcaatttattaaaataataatttagacatcatcttagtcatctgaacctgactgcatagagaatggagtactaacttaaaaaaaatgaataaagcccctgctgkctactaaccttagaatatagttttttcagtcaytttcttgtgtcctgcttctttcttcatatccatttctctctcttattgaccctttgctccagcttagggtgggatttaaatgagaagttgaggctgctgtagatatctcgggaccgaaatgggaaacttcagccctagagaggacgttgatttttagttggtgtgatgcaggggttgagttaatagtgcttgactggagctgcctccatgataatgggacatagaaacttttagagttggcacctcattcctgacaccatacagctagggcgtagtattcttgggttccagcaggacaacccaactctggttttgtcccagagtccctggatcttctcagaggttcccattttcctcactagacatgtgagagtgcagttgccatttccaggttatccactggcaacactggtgtgtgatttttttttttttaaacatactctatggagaaatttttcacataaagacaaaaatgttaagatgattttttttcctacaggaacgggatttattaaaaacatttaaaattccagtagatactttaattacatatcttatgactctcgaagaccattaccatgctgatgtggcctatcacaacaatatccatgctgcagatgttgtccagtctactcatgtgctattatctacacctgctttggaggtaaatctgtttctgaaatttcaagaacactaacttgccactcataaaggtctattaaacttttatctgaagggttttcaatggagaagataattggattcattggaagtataacttattgacttatgggggaaaatgctatagttaatagacaatcaagtctttgatggattttgcttatgaaagttggtcacagatttagtgattgatctgtttatgatattgcttctttgaaatgatccactgaacatttcataaagcacatctggcttactcactttttgttcatttgttttcttgaaatctagtctgacggcttttatttataggccaaagaacgttttataaaacataagcaatatattgatattttttcatagaatatattagaaggacatactttaatttttctaaatcctaagaagttatttcattagttgtttactaaagcaatttgattttcttaagaaatatattttataattcagtttgttttcattataaaattatgttaatacctcatcatgtgggtgagtgattctcaactggagatggtttctcttcccctttccctcctgccaccaccagggacayttggcaatgtctggaggcatttttggttgtcacaactatcacatttttagttgtacatgatactggcatcttgttggtagaggccaggaattctgctaaaaatcctacaatgcacaggacagcctcccacgcaaagagttattgggcccaaaatgtcaatagtgctgaagttgagaaaccctggtttcgatgaaagaaaataattgctaatgtcttactaattttatgtacattttcagaatattcttagacatcttaaatatttagaaaataaactattattttcttttaaaataatttcagagttttaaaataatattttaaaaaatacagtgaatggaaaacatttgatcatgagatgtaataaaattagataaaatattttcttccaagattatactttaaaagttcacaagtatctaagactctcccttgacacattgtaacacattttgaagcttcattttgttttccatttaaattctagagatttcttatttgtttatactwttaattcatatcattgtagaatagtaatattatctatattgtctgattttccaggctgtgtttacagatttggagattcttgcagcaatttttgccagtgcaatacatgatgtagatcatcctggtgtgtccaatcaatttctgatcaatacaagtaagtaaactttattttttcagaacacatttttccnttgtacattttagaatgactaagggtctttataaactcagagtcttccagagccataatgttcttttgagatgtrtatatatgtgttttagtgatagttcatgttaatgtaatttaactgaaaattatcattatatcccttgaggcatgtgatatttgaaaaatgtgttccagttctctttaaaagtaatatattgctgtgttactagacaagggtaattaaaaatgaaagtgtgcagaaagatttagaaagttgtattggccctaaagttttaaattaaaaaaaaagttatgagaattaatggtaagtgttcctcactttatgtaggtcatcatttaatcctcttcagaggccatagcttcccttcctcctccatgcccaacccctgttctttcctttttaaaatcttctaataagggtaacaggaacttcttaatattttttcaaccatttggttttttctcactgttaacatctcaccttataagaagtcatcactgaatttggaaatataaggaatagtagagactgtttaatatggagcatctctgacattgccgcacagaaagcctgtgtagggaatgtttaggtaatgcttgagctatcccttggtaaagagatttaggtttatagaaattctatttggtacttgaagttaattggtaagtgatttaagtgaactatgacttaattccctcccatatggtagattataaattatggtagattataaaatcataaattcacttttatatataaaaaatatgcaaagttgttgaaaatgttgtatgcttaagaatccacctttctttcatttttgcttgaggctatgaataatagtcttctcgtgcctatagcaatctagctatagaattatttatgaattcaccattcatttcctgtactttgctgtagccagatttaaagaaggaatgtagaggtaaccttgctttgagagatttaattcagagctttaggattattyacctatttttatatcttataatggcctctggactatcctatagcaaaatatactctaatgactcatccatgtagaggactggaaaagtcagggatttcctgagatgtgtggttagtcaagtatttttttacaagtttagtttaggaacttatttatccagattagacaggataacatttcatgttctacctacctatgagcacctataatgaggtacttttagaactcatcaaagcatacatacaaatattaatatacattggatgcagctccctgcatttacatggtatcagtggggaggtatcagtggggagggttcattatgtcctttctaagaagagcagggaggtcatgcaatacagtgcatgctggcactttacatgagcctggcctgatttattttgatgcttatgaatgtcttgagatattctgaattttatcaatttttagtaaatacataaaatgtatttttacataaaatttttgtgttaaaggtatatatatatatawctatcttaaacaccaaacattcaaactggtatgttttctttgcattctgttatatagcatattatatgttcccttagaattaagagtagatttagaagacaaattaaaacaactgatagaaaggtcactgtcttccaagtactctgatacattttttaagggtaatgaggacctgctctattcttcattcttttgagcccttaaagcagcagtctccaatgtttttggcaccaggsaccaggttttatggaagacaatttttccataaactgggggcgcagggagagaatggttttgggatgaaactgttccatctcagatcatcaggcattagttagattctcataaggaacgcacaacctagatcccttgcatgagcagttcacagtagggttcacgctcctaggagaatctaatgtccctgctgatctgacaggaggcagagctcaggcagtactgatgcgggcttgcctgctgctcacctcctgctgtgcagcccagttcctgacaggccacggaccgatattggtccacagccgatggatggatcagggacccctgctttaaagggcacttgggctttgactggcacctggaggaccctggcatcagggtccctgtgcagtctgccatttaagctaacaaggcctcagtctacagatgaatctgatactctaaagtttgagaaccaatgaaatagtggaggaaactgaagaagataattttatctccttaggatgtctgtttaaagtcattttgctggtgacctgcctgggatggaaggataactaatcctgccgctgcaaattctttctttgttatttagtaatattgcaatgatctcctttctgtgtgaccacagcgacatagggaagttcacagttgccagagtagctttggattgctaaagtttttttgacgatgaggtgtgatgaggctgtgttattcctgagggaatgaatcagcattgtcactttgtacaggaaagtatcccagggttgttccgggccccagggcattatcaaaattacagccttagttagtttggtttggctagggatcatgtaagagaattatcttcccagcatgcagtaaaggaatccttctaataacttgtaaacttgtgatatgtagcttcgtgaaatattttatcaaaatttgtgcttatttttagtttgcagtaaaccttttttaaaatttgactttttatattttatggatggcttgagcatccatgtgtcaagccagcacattctcagctcttgcctcagagctggagctgccatcctgtccaaagcctgcagctgaatccatatttctcataataaagaattctaaagacctctgattatcaaatttataaacccatagttggttacttgtcttactttaaggaagctacggaagcactgagagcttaaggcacatggggggcgctggggattcccttggctggttcccagggcagttaatcctcctgcttcttacatgtgctcttcgtttttcttaattatttcagttgttttagctttaggtgccaaatgattttatactaattgtatttacactcgttgaaagcatgctggaggttctgcaagcagagagaacaattctacctggtagagttggttaagctataataaatgatttgagtgtgggtactgtgaacaggatttagagaaattgaaatttcaggcaggaagctgcgtaaatatttttaaaggatgatgcatataaataaatccataggccaggtgcagtggctcactcctataatcccagcactttgggaggtcaagatgggtgaatcactgacgtcaggagttcggagaccagcctggccaacaaggtgaaaccctgtctttacaaaaaaaaatacaaaaaaattagccaggtgtggtggtgcatgcctgtattcccagccactcaggtggctgaggcaggagaattgcttgaacctgggaggtagaggttgcagtgagccgagatcataccatcacactccagcctggacaagagtgaaactccatctcaaataaataaataaataaataaatccataaaatgtaaatagcagcatgaacttttgaatataaaatgctggagggtatatttaacttagctttattttctgaaaaaaagtatcaaaagtacagaatatagcawtaaattttacttggcaaatgaattatttttgttaatagcaaagatgcctaagtttggggcagaaagatttattcacattagtgatgcattcaaagcatgaggtttttggtttccaagagcagaggcatttcattatattaaggttaagatgtatctagctgtcagtatacacttttttatttctctacttttattttgaaattaaaattttcatagctacactagtagattgtatgtagaattttatttttctgtataaacccacaccttcaaaataaggataaattcatgtttatcaaatgtgattatatagatatagctacagagattattttattcaacaacaatgtactgcaagcctactaaatgttataataaatattatttcaggcacttaggacacatgggtggacaagacaagacaaatccctggctcttaagagctggcattctgctagaaaaggtggagcataataagtgaatttatggcatgtgatggtactaagtgctatggaggaaaataatgcagggtgagggcatagagagtggagtgatgaatgaggcagttttcttgacaactgaatattaagttaaaaccaccacttccctctgtcatttcatggagaaatgtttgtttctgaagtccttttgaagatttatgtttatttcagttgtaacttagagacatggtgtagcatgctgtcattttctaactcaaggctaagcctagtaaagctgtaagaacagtgagtgtaagtcttacttacaggatacatatctatagtgtctgccccagtcttaactgtttcagctccaggtcttaatattggctctgatctgccatgtggactccatcataagacacaaaaaggcacaatacctagtggacttagttggatttgggaggcaatgtattccttctttgtgtgtgttactctggcccatttactaagtgatctgaaaagctgctagtttagatggggcacagaacaagagagtgtcacaaaaactgctagttttgagtggggctctacaacaggtccagcctgctgtgcaagctgctctgcacatgggccacatgatccagcagatttaatggtgcttgaaatgtcagtggcagataggaatgttgtttggagcctttgacagagccctctgtgtgaatcacagcacagactctggagcaagaccctgccatcatccaaagaaagataactaactactctccttttgaaagaaagatataggcctgctgctgggccttaggagatactgactgactatgggccaccaagtttccatgtggtttaagctgtctgcccatcattaatagggtattatctaacgcgccaagccatatgttgggcatgtacgacatttcatcatcaaataaaagtagtgtaatacacgatctatcaggtccgagcagacactaaaggcacaaattacataaagaagtggccctaatgccactcctattaattacactgccttctttctcccagcctacacatgtggttgcatggaaagttccctgcaagtagttgacagagggcctggtttacggatggttctgcgtgatacgcaggtaccaccggaagtatacagctgcagcactactgcccctctctgggacatctctgaaggatggtggtgaaggggagtctttccagtgggaagaactttaggcaaggtgactcgttgttcactttgcttggaagagggaatggccatatgtgcaattatataccagttcatgggccgtagccaatgatttgtctggatagtcagggacttagaaggaatatgattggaaaactggtgagaaagaaatttggggaagagatatgtgaatgatctctctgaatggacaaaaaaggaatgctcaccaaagtgtgaccttggcagaggaggattttaataaccaagtgaataggatgacccattctgtagatactagtcaacttcgttccctagccacccctgtcatcacccaacatgctaagaacgaagtggccatggtggcagggatggaggtggcaggatgtgcttagaaacatggacttccactcaccaaggctgacctggctatgactattgctaagtgcgcaatccaccagcagcataaaccaacactgaacccccatataacaccattttggggggatcagccagctacctgatggctggttgattacattggaccacttccatggtggaaagggtagcattttgtccttagtggaaaaggcactttctctggaaacagatgtgccttccctgcagtttttctgccaaaactatggtattccatacagcattgcctctaaccaggaactcaccttactggcaaagaagagctgcactgggcttatgcccatggaagtccctagtcttaccatattccctaacatcctgaatcagctggcttgataaattggtagaatggccttttgaagactcagttactcagctaggaggcaagaccttgcagggctggggcaaggttctccagaaggccataaaggccatatatgctctgaatcagcatccaatatgtggtgctatttctcscataaccagaattcatgggtccargaatcattggatagaaatgggactgttaccactcataattacccccagtgacccactagcaaagtttgcttcctgttcctgcaaatttatgtgctgctagctagaggtcttagtttcagaaggaggaatgcttctatcaggagacacaacagtgattccgttgaactggaagttaagacctagccactttgagctccttatgcatctgattcaatcatccaagaagggcattacagtgttgactggggtgactgatcctgactaccaaggggaaattgggttactactccacaatgaaggtaaggaagagtatgtgtggaataaggagatcccttagggcatcccttagtattaaccatgccctgtaattaaggtcagcacaaaataacccaatccaggcaggaccactaataacccatacccttcacgaatgaaggtttcggtcaccccaycaggtaaagaatcatgaccagctgaggtgcttgctgagggaaaagggaatacagaatgagtagtaaaagaaggtaattacaaataccagctatgaccatatgaccagttatagaaataaggactataattgtcatgagtattttcttatgaatgcatttatatgtatatatacatatattaagcatatatcttcattttctttttcttattcccttatataacataagaggtattaactttatattagtatttaagtatttattttatatcatagtatttaagttataggctatcaggataagagtaaacattactcaaaaactttactttcacttctggggaatgtgttagtgtgcttttagttgtatgcaggatagttgtagcctgtttggtagaattatggccttatggagattaaatatggttaaaggagatgcttatgggtaccagggtgacaaggggcagaatttgtaatggttaattttatgtgtcagcttgactaggctaagggatgcccagatagctggtaaaacactattttggggtgcgtctgtgagagtgttcctggaagagattagattagcatttgaattggtagactgattaaagaagattgcccttaccattgttggcagggatcagtcaatccattgaggacctcaaagagaagaacaaaacattgggggaagggcaatttgctttctcggagcctggacatacatattctcctgcctctaacatcagggttcctggttgattctctggcctttggacttgctttcctggttcacctttgcagacatgggacttcttggactccataattgcctgagccaattcctataataaataaatgtgtctttttctcacatacacacacacactcatacatatgtctattctatttctctggagaaccatgattaatacagagagagaaaagattagcacagatgaagtacatgttctcagttatgtggtagtacctgcccacccttccccccatttcattagcactcagaagagagggacacaaaagtggtcttcctgccttcagtagtagcatatgttgggcataatttaatttattcttgatgatccagggtagttgtaacaaatgagcacaattgatctatatataataaaatgatggctttgagtttgtaraggtatgcatggcctctcaataaaaaataaatacttacaaagttgtctttataaatgtgtgccaggcactgagtggactgtgttgatttcctggttcatgtttagtgttcactgctcaggttttcacctctataaggtacttgtaatcatagtcagtataaggtgagggctctagaaactgcctggttttaagtgctggccccagcacttactggctaggtgatgttggcaaagttacctaccttctctgaggtacattttcttcatttgtacaggattatatgagtatgtctatgtaaatatttatgtrtataaaagatgtccccaagggacattttctatcccccagcctatcccaaggacacaaagacttacttcccacctatatggctccmtgccatccatgaatggaacatagccttaaaatgtcgataacaacagtatcttcctaaaagagttatgaggattaaatgagatgattcacataaaccatttaacacaatggcacctaaatcctctaaatgttgtgccttgctgtattcctgtttgtactttgtaagtttgaaataattgaagtgcctaggggaagccagataaccaaacatattaaattaataacctttaatattttgtaggggcttaagtctctaagtaggttgggagggtttggggaggaacgattaaaagatttgtagagataaagacaaaaaaggtagaatgcgatacatgctaaatgggtggtacaaagtcgtatagaagtttacaggagaaagtgggcagtttcatctggtaattaagaaagacttgatggaagaggtaacttatattgggcttgaagatgaaagggtttcaacaaaaatgttatataagctaacctctttgcccctctgtgctgtgcactgtaccatcctgacagcaactttctgatcattcctgaaccttcaaggactctacttacaagtaatggattagtgtctttgatgaaaatctgctgaggagctgcagactcctacctcccaatttaaatgtgaccatatgccttcagtcctaaagaagagtagcaagttaaataacttccttgagattcagtttcttaaatgctaacatttgttcatttaaaaatcaacagtcaccaccactttcctgtaacagcatctgagatggaagaggctatggaggcctgccagtccactaaggcatcctttcctggcttttctagccaatctggactctttaagtgtcaggagataaccactctccaagacaggccttgccagtattcttggacatctgccctacatgaaaggccctacttatatccagtagaactcagactctttgttgcaccttccatacaacagatcacccttttccttgaaggaagagctcatcatcttattcttttgcagggtcaacagccttaatttccttcaccttcagcttcatataagccaattagggtttttgtaaggctaagtcaattctgttaacactgcttgtctacatgcatatttccttccttaaacgaactctaataattatccagtatctaataattatgccttcctttcaatatatgtttgtttatttgattccactgtagaaatacaataatatgtgctaagaacctatatagttttaaatttttcatttctatatgcttacctatctgtagataaaggttcataaaggcatttatagacactataaaagttcaccagaaactgccttttaaaagataaacactattgttttatctaaagaaaacaaaaaataacaaaaaaatactgtacaaacctactccctactagtctaaacagctctgctcctgtagtttgggagcagaaatttaagtgtgcaaatttgtatttctatagttccgataaaataatagaatttctcagttgaaaatgtcttaagcctctcctctccttcctagctccattaaaatagccattgaatagtattgggtatttctttcttaaaaaaagatatatatttccaaatatattttctatgcattcgttatatattttctatgcattcgttagaaaaaagatcaaatacctgtgcttttaacctttttcttttcttttcttttctttttgaaacagagtcttgctctgttgcctagtttggagtgcagtggcacgatataatggctcactgcagccttgaactcctgggctcaagcaatcctcctacctcagcatcccaagtagctgggactacaggcacgccctaccatccccagataattttttattatttgtcgagatgaggtctccctatgttgaccaggctggtcttgaactcctgggcttaagcaatcctcctgcctcggatttgcttttagtctttacagtgattaagtggaaagagaataaagcatcaaaagttttttaatgattatcttgtagctctgggtctgctatttacaagaagtaggagagaggcagaatctctccctgcctaaaattcacaggtctagggcagtagggagagagtggcagaatcttcaccagagggtatacagacagccaaacacaacatcactgtgaagctgtgagcaagcaggcaggaagagcaatatccctgtacagtatacaatgactgccacgatacttggaaaagaaaatggaaaacaatgaataaagcttggactttcagagctatacatgagcaaatgagcaaatctaaacttgttcatatgattccttattgttcttgtaccctctttgagtacaaacaatcctgtaacacacgatcctcactttatatagtgcagggtaggtaattcacagttatcaggaatacaaaaccttatgctctggatgtgttatagatactaagaataatgtcatattctgctgagctcatggcaactctagaggagaggttaaagatccaattctttcactttagagaaagctgagacctacagagtgaaatgacctgccacatgttagtagcattagaattcactccccaagattcattccagtgttgttcctgctcttatgttatctgatttattctctcctggatattgtcaggtaatgataagggcagcagagaagtttaggggaaattacatcctaaatccagaattttaagaatcagataaacttctcacaaacagttttgctgatctttggccttttgtcttttttacagactctgaacttgccttgatgtacaatgattcctcagtcttagagaaccatcatttggctgtgggctttaaattgcttcaggaagaaaactgtgacattttccagaatttgaccaaaaaacaaagacaatctttaaggaaaatggtcattgacatcgtaagtagctgataaaagccaaagaagagaactgtgatgcaagttgtttataatttagacataagaacaagatgagtattaggtaaaaggaactgcatttcaaaacatattatggccctttatgttatagaagctgcccgtgatgctggctgtgatgttctgtaataggtttttcacttctagcagtttggacttgagaataatgtcagctcaccctcatcatttattttctgggcccctccagtctggtggcgggcagagaaaaatgactaacaaaagcagattgtgtgggccacagctcaaatggatttttyccccaccttttctcatcagtagacagtgccatttagacatccatgactttactcttttttctatgcatcttattcagtgattatgagacacaggaaaatctctagctttcaaaaacttacaaacttgtgatgatgtcttatccatggagatgtcacccatttttcaccatgaaagtggttgtcagtgcctagcatttctgtatattacacacatttatctgggctttgggaaaacttgatagcaaaggggaaaagactctgcccccaaggagtagtaaggattttccactgtcattaaaaggcatagtgttgttttattcctttttcattcttatattctgcrtaatattttcatgtgtaaattctgttttctctgaacttaataatatactctatattttaaggtacttgcaacagatatgtcaaaacacatgaatctactggctgatttgaagactatggttgaaactaagaaagtgacaagctctggagttcttcttcttgataattattccgataggattcaggtaaagccttgtttgagtttgctctgtgtgtgtgtgtctgtgcacatgtgcacatgtctgygtgttcagctttgataagatgtatttcttccttctcccaccttatactttcagcaattgtaggcaggatttttatccaaatttttattcctgagaattaaccaggtaaaattctactggtctttctgtttgcatctacattaattaaaaaaactaacaaacaaacaccccacagaaccagccacttaagcagctctgaatctagtcagccatgcacataaacagtttctcttaagctatttagatgcagtagaagtggcataatttggaactattaatacaagtgtgaactatacacagacacatcatggttgagctgtttggaataaatcttacactacgtgtatttttaagtgttgcagtcatccaatgtgaatttctagttttttttttgttttttttttttaaaaaaaggaacaggartgaatagagaatgcatccatctattttaggttcttcagaatatggtgcactgtgcagatctgagcaacccaacaaagcctctccagctgtaccgccagtggacggaccggataatggaggagttcttccgccaaggagaccgagagagggaacgtggcatggagataagccccatgtgtgacaagcacaatgcttccgtggaaaaatcacaggtaatgcatgaagtgtatagctttcagagagaacagagctaccgctttagcatttggttactttgtattacatatgatagtattttactggatttttaaaattactttgtttttgacaagctcaatttcaccttagtatttatgatccaaagaactttcattcttatgacttacattcatatagtcatatatatattctaaagacatattcatttattatgactatattcatttaatatattcmtatacatagagcacatggcattatttcagttatctggattcacctacaaattggtgattgtaaaataagccctaccatgtcaacaactggaaaattttttatgctatgaacatgctctttaaccaaaggttctagaagctaattttgaccagctagtagcaatactttactttaaatggtctgttgttgttgaaaatagtgacaattttaccaaactaagtttagtagtcttctgttcagtgttttatttgtgggccatgatctaattaagcttttccattgtttcttagtcccaagtcctctactcatactggatttttttcttaactaggtgggcttcatagactatattgttcatcccctctgggagacatgggcagacctcgtccaccctgacgcccaggatattttggacactttggaggacaatcgtgaatggtaccagagcacaatccctcagagcccctctcctgcacctgatgacccagaggagggccggcagggtcaaactgagaaattccagtttgaactaactttagaggaagatggtgagtcagacacggaaaaggacagtggcagtcaagtggaagaagacactagctgcagtgactccaagactcttygtactcaagactcagagtctactgaaattccccttgatgaacaggttgaagaggaggcagtaggggaagaagaggaaagccarcctgaagcctgtgtcatagatgatcgttctcctgacacgtaacagtgcaaaaactttcatgcctttttttttttaagtagaaaaattgtttccaaagtgcatgtcacatgccacaaccacggtcacacctcactgtcatctgccaggacgtttgttgaacaaaactgaccttgactactcagtccagcgctcaggaatatcgtaaccagttttttcacctccatgtcatccgagcaaggtggacatcttcacgaacagcgtttttaacaagatttcagcttggtagagctgacaaagcagataaaatctactccaaattattttcaagagagtgtgactcatcaggcagcccaaaagtttattggacttggggtttctattcctttttatttgtttgcaatattttcagaagaaaggcattgcacagagtgaacttaatggacgaagcaacaaatatgtcaagaacaggacatagcacgaatctgttaccagtaggaggaggatgagccacagaaattgcataattttctaatttcaagtcttcctgatacatgactgaatagtgtggttcagtgagctgcactgacctctacattttgtatgatatgtaaaacagattttttgtagagcttacttttattattaaatgtattgaggtattatatttaaaaaaaactatgttcagaacttcatctgccactggttatttttttctaaggagtaacttgcaagttttcagtacaaatctgtgctacactggataaaaatctaatttatgaattttacttgcaccttatagttcatagcaattaactgatttgtagtgattcattgtttgttttatataccaatgacttcttccatattttaaaagagaaaaacaactttatgttgcaggaaaccctttttgtaagtctttctttattatttactttgcattttgtttcactctttccagataagcagagttgctcttcaccagtgtttttcttcatgtgcaaagtgactatttgttctataatacttttatgtgtgttatatcaaatgtgtcttaagcttcatgcaaactcagtcatcagttcgtgttgtctgaagcaagtgggagatatataaatacccagtagctaaaatggtcagtcttttttagatgttttcctacttagtatctcctaataacgttttgctgtgtcactagatgttcatttcacaagtgcatgtctttctaataatccacacatttcatgctctaataatccacacatttcatgctcatttttattgtttttacagccagttatagtaagaaaaaggtttttccccttgtgctgctttataatttagcgtgtgtctgaaccttatccatgtttgctagatgaggtcttgtcaaatatatcactaccattgtcaccggtgaaaagaaacaggtagttaagttagggttaacattcatttcaaccacgaggttgtatatcatgactagcttttactcttggtttacagagaaaagttaaacagccaactaggcagtttttaagaatattaacaatatattaacaaacaccaatacaactaatcctatttggttttaatgatttcaccatgggattaagaactatatcaggaacatccctgagaaacggttttaagtgtagcaactactcttccttaatggacagccacataacrtgtaggaagtcctttatcacttatcctcgatccataagcatatcttgcagaggggaactacttctttaaacacatggagggaaagaagatgatgccactggcaccagagggttagtactgtgatgcatcctaaartatttattatattggtaaaaattctggttaaataaaaaattagagatcactcttggctgatttcagcaccaggaactgtattacagttttagagattaattcctagtgtttacctgattatagcagttggcatcatggggcatttaattctgactttatccccaygtcagccttaataaagtcttctttaccttctctatgaagactttaaagcccaaataatcatttttcacattgatattcaagaattgagatagatagaagccaaagtgggtatctgacaagtggaaaatcaaacgtttaagaagaattacaactctgaaaagcatttatatgtggaacttctcaaggagcctcctggggactggaaagtaagtcatcagccaggcaaatgactcatgctgaagagagtccccatttcagtcccctgagatctagctgatgcttagatcctttgaaataaaaattatgtctttataactctgatcttttacataaagcagaakaggaatcarctagttaattgcaaggtttctactctgtttcctctgtaaagatcagatggtaatctttcaaataagaaaaaaataaagacgtatgtttgaccaagtagtttcacaagaatatttgggaacttgtttcttttaattttatttgtccctgagtgaagtctagaaagaaaggtaaagagtctagagtttattcctcttyccaaaacattctcattcctctcctccctacwcttagtatttcccccacagagtgcctagaatcttaataatgaataaaataaaaagcagcaatatgtcattaacaaatccagacctgaaagggtaaagggtttataactgcactaataaagagaggctctttttttttttccagtttgttggtttttaatggtaccgtgttgtaaagatacccactaatggacaatcaaattgcagaaaaggctcaatatccaagagacagggactaatgcactgtacaatckgcttatccttgcccttctctcttgccaaagtgtgcttcagaaatatatactgctttaaaaaagaataaaagaatatccttttacaagtggctttacatttcctaaaatgccataagaaaatgcaatatctgggtactgtatggggaaaaaaatgtccaagtttgtrtaaaaccagtgcatttcagcttgcaagttactgaacacaataatgctgttttaattttgttttatatcagttaaaattcacaataatgtagatagaacaaattacagacaaggaaagaaaaaacttgaatgaaatggattttacagaaagctttatgataatttttgaatgcattatttattttttgtgccatgcattttttttctcaccaaatgaccttacctgtaatacagtcttgtttgtctgtttacaaccatgtatttattgcaatgtacatactgtaatgttaattgtaaattatctgttcttattaaaacatcatcccatgatgggatggtgttgatatatttggaaactcttggtgagagaatgaatggtgtgtatacatactctgtacatttttcttttctcctgtaatatagtcttgtcaccttagagcttgtttatggaagattcaagaaaactataaaatacttaaagatatataaatttaaaaaaacatagctgcaggtctttggtcccagggctgtgccttaactttaaccaatattttcttctgttttgctgcatttgaaaggtaacagtggagctagggctgggcattttacatccaggcttttaattgattagaattctgccaataggtggattttacaaaaccacagacaacctctgaaagattctgagacccttttgagacagaagctcttaagtacttcttgccagggagcagcactgcatgtgtgatggttgtttgccatctgttgatcaggaactacttcagctacttgcatttgattatttcctttttttttttttttttaactcggaaacacaactggggaaatatattctttcccagtgattataaacaatctttttcttttttttaagtccttttggcttctagagctcataggaaaatggacttgatttgaaattggagccagagtttactcgtgttggttatctattcatcagcttcctgacatgttaagagaatacattaaagagaaaatactgttttttaatcctaaaatttttcttccactaagataaaccaaatgtscttacatatatgtaaacccatctatttaaacgcaaagktgggttgatgtcagtttacatagcagaaagcattcactatcctctaagatttgtttctgcaaaactttcattgctttagaattttaaaatttcaccttgtacaatggccagcccctaaagcaggaaacatttataatggattatatggaaacatcctcccagtacttgcccagcccttgaatcatgtggcttttcagtgaaaggaaagattctttttctaggaaaaatgagcctattttattttattttattttattttttgacacaaactgtagattttagcagccctggcccaaaggaatttgattacttttgttttaaacagtacaaaggggacactataattacaaaaacatccttaactgatttgagttgtttttatttctttggatatattttcagagtggtaaattgtgtgtgagaattacaaatgattattcttttagtggtttcttagcctctcttacagcccacggggatagtactgtacatcaataccttcatatgaaatttttatatgcaatgaaaataaaagcatgggttgattctgcctatttatgactcaatcttttacaaataaaagattattcattttaaattatagttcaatcagcatgtctcttaggatactgaacgtggttgaaatgaaaggatagtgacatcataagttagtactgatattcataaccaaataaagccaacttgagtaattttgctacattaaaaattaccaaaattacttagatggcctataagattaagcatggtgttttctaagcaagctttgaaaggggccttccatacttacttaattgaatattctgggatattgaaaattattcagatacttgacaattatttttggttacctactccgcaaactacaaagttttaaggactcaacaataagttaatgagacacagtgtttgctttcatggagcttacagtctggaggggacaaaggcttaaacaatactcatataattatatatgtgatcagtacaatgaaggagctcagtggggtaaataagcaggaacctgaacttgatctgttccggagggccacagaaggcttccttgaggcyttgagaaagtgatttgcatctgagttctgaaggattgtaagaggtaactagggaaaaagttgacaggaagaggaaggggatccagacaagaaacatttgcaaagatcttgaggcataaatgagcttgagacatctggagaaactgaggaaaagtgagagagtaggcagggcctggagccgcagagccattgctaaccatcctgtgtgagatatcccccattctgtagctttattctcataaccctgctcaattttctttataacacttctcacagatttatatacgtgtttgtttttgttatctgtctctcccaccagaccacagctccatgagagcaaggtctttgcttaccaatatatcactagcacttaaaactatgcctggtacacagtaggttcttaatatgtgttgaatatagccatcaaattgatattggatataattcaatctgataagatattttgagatattaaagagtttttaacttgataccataaaaactttgtttgttttttgtttttgagcttactaagatcctggataaagagtttagagtttcctatctctttgctaactaaaaactctgtttgcttattcctcacaaattctacttttttctaaatgacaatccatttgtcatgataatgagagtaaagaaatcagcacaaatttaatccccagatcatccccagaccatgccagcagaataagggtaattaaacagagcatctatgcttagcctctccaccatttctcctgccacaacagtcctgacagccaacaggtgccaaatttgtgccttcctgggaataactgttttaaactcaagctcccttccccaaagccatgaccccaaagtgacactatggaactaaggaagcaactcccttcttttcctgacttgccacgcttgctgatttaggctaatttgggtggtggtgggcctgaactcacattaaaatctctgacctggaaacctttcctcaggcacacggctttggacccacaacagcaacattccaccaaaaaacaaaccaaaaccaaaaacattccctgttgctagagagtaccacctgtctaccaaggggaaaacaaccttgtgtcaggggaatcataccagggctttcccatccttctgatttgggtcctgcatcccacccagctactccgagagctccaaatactctaggtcaaactcagtgctatgggtataaatcttgaatttgtacacataggaaatactactttatttcctttaaatcaattaatctggactcggggctccagccaatcacactattggaaattcccatctctcattactgccacagctcctctctctcccaacataaaatttatcttatctccaatataatctgagtatcaggcctctgtgttgttccagcagaggttccttacagtccctcagctattagcttcctggtcacatgtggtgtaccaggaatatatgctggtttggggccctgcttccacacagtgtgtgcatcaaaagagcctatccttctggtgttttattacaccttgctgtggtctgaatgtctgtgttgaaatgctaacccctaggtgatgctattaggagatgggggccctttgggagataattaggttatgaaggcagagtcctcatgaatgggatcagcgcccttataaaagaggcccaagggaccttgttcaacctggccaccatgtgaggactcagctagaaggtgccatctgtgaaaatgaaagcaggtcctcaccaggcaccaaatctgccagaaccttgatgttggacttcccagcctctagactgtgagaagtaagtgtgttgtttataagccacccactttatggtattttcttatagaagtctaaggagactaagacatacctactgaaattactacaaaaaaaagcagttctttcttttcctaattctcaacatattctccttcttctctctccttccttcttttgctctccaatgagatcaggcttaaaaacaaaaacgaaacagactagaggtagttgtgacttccatttgcttctgctctccactctgcaaaaaccctggctattatttgaaatatggagacgaaaaaagatattggaagagcatacattaaataatagtccattaaccttccacacatggttggcaacatctagatccaacaatgttcactgaacattttgagatgtgggaagttgaggaagttgtctccaagaggaagtcatcaggaactcccatacttcctatgtgggaacacagggaaagaggcattttttcctgaagtctctgtgttccagtgctatccctgaatgtctattcccagctctcgcttagctgtttcaatgacaagatatagcacttgaaaattttataaagtgagagtcatatttgctccctgctgcaagcccccaccctgccattccaggaccctgctatggtccacaattggcattatgattccctctattttgcagctatgaaaagtgaggcccaagaaggttaattgacttggctaagattattcacaggctaaatactgagattaatgatttgcaaactacagatttgacagaagtcctaatgctatctctacatcctatttctgttgaggaccaaaattgactgttgcattgcctttgatttcctttgaccatccttcattacagatttcagtaatttttatggtccaaagctaggtgacagatattacatcatatgcatttgttaactcaccctatgtctgcatagccttgctatatggtcagaattctccagattgagtggggaacttggagttaaagagcccctgaccccctaaaaaattatagaaaatgaaagaagctgtcaagaaagtaaggagcagagataagagcagagatgggagcgtgcctctgcccggcagagactcacaacatgaggcaagacagatcttagctgaacttcttgcaggatgtatgcctcaatgaaaggaatggagcacgggcagcatccagcttaggctggagccccttcaaccatcatggctgttttagcagggtgtttgccagctgcttacaaatcccaagccaacagacatggtttcaggacctgaatcatgcaaacatattttctgaaaggttctatcacctgagaattgcttttccttcgctccttgtttttgaaccaaaaagccgaccaaatgtatagtggcaaacacttgctcagcacccatccatgcaaggcactgttttaccaccaggctgcatcagttagagaaccaagccgtctctcaccttgcagcttcttcacactttgctcattttctctctaacactgatggtttctgtttcctgctattcagttacagcatctgggaagagagtggcagagaacgccaggcaactgcaccctgccacagtgggtcaagcggaggctgggtggtgacacccgtctctacccagcagaagtcagtggttcatgggtggagaacaaagctcaggacagctgctgcagtccagggaactgtccaccatagaagactcttgggaagcagcccctgaccccaaccccctgtgctttttgaagccgtgtctggtatcacatggaattatgcagtagtcatagaatatctttgaaaacttatattctaaaaataattgctgagatcagcgattaaaatatctaataaatggactggaaaagttgaaaacaagcaaaggtgagagaaaacaattgaggaaaactgggagaaagtgaaggaagttggaccctttgtactacagcatccaaggacagtgatgatatcttctgttccccacaggaccaggttcctggtgcttaacgtaacacataaggcccttaaggatctaatcaaactaaatcatccccaactcctcccatcaaccccacatagatatccctgtgcctcagctaaatgctgcctttacaccttgcctttacatctctctgcctggaaaacagctcatccctcttgatccagtttaaatacacctttgtctggaaagcctttcccattagtattttatacacaaccctataataaatatttcccctaatatgttgtattttttaaaaaaattctttctctcactagattgtgagatttttaatttttatttttttagacagtctcactctgtcacctaggctgaaatacagtggcgcaatgttggctcactgcaatctctgcctcctgagttcaagtgattctcctgcctcagcctcctgagtagctgggattacaggcatgcatcaccacgtccagctaatttttgtaattttttagtagagatggggtttcgctatgttggccaggctggtctcgaatcctgacctcaggtgatccgcccaccttggcctaccaaagtgctaggattacaggcgtgagccaccacgcctggcctagatagtgcaatttttaaacatcaatgtattcctttttgcctgctagtaaggaattaagtccggatattaacatttgactattctttcccctctaacaccaactcttctcaaaatgtggtccttgagctgacattaacgtcaactaggatcttgttagattataatctagccccagaccaaggctccaggaaaagactctctaggggtggaccctagaacctgtgttttaacaaggactccaggtgataagtatgctccataaagtttgagaaacactgttcaagacatcatggaggtgtttttctatttctgttttttttaagaagcaagttaataatctcaaccacctttctaatgtatttcatttaatcaaagggatacttgttgctacaggagttacaacagatgacctagtgagggccacaggcagtctgaggaacagtaggatcccatgtttggccaatgtctatcaagcaagaaaggaatagtgaagccagctattagctcccttcagcagaggaaacctgggattaggagtcrccatcaggcatcatggcatcacaagcaggcatgggttaaagatttaaatgttgcaaaaagagagaagaaccagaaggaaattacgtccacattatccctgcaagaccattaatgtaatgaacagaaatcaaacaccttttcagtcttcaagtgccgcattcaggttcactctgctaatcacacagctgagtggccctctgctttcataactgggtgaaaccacacatcccaccccaagatggcttgggatctaccatcacaaggggccaccaaagggccaaataacacaaccccgaaattcagtggtggtaactctccatggggttaactttgattactgggaaactagaaatgggaaggagccagtaaattaatttcttctctcccaagactattctgaggcatagcctcccccttgaagcccatcaggatgatcctgcagttccatgtcagcaagagcgccctaccaagtgacctgcagtgtctcttggctgctccttgtgagtcagtagccagcagagaaatgttttccctactttcctttatttctttgttcttacttgcttcattttgccttgacctttttttcytcacccctactacccaaaggcatgtacttcccaaataaagtctgtcactctgatccctccctcagactgtttccagggatgctgagcaccctgtacattcagaaaagcagatgtcaaatttctgtatatatattggagtgcactaagtatttaaaatcaacctttggctattagaggtagggactgtgccttatgcatcattgtttttccagggcttagttcagtgtctgccatatagcaagtattcatttaacaggaaaagagaaagacaagtgggtaagtaattgcctgaatgaatgaggttgatggtgaagaatggrtgggaagggcatgaattggcctagaatagattagacattaagtaagcaggagtcgagacagttaaggggccaaaggcagctgaaaagaatatggaacaggaatacaagttgaaggaatcaggcattctccctagaaacaaagggtacgggaagggtaagagacagacacttcactgtctgggaatttttatccatactcgttattaaagacacacttggttgcctacttaattattaccaaccctccacccccactttattcctggcatacataagtgggattttgttcaggtcgtgtgaagtcaagtcttccagggagatccagcctctcctcagttctgtaggctaattctgagccttttatggtaattcctctacccttgccagtgattaggttaggacaggcttgccgtgctgcaatagtagacagtgagacacaggttgacttctgggaaaatatccccaactcttacaaagaaaagagagaacagaacattttttcttcggggctttggaaattattttcaaagatgtcatggttaggctattatcttgaggccacgaaaggaactatctgaatacacagacaacatactgaaaatggcaaagcagaagttagatagcacatgag

SEQ ID NO: 94096 - DNA, 117083 bp, Homo sapiens
  misc_feature (1)...(117083): n = A,T,C or G
ccacagcaaaggaatgtctgcttctgggggttgggtgggagacggctgacagaactggaaatcttcttcaggtgggttgtttttttgttttgttttgttttgtttttttgtttttgagacagagtctcgctctgttgcccaggctggagtgcagtggtgcaatcttggctcactgcaaccttcacccgcctgggttcaagcaattcccatgtctcagcctcctgagcagctgagattacaggcatgtgccaccatgcctggctaatttttgtactctttgtagagacgggatttcaccatgttggccaggctggtctgaaactcctgacctcaagtgatctgcccaccttggcctcagaaagtgatgggattacaggcatgagccgccacccgccggccccttcaggtgggttttgaggcttcactacaatactagtttctagttgctgctgcaacaaagtaccacacacttagtggcttaaaattatacagatgtattcccttagagttctgaaggccagaattctagtcagtcccactgagtgaaggtgggagcaggttcgatgccttgcaaggctctccgggagaatccatttcctggtcctgggggcggccttcactcatcagcttttgctgccctttttcaatgactcatgtttcctgcttccatcactacacctcccaccctctccatcacctgctcttctaaggatcctggtgagtacatcaaccccgcagggacaagctgggataatcctcctggccaaaaatccttaacttcattatatctgcaaagctccttttgccatatacggtcatgttcaccgatccctgggattgggatatgagcattttgggggggtcactatcagtctactacagctaggctgcaaaactattatactctcctggtgtttcagtgattgggattgggagacaaagtgttgggattttttgctttggggtccctctattttttttgtttgtttttttgagagggagtcttgctctgtcgccaggctggagtgtggtggcgcgatcttggctcactgtcacctccgcctcccggggtcacgccattctcctgcctcagcctcctgaatagctaggactacaggtgtgtgccaccacacctggctaattttttgtatacatttttagtagagacggggtttcaccatgttgaccaggatggtctagatcttttgacctcgtgatccacccacctcagcctcccatatcccaggcatgagccaccatgctcagccagggtccctcttaaacttgtatttttaaggtctggggtccctcttaaccttttttttttcccttctttcttttttgagatggagtcttactctgtcacccaggccggcagtggggcgtggtctcggctcactgcaatgttcaccttctgggctcaagcgattctcctgcctcggcctcctgagtagctgggactacaggcacctgccacaacacctggcttagtttcatatttttggtagagatgggggcgggggtggaggtggggaggggggtttctgctatgttgccctgagctcaaagcgatccgcccacctccgctcccaaagtgctaggattacaggcctgaaccgtcacacccagctgctgtaaagtcttatttccacacagctgagacatgttttaggaagtttgctaacagacccctggagacctcctcattgtggcctccctgttgtttttgattcatcttttctgccctcctgcttttcagaaattaaaaggctaaaaagaggtactaaactttaaaacttctcttatagtctcccattaaactaattctaagaaccaccaaaaaaggggaaaaaaatttcaaaagcagtgaaatgatatggactgtgaggatgtaaaatattggaaataagtcattatatgttagtgctgctctgacatagggacatattattgagaatcaacttttgctcaattttcagagaaatggaataatcgtatggctgatctatgtaaacaagttgaagaattgtctgaaagaaaatatggtatgtctaaactggaaaagtcctgtaatcctttgttcatgagcatttacacaatggagttactgttcatcatggggtactgtggacaagcccagggctgctggtgaatcctgccatacttacaggtttctccttgtaaggttctttgtagtgtctaaatattagaaacattctttgtttctagattactgcaaagctaaggaaaagttgtacttctttaattatcattatcatttcttttaaactttcagcatggatattggagatttacttacatatttattgcaaagccctggatcttagggatttaattgaatgttttaatactgtttctcttaatctgccttgttaaatttggtattcaccaagatgcccctattgtctctacttttatcttttttttttttttttttgggacagtctcgcactgttgcccaggctgcagtgcaatggtgcgatctcggctcactgcaacttctgcctcccgggttcaacccactctcctgcctcagcctcctgagtaactgggattacaggtgcccaccaccacgccccactaattttttttgtagtttttagtagagacggagtttcactatgttggccaggctggtctcgaactcctgacctcatgatacacccgccttggcctcccaaagtgctgggattacaggcgtgagccaccgcgcccagcctctacttttatcttgatgcatcaccgagttgatgttagatttcaaattcttctttgcccttatgccattctatcctgaacccacctttatatgatgatgaaagaaattagcaatatgttattatctatctgttggtatatatcaaatgctcaccyaaaaatagcaacaaccagtgaaaaacatcatgtgctttggtgtttttatttggatgactatttactttgcaatctactagcaagctataatattgtatgatatgcagaattttaactgaattgctttaagtgaacatttaaacatgataaaccatattgatggtatttatgttaatatacttgaaatgaacatttttttcttcatcatgagtaatatatccctcaatgaaaatctagaattagagtaaatttgctaatgaattcaataacttttccataatatttttagttatgtgcttaaggttctcttagtgtttctcccactttttaatagcttatgccttttttgcctttgttttttattggttcattttaaagcaaaaacctcacaacatgtgctccccagaagcactgtaacctagtggtaagatcatagactctggggacacaggctggccacgtctcttctcctgtctgagccttagtatcctcctgtagtcatgagaactgaagatctatcctgaagatttgataagatagtaaagtgcttcacataatatcgggcatataaatacataataaatgcttcctgacctcaggtgatcctcccacctcggcctcccaaagtgctgggattacaggtgtgagccaccacgcccaaccaagaaattcttatgtaaaaagaggttgggctcagtgcctcaattctagcactttgggaggtcagggcaggtggatcacttgaggtcagaagtttgagaccggcatgggcaacatgatgaaaccccatctctactaaaaaataaaaataattatccaggtgtggtggtgggcgcctataatcccagcttctcaggaggctgaggcaggaggatcacttgaacctaagaggcggaggttgcagtgagccgagatcatgccactgcactccagcctgggcaacaacagcaagactccatctcaaaaaaaaaaaaaaaaaaaaaaaaaaaaaaaaacagactccatctcaaacaaaaacaaaacacaaatgtggtatggcaatgaaaataattgctgtgttaaagacagtttcatagaaaataaaagaccactcaaatacaataagctgtctttttagatgggtataattattatccttatttaacaactaaagaaacaggctcagaggatgttatttgattggactgtgttgcatctctggacagtgcagctgagatcagacttcatgtgtaactccactagcctaccagggtgcctctcataaaggtaaaaaatgtaaatctggcctaatctacaaagttgccagggcagcactgggtcaattctacatacagtacttctatattcataaagagaaacattaagggaaggtgaaaatgcttctagaaggcgactgaacaccagcacccttgcttactacctttgggctcttctttaaggccaacagtgacctgaaattattgactgacttttccaatcaactggagaaaatggtaccaaggtcaccaacatcagacaaattcacttgaggacctatctatgtgctttgaaagacaaaactgcttttgtaaaggatacagtatttcagaaaaacaatcatattaacaactaataatactgtaaaatgctgatgtgttgaatgctactttagaaaaacaggttcaaatctaggaaaaaaatttccgacagaaagctatgtatcaattatctagctagctatctagagacatggtctcattctattgctcaggatggagagcagtgggatgatcatagctcactgcagacttgagttgctggccccaagtgatctccctgcctcagcctcctaagtagctggggccacaggtggacacaggtacacctggctttttttgtgtgttttgtagaaacaaggtttcactacattgcccaggctggtctcaaactctggagtctcgatctgtcgcccaggctggtctcaaactctggagtctcgatctgtcgcccaggctgggatgcagtggtgcgacctcggctcactgcaacctccacctcccaggttcaagcaattctcccatctcagctttctgagtagctgggattacaggcatgtgccaccacacacagctaatttttgcgttttttgtagagaccaggtttcaccacatgggccaggatggtctcaaactcctgacctcagatgatccacccgccttggcctcccaaggtgaggcggagtcaccacactttcttatgttattaaatagcctaacccaggaagggttacagctgtaatcccaacaactctaaaggccaaggtgagaagatcacttgaacccaggacgaaactggcctgggcaacatagcgagacccccatctctacaaaaaatacaaaaattaggccaggggtgcaccgcgcccggctaatttttgtatcttttgtagggacggggtttcrtcatgttgcccaagccatccatcctcacgcctcggcctcccaaaatgctgggattacagggcccagtcagcctcatgttttctttaagcagtccctccctattgcacacttggatagttttcttttttatttttttagacagagtttacctcagtctcgcaggctggggtgatgtagtgggaacatagctcattggagccatgaaccttggagttcaagtagctgggaagctgaggtgggacttcagagatggggtcgcgccatgttgcccaggctgttcttgactgcctggcctgaagggatcctcccacctccgccgcgcctgaacatagtttcctatttttgaccaacataaacactgtgctgagttggagtttgtcagctacccttctccagcaacaacaggacctggcggggaggtcccggttaccaggctgcactccaaggagaagacagccctgctccaggcactgtaccgccactgtgacgtcgtcgaaggtccgcctctgtggcgtcgccgaaggcacccccaccttcacgcggagcccatcggaactcgaggcggggctgctgggtcttccaggagcgcccagacgcgggcaggtggccgccggtggccacaggcctgggcaggatggaagcgcccgcagagcgggcgcttccacgtctgcaggctctggctcggccgccgccacccataagctacgaggaggagctttacgactgcctggactactactacctgcgcgacttcccggcctgcggggcagggcgcagcaagggccggactcggcgcgagcaggcgctgcgcaccaactggcctgcacctggcgggcacgagcgcaaggtcgcgcagaagctcctcaatggccagcgcaagcgccgccagcgccagctgcatcccaagatgcgcactcgcctcacctgagcctgggtacgtgcgcccaacacctcccccaaccagtgccccggggaccctaggagcgtccccccacggcgcggcgctgctcgccctgggcagagtcggctgcctctgagggaaccgtattagggaaccgcacccgccagcttggcctcttatggccatagcaatagcattaaagcctgcggaacttcataggtgggtagaaggggctaggaaacgaagaaaacatctttttaaaaatataagcgatcgatgcctgggtgcagtggctcacacctgtaatcccagcactttgggaggccgaggcgggcggatcacaaggtcaggagatcgaaaccatcctggccaatatggtgaaaccccgtctctactaaaatatatatatatatatataaaaaattagccaggcactgtggtgcgcgcctgtagtcccagctacttgggaggctgaagcaggggaatggcttgaacccgggagggggaggttgcagttagccgagatcgtgccactgcactccagcctggcgacagagcgagactccgtcacacacacacacacacacacacacacacacacacacaaatatatatatatatatmcatatatatatatatacacacatatatatatmcatatatatatatatatacatatgtgtatatatatatatatatgcgatcgagcccgggaggctgaggttacagtgagccgagccgagattgcgccactgctctccagcctgggtgacagagggagaccctgtgtctaaaaaaaatagatgcaggtaggagcttttcttccggcgctcatactcagactgaagaaagtaattgggctgggcccggtggctcagatctgtaattccagcactttgggaggcccaggcagacgtatcactttagctcaggagttccagactagcctggtcaacgtggtgaaaccacgtcgctataaaaatacaaaaaataagctgggcgtggtggcgcgtgcttgtagtccccgctacttgcgtggctaaggmggcaggatcgcttgaatccaggaggtctaggctgcagtgagccatgatcgccccacttcactccagcctaggcgacagagtgagaccctgtgtcaaaaaaagaaaaacaaaaaagtaaatgacctgcgtttttgtctgtatttcctacaggataccgaaggacctgttcgaagtatttactgtaactccaactgtaacttggttctgaggaggagagaatccatgtttggtcaacagaacttttcgctgtcacttaagtttactgcttcgatatcttttccttactaattgattgttaattaagtagtgcccaagtggattagcctttttagagtttattaattaaaagagagcagcaagaatggcattttaactctcccgggttttttttcagttactatggtaactcttttcaagtccacaaatgatttgttcttatctgtaaagaaaaggtcacaaagataagcggagagagaccaaagataggaatatgtgtaagatttctacctaaatgtcggccgggcactgtagctcactcctgtaatcccagcactttgggaggccgaggtgggcagatcacctgaggtcaggagtttgagaccaacttggcaaacatggcaaaaccccatctctactaaaaatacaaaaattagccggacatgatggtgggtgcctgtatcccagctactcgggagcctgagtcaggagaattgcttgaaccttggaggccaaggttgcagtgagccgagatcatgccactgtgctacagcctgggcgacagagcaagactacatctcaaaaaaaaaaaaaaaaaaaaaaaaggatttctacctaaatgtgatagactactctgaaggttaatatttgcatattataatgtatattgcacagtgtgtcaatctcaaataatcaaaagggtcagaatctaaagggagtttattcatgcacagagttttaggagggccacctgggaaccacagataccaaagagtggaagtcagtgttccaaggcttaaaagtttgggatcacttacatagacaaagtttagagaaccttagcagaattaaagcacctctccgtttagtccaggtggtctttctttcactctgtcacccaggctggagtgcaggggcacaattgcagctcactacagcctcaacctctcaggctcaagccatcctcccaccttagcatccctagtagctgggactacaggcacacaccaacacacccaactaatttttgtattttttgtagagacagggttttgccacattgcccaggtggtctcaaactgctgggcttaagcaatccactcaccttggcctctcaaagtactaggattacaggcatgagtgactgtgcccagatgaggtggtcttttttccgggaaaggtgtgtttaaccttccacactgaagatgtaagtcatagagtcttttgtgccatctggtgtgagttaggtacagaacaataaaggaggcagttaatcttttaacaaagatgagtgattggaaggagaggaggtctagtctctggtctctcatagtcatttacagaatgaaaataataaggaaagaataaattataatttaagaaccagaagttacgaacatgctatgtggctcaatcagggtgtaacttcccccttggtgtgataaatttatatggggtcctgaaacttttttttatagttggtaggttctccacactattgatcccacaacaatttttcgaggtagatgctgctatccacattttttttttttttgagacagtgtcttgctctgtcrtccaagctggagtacagtggcatgatctcagctcactgcaacctctgcttcctgggttcaagcaattctccagactcagcctcccaactagctgggattaaaggtgcccacaaccatgcctggctaatttttgtatttttcataaagaccaggtttcaccttgttggccaggctggtctcgaacacctgacctcagatgatctacccgcctcagcctcccaaagtgctgggattacaggcatgagccactgcgcccagcccacattttagaaaagggattctaaggcacagagagttcaagtacctttccaaagatgacacagctaattagatagcagaccaggtggcctgaccccaggactttgcctttggcctctatactaccttgttgagcacagcagtaaatatttcatatgtagttttatccagaattttcctgttggttgtggtaaaccatggtttgttcttttgagacaggggcaagctctgttgcccaggcttctggtgtgcagtggcacaaacaccagcctcaacctcttgggcccagacaatccatttcagcctcccaaagcgctgggattacaggaatgagccatcatgcccggcctcacactatattttaatgctttttttgaaaatggaaacttttacaggcaattcacttccttcaaactaatgataaggaaatgatgctgttctgttttgttttgtttttacatgttttttttgtttgtttgtttcttttttgagacagggtcttgctctgttgcccaggctggagtgtggtggtgcaatcatggctcacttcagccttgacctcccaggctcaagcaatcccttccccctcagcctcccaagtagctgggactgcaagtgcatgctaccacacttggctaatttttrtattttttgtagagacaggttttcaccatgttgccgaggctggtctcaaactcctgggctcagctatcctctaccctcggcctcccaaagtgctgggattacaggcgtgagccactgtgcctggctgatgctgttcttttcaaatgcatttgttggttttttatgttttttttttttttttttttttccgagatggggtctctgtctcccaggctggagtgcagtggtgcaatctctgctcacagcaggctggtctcaaactcctgacgtcagatgttcttcccacctcaatatcccaaagtgctgagatgacaggtgtgatcaactgcacctggtgattttgcttatttagctagtagaactttttaatttaaaaaaaaatgttgttgagctggagtgcagtggtgtgatctcggctcactgcaacctctgcctactgggttcaagtgattatcctgcctcagcctctcaagtagctgggactacaggtacatgccaccacacccaggtaatttttgtatttttagcagagatggggtttcaccatgttggcaaggatagtctcgatctcttgactttgtgatctgcccgcctcggcctcccaaagtgctgggattacaggcatgagccaccacccctggccaaaaaaaattttcttttgagacagagtctcactgtcccacaggctaaagtaccgttgcacagtcacagctcactgtagcctcaacttcctggactcaagtgattctcccaccatagtctcccaagtatctgagaccacaggtacacaccaccacacctggctaattttttttgtattttgtagagcaggggttttgccatgttgcccagactggtctcaaactcctgggctcaagcgatcttccagactcagcctcccaaagtgctgggattacaggcatgagccactgcacctggcctttttaattaaatttaaattgtaaatgtggtcactgtaggaaatatgtgtattacttatctactgctatgtaacaaattactccaaacctagtggcttaaaataaatacttagggccaggcacagtggctcatgcctgtaatcccaacactttgggaggccgaggtgggcagatcacaagtccagaagttcaagaccagcctgggcgacatcatgagactccatctctacagaaaatgcaaaaattagccaagcatggtggtgcgcacctgtggtcccagmtactcaggacgctgatgcaggagaatcacttgagcccggggggcagaggttgtagtgagccaagatcacaccactgcactccagcctgggtgacagagtgagagactgtctcaaaaataaataaatataaaaaaaacttagatctccatttctgtgggtcaggaattcaggagtgacatagctgggtcatttgggctcagggtgtctcatgacattgcagtcaagctgtcgactgagactgcagtcacctaaagcctgtttccaaggtggctcacttaaggtgactgctgacctgaggcctcacttcctgtcacatgagcctctctacaggctgcttaggtgtcatggtgtgacagctggctttcccaagtgagtaatcaaagagtgaacaaggaggaagccacagtaccttttatgatgtagtttgcaaagttgcaaaccatcacttttgctttttcctatctgtcagaagggaatcagttaacccagcccccactcaaggggatagggactgggctccaccttttgaagagaatatcaaagaatttgtggacatattttaaactaccatgctatgtttaattatggcaagtatggtcactgtagaaaaactggaaaatagggacaagcaaaaaaaaaaaaagtcacttataattccatgactcaatggatgacaktactagttgggtatatataattccaatattcaaaatatatatttactttctcaaactataaacacactgtgtactattgtgtaatcttctctttcacacaatgtattgtatgtattgtaaaaatacctttcacgtcaaatattctttcctaacttttttttttcttgagacggagtttccttcttgtcgcccaggctggagtgcagtggtgcaatctctactcactgcaacctccgcctcccgggttcaagcarttctcctgtctcagcctcccaagtagctgggattacaagcatgagccacccacacccagataattttttgtatttttagtagagatggggtttcaccatgttggccaggctggtctcaaactcctgacctcaagtgatccacccacctcagctccccaaagtgctgggattacaggtttgatccaccgtgcccagcccctcataatattttttaatggctgcatacatttcatcatatrtatgtatcataacttatttaacgaattctattataggacacttaggttgtttacaagtttttcctgttttacacattttgttaaataaacatccctacgacacatttatttgtacaatcttcactgtttcttaaattcctagaagtaaaatttctggaatacagtttgcataattttaaaacttcaaacacctgttacctaatttgagcagaatgtttactacaatattcaagagtccattcagccaatgtcatatctatgataaaacctgcaaaagttcggatattaataactgtaagtaaatttgttgagagtgactgaaatcactatgggatgagaagttgctatagaaattttactaaagagtgaactagccaggcacagtggctcacacttgtaattctrgcactttgggaggccraggcaggtggatcacttgaggtcaggagtttgagaccagcctaaccaacatggtgaaaccccatctctactaaaaatacaaaattagtcaggtatggtggtgcacacctgtaatcccagctacttgcgaggctgaggcaggagaattgcttcaacctgtgaggyggaggttgcagcgagccaagattgcgcctgggcaacaagagcgaaactctgtctcaaaaaaacagagtgaacttcacacatctgtcccagcaaactataaatggtatatagcagaattctggtattttccattctgagttttttgttctttgttttaattaactttttcttaatttgttttttggatagaatagattaactgcttcaaaatccaaaagctactgactgcccccygcaccacagacacccagtcccactgcctgaaggcaaccagtgttatcaacttcagatattttatgcatatccaatatggtcttttctgttttacacaaataatagcacactgtactcaattctaccccttccttttttttatcacttgtagtttattttggaaatcatttcacatcaatatacagagaagattcctcattctttttttatagttgcatattatgtgaatgtgtcttttttttttttttttttttttgagatggagtcttgctgtcrcccaggctggaatgcagtggtgcaatcttggctcactgcaacctctgcctcctgggatcacgccattctcctgcctcagcctcccgagtagctgggactacaggcacgtgccacctcacccggctaatttttgtatttttactagagacagggtttcaccatgttagccaggatggtctcaatctgctgaccttgtgatctgcccacctcggcctcccaaagtgctggaattacaggcgtgagccaccacgcccagcctgccattatttttttaaccaatattctattggcaggaatttaggttttctccaatcccttaccaacacaaaataactttgtgtgaacatctaatagtctttcaatttaggaatgaatgacttagccacgtttgagtaaaatggtgcctgttctggtctggattcctttctgtcttgaactgtccaaagttctcctcrctctaaacccttcttgtgccagaatgtatcctttataagactgcttttcttcatctctgcttttgaattatctaaaagcaagtaaaaagtcttattatttgtaaagcattcattcttttaagaagttatgtaaaaataaagctttgttttttacaaaagatttttatataattcaccctttttattgtttgaaatctttttatttcaatacttttgggggaacaggtggtgtttggttacatggaaaagttctttagtggtgatttctgaggttttgatgcacccatcaccygagcaatgtacaccgtactcaacagtgtagtcttttatcccttacccacctagcacatccctccaaatccccagagcccattatatcattsttttgcctttgcatcctcatagcttagctsccacattattcaccctttagttccaagtacattctgctgttgctgggacacaggaaggctgttttaaactctacttcctctgatggaagggagaaatttctgattgacatcaagcagaaatggttccatgtgtgcttcctctcctcaataaacctcackccaaccgcaagggactttcccatgagccccttatgaaatgccactagccaaatttccccttattttagcgatgtttaatgtaactgttgaaagcatttcaggctgggcctggtggcttatgcctgtaatcccagcccttgcaggccgaggtagatggatcacctgaggtcaagagctcaagaccagcctgaccaacatggcgaaaccctgtttctactaaaataaaaaattagccaggcgggttgacgtgcgcctgtaatcccaactactcggaaggctgaggcaggagaatcgcttgaatccgggaggcggaggctgcagtgagctgagaacgcgccactgcactccagcctgggcgacagagccagactccgtctcaaaaaaaaaaaaaaagcatttcacaccaagtatcactaaagcacagatccttggggcctttgcaattgctgttctctcttcctgtagtgttcttatcttcataaacacatggcttgcttccccacctcttcaagggctccgttcaaatgactcccccccgccccgcctaacctctaatttccagtctccttcctctcttttcatgtcaccaccacctgatttacgtwggcgtttgtgtctcccctccttgaaacttaacttcgtgaaggtagaatcttatctgatttggtgcagtatctccataacccagttagacagtaaatttttgttgaatttaccagtgtatggttactgtcccaattctggacacaaattctataatacatatgaaaaggagctgaaaatatatagtaatacataaatgtaaaacattattgctgcctgaatttaacttttgctgactggatccacagacaagaaagagaaataccaaatacaactaattcaactctgtttatttttgacraaaccgatttctttcattcagttcatactacgcgtccacactgtgcctccaaaaatatttgcccttataactgaatgctcagaaaggctaagaaatctgcccaaggtcccctggcaatccagccagagatgtgagtcactcttaaggttggatttaatacaaatgtttgaaggacggagcgacaggccagctgccctagggaagcaaaatgctaagtgctctgatgcgaggacsggaggacaaggttcgcggatgaaccacaggaacttccgggttttaaagatcctggcgccaagttcagggcgttgaccgcgaaggacgaggcgtccccgtgacgtcctgctcttccaatgaacttcaggcctgcggagacgacggagaacggaagttctctgcctgtgtgctggttggttgcgcgttgaggccagccccgcctcccatcttccggtctcckcagaagtcgcttagctcttcggtggttgtcmcacgtccggaggcctagccgtcgcktacctaggatgccgcgtggaagccgaagccgcacctcccgcatggcccctccggccaggtgagaccatcgcagggtttgagaccaaagcgcggccgtccggactctactggggcaatgacgcagagggaggccgcgggcgggggygaactaaggtcggctgcggcgtgggctcgcctctgccaggcgggggtagattgaacgtaaagcctatgttaggggagtgtggggagggaattcacttacggaaaaagcttcctatccaaacaacgggaaaggcataacgttatggccaggtggtaggaaggcataaattttgacctagcttgatttcggggaaaagagcacccaaggaaataatccggaaatggtcagagggagcgtgatacatatgaagatttttaaatacgtgcaggacataattagtcttttgttatttgagaaggggtctcgaaattgttgaaagcatctgaacgttgaacagatgasgaatagttgaagttgcttttggtataatagttcagacgagtcactttggccagtcttgttttgtaatgtgtaaaatgaaggaattggactagattatttccccagttgaccatctttaagtcctaattagaatgtttatttatttatattttgagtcagagtctaactcaggctgtagtgcagtgacgtaatyatggctaactgcagccttgacttcctgrgctcaagctattctaccacgtcagcctccagagtaactgggactacaggcatgcgccacctgtgcaccacacttggcgactttattctattttatattttagcagagacagggtctcattatgtggccctggctggtctcaaagtcctggcctcaaatgatcctttcgcctccacttccctaatcactgggattacaggcaagagccaccactccgcagcctatgttaattatttgatccgtcaataaaatgtaaactccatgaatgcagagatttttgtctcttgttcacagttacattaccagcgccttgtagttacctaatacttgaatgaatgaatcctgtaagaatctttctaacttttagtagtctgtatttcttatgacatgttggatatgtctttaaagatactgtgggctatccgaatacatggaaattgttgcaaagaagcagaaaaaactagtatgtcctaggctattactattataagaaaagattaaagtggccgggcgtggtggctcatgcctgtaatcccaacactttgggaggtcgaggcgggtggatcacttgaggtcaggagttcgagacgagcctggccaacatggtgaaactccgtctctactagaaatacaaaaattagctaggtgtggtggtgcgcgcctgtaatcccagctacttgggaagcggaggcagaagaatcggttgaacccaggaggcagaggttgcagtgagattggatcgtgacactgcactccagtctgggcatcagagtgaggccctgtctcaaaaaaaaaaaaaaaattaggccgtgcgtggtggttcacacctgtaatcccagcactttgggagtccgaggcgggtggatcacctgaggtcaggagctggagaccagccatggtcaccatagtgaaacctcgtctcaactaaaaatacaaaaaattagccggaggtggtcgcgggtgcctgtaatcccagctactcggaaggctgaggcaagagaatcgcttgagtctgggaggtggaggttgcagtgagctgagattgcrccattgcactccagcctgggcaacaagagcgaagctccatctcaaaaaaaaaaaaattgaagagagaaaatgatgtaaataatttgaaatgaaaatcttgaggtccattttaatatgtaagttattttaagttgacaatttccaaaactggttggaattgggaacttgatgtttttttcttttctttcacagccgggcccctcagatgagagctgcacccaggccagcaccagtygctcagccaccagcagcggcacccccatctgcagttggctcttctgctgctgcgccccggcagccaggtctgatggcccagatggcaaccactgcagctggcgtggctgtgggctctgctgtggggcacacattgggtcacgccattactgggggcttcagtggaggaagtaatgctgagcctgcgaggcctgacatcacttaccaggtgggaatttaggcagcatttcccttccatgggtggattttatgagaaaagccagacgtttgtaagttccttaagtgtaggaattgtctttgattttagaacccactgtgctgttaatagacaatgggttttaaagccacatttggccgttgagttactgccttaggccagcaccaacaagtactgtacaaattgtgtttcttcccaaggaggagacttacaacagtccacttgactcactgtaaaacaaccacttttccctttgaatatttcatcccagtgacacttcctactaatcttgtcttgatcttagttaacaaatcaaaaatctcgcatagctgtgtgttcttttacgtgatgtttgccattacccatctttctgatgtgtgtgggctttctagtctaatgagcataggtgtgtatactcttrtatttccggtgtgcttgaaactgctccatccagttttctataatagtaccatttttcctccctgaagcttcagtaaaccatttagtcttgataacaagataataattccactttatttgcatctttatttaggaatctttctggttgtaattggaattttgttaaaactgttggctttcagcttttaaatattttcacttttggctgggaacggaggctcatgcctataatcccagcacattgggaggctgaagtgaagggattgcttgaacccagaagtttgagaccaggctgggcaacatagcgcaaccctgtctttactaaaaatatttatttaaattcttcttttttggaggtggagtctcgctctgttatccaggctccaccgcccgggttcaagcgattctcctgcctcagcctcccgagtagctgggattacaggtgcctgctaccacgcctggctaatttttgtatttttagtagggacggggtttcaccatattggccaggctggtctcaaacgcctgacctcaagtgattcacccttctcggcttcccaaagtgttggaattacaggcgtgagccaccatgtttggcctaaaatattttttaagtaaatgaagatttaaatgttttcacttcccatgttaatagttggaaactttaattagcatctggtgctagttccattttccattaacctcaaagaggatggatactcttcattgtctaggcataagtatgattttctttctcagcaatgttgaatgttttgcctttgcaggagcctcagggaacccagccagcacagcagcagcagccttgcctctatgagatcaaacagtttctggagtgtgcccagaaccagggtgacatcaagctctgtgagggtttcaatgaggtgctgaaacagtgccgacttgcaaacggtaggtaatttgtccaatttacatctgcttaattcacagtggaattcctggatcctgtagaacttagggtaatctgtgtttaataaattagagaagactttgttgaaatttctctagaattaactcctaacaactgggccggaggtttctagtcatttttatgagtaattttctgaattttcttcctttagaaggtataggccaggcacagtggctcacgcttgtaatcccagcactttgggaggccaagacgggtggatcacctgatgtcaggagtttgaggccagcctggccaacatggcaaaaccccatctgtactaaaaatacaaaaaattagctgggtgtggtggcaggcacctgtaatcccagctactcaggaggctgaggcaggagaattgcttgaacccgggaggcggaggttgcagtgagccaagatcctgccactgcattccagcctgggcaactgggtgtctccagtgggagacactgtctcaaatttaaaagaaaaaaaaaaaaaagaaggtataaatcagtatgccagatcttactgtgattactggatgtaagtgaccttctaaccttaaggctgcgaatataagattagattctgttttcaccaaaatccaggaatagacaaaaagactgatacctggtatctgtacctcattgagtgaaaggagttaattaagttcctcaggggaactccggagattcagggtgtcttgttagttgtaggatgccttcagtagcttacaaacaaaaccataaccttcctggaacccagcactctggaaggccaaggtgggaggattgcttgagtccaggagttcgagaccagcctgggcaacatagcaagacctcatctctattttttatcaaaaaaaaacaaaaaacaaaaaacccatagccttggccttttgtcgctgctttcataatttggaaggcttctgttttattgagtatacgaagctagcattcttctaacttaatcttttctgtttgcaggattggcctaatgaagaagttcaacctggagagatggaaaatcagctctcataactaagttaatttagtataaaaatagaattgatagtgagggtataaagtgtaaccatcagttaaacctctcctgtcattcctrgcttccttgcttcagaattgaaatggaagtgggggtgtccctactctgtagaatctgggactgggcaaatgtttgtgtggcctccttaaactagctgttatgttatgattttattctttgtgagttaattagaataaagtcattttcttccaaggtatggttcatttagtctatagtctctggttatgaaattagcatcctcccagatctgacagctccctgaggggttatataaggagtagctcacttgcaaacataacatgctgctcaattcaaaggttctrgctgctgtgggtctggagttatgtaagctgagcagtagcaggaaactctgcttaaaatattgtttaaagctgtgcgtgctggcatgtgcctgtaatcccagctacttgggagactgaggcgggagaatcacttgaacccaggaggtggaggttgcagtgaactgagaccatgccactgcactcactgacagagcaagactctgtctcaaaaaaaaaaaaaaaatacattgttttaatcaggtgaatgataaaggaaacaggaataggtctatttggggtgggttccctgtggctaggtcagcactgcgtatcactattcctctactgtttccaagcaagcttgtgcaacccaccttttgttctgttttcttttgctttaggcttttagcagcctggagttatagtttgtctctagtgataagtggaaaagagcgatgaggaaggggttttactggcctaaccataaactgtaactaaacccatgactgcattctctcccttggacgcccctgattgaagataaaaarccattcttaatatatgcagttcccctgaaggtgcttttgctctgtttaaggtgttgtagcctcctcttcctaaaacactcaggctaactgccatcccccactccgtgctagggaagaactttaaggggatggaattcaatttggagtaggccacttttttcatgtcagatgggtagtgtgtcaatgcaaccagttttgagggaggcacacttcatgagtgtgaaaaccctgtcatcacacttaactacaaaaggatcagcaggtcttttttttttttttttgaagtgagcagcagagatggtttcactatgttgatcaggctggtatagaactcctgacctcaggtgatcccccagcctcggcatcccaaagtgctgggattgtaggcatgagccaccacacctggcctccgtaggttctgttttctgattttttttctgagtttcagagccctgcatcactgccaggtgagtgaaatgctggtgattgagggaattagccagttgctgtctcgcctcctatcagctgtgttcctggagtgcctaaacattcagttcctgaaagaggctccctttcagaaagagggtctcagcacagttcactcctggccagttcccyggcatattccctcctgggtttatagaagacacttttgctaattttcctggaggctcgggacctctgtgagtctgtagtgttaatgctcagatgtccctcgtgtccaggtgtagtggtgattcaaataaattgaatcaaagaaaaatgacgaaatgtaagcgtgactggccaggcctactccctggtaggagtcattgctacaaggagaaaggtgtggaataatcctctaggtgcactggccttttgccctaaagtcagaaaggattttgtgatgcattcattgattgtccagttggcgctccaattccctgagtttggtgtccatggattcagccaatcgaggattgagaatatttgaagtctgtgcaataaagtgagatccctacaaaaaataamtcagccaggtgcagtagcatgcacctgtagtcccagccactagggaggccgaggtgggatcacagaagcccagttcaaggttgcagtgatctatgatcacaccactgaactccagcccagagtgagaccctgtctcaaaataattttttggaaaaattcatggtcatttttgtaggaaacatgtagactattttccttgtcattccctaaacaatacagtgtaacaactttacatcctgtttatgttatactaggtattataagtaatctagagatgatttaaagtatacagcaggaaatgcataggttatatgcaaataatgtggcattttatgtaagggatgtgagcatccgtggatttttgttatccataggagccttggaaccaatcttggaagataccttagaaaccagcaagagtcaaatctgtagcttagaaatgtgagggagaaaataggtttttaatggtaaattaggcagggcgcagtggctcatgcctgtaatcccagcacgytgggaggctgaggagggcggatcacctgagttcaggagtttgagaccagcctagctaacatggtgaaatctcatctctactaaaaacacaaaaattagcaaggcatgktggtgggtgcctgtaatcccarctacttgggaggctgaggcaggggaattgattgaacctgggaagcagaggttgcagtgagatgagattgtgccactgcactccagcctgggcaacagagcaggactgtctcaaaaaaaaaaaaaaaaaaaaattagccaggcctggtggcacacacttgtagtctcagctactcaggctgaggcaaggagaattgcttgaaccctggatgcagtgagccaggatcgtgctactacactccagcctgggtgacasagtgagactcttctctcaaaaaaaaaaaaaaaaaaaaaaagcaaattagacctggcacagtggctcatgcctgtgatcccagcactttgggaggccgaggtgggtagataacctgaggtcaggagttcaagaccagcctggctaacatggtgaaaccccatctctactaaaaataaaaataaattagccaggtgtggtgacgtacgcctgtaatcctagctactcaggaggctgaggcaggagaatcgcttgaacccgggaggcagaggttacagtgggccaagattgkgccattgcactccagcctgggctacaagagtgaaactctgtctcaaaaaaaaagaaaaaacaattgctggccatggtgttgcccgcttttggtctcagctattcaggagcctgaggtgagaggatctcttgagtccaagaggtcaaggctgtagtgagccatgtttgcgccactgcactgcagcctgggcaacagagcaagaccctgtataaaaagcaaaaaaaaaaaaaaaagagaaaacagtaagttaaagagttccaggtatttaaaaccttgcagaatttgtgtttcaatgtgttgcatttcagtaagttggaggyttttatgcttagcactcattccctgaagtatttttcagctcttttgtatgtaaacaattcaacaaaaattttccccaaagtgaaagaaatagatggtcagcattattattattatttttttatttttgggacagagtctagcattattattattattattattattgagaccgagtctagctctgtcaccaggctggagttcagtggtgtgatctcggctcactgcagtgcctcccgggttcaaacaattcacctgcctcagcctcctgagtagttgggattacaggcatgtgccactgtgcccagttaatttttrtatttttagtagggacggtttcaccatgttggacaggatggtctcaatctcctgacctcatgatccgcccacctcagcctcccaaaatgctgggattacagatgtgagccaccgcacccagccagatggtcagcattataaggaactgctggcgcccacaacatctggggttaatctaggctctctgactcacctacttggcaaccttgaccaagtcacaatctctctaaaattggcttaataccagggtttcgttgtccaagtgaaactgtatgaagtgctttgtaaaatgtgtatcaattaggtatctgtggtcaagygtggtttctcacacctgtaatcccagcactttgggaggaccaaaacaggagsattgcttaagcccagaattttgagaccagtctaggcaacatcgtgagacccctatctcttgttattttattttttattttttttgaggcagagtctcgctctgtcacccaggctggagtgcagtggcacgatctcggctcactgcaacctctgcctcccgggttcaagcaattctcctgcttcaacgtccagagtacctgggactacaggcacccaccaccacgccrgactaatttttgttttgtttgtttgtttgtttgtttcttgagacggagtctcrctgtattgcccaggctggagtgcagtggcgcaatctcggctcactgcaagcttcacctcctgggttcacgccattctcctgactcagcctcctgagtagctgggactacaggcatctgccaccatgcccggctactttttgyattttcagtagagacggggtttcaccatgttagccaggattgtctcgatatcctgacctcgtgatccacctgcctcggcctcccaaagtgctgggattacaggcgtgagccaccacgcccagcctaatttttgtatttttagtagagatgtggtttcaccatgttggccagrctggcctcgaactcctgacctcaggtgatccgcccacctcagcctcccgaagtgctgggattgcagatgtgagccaccgcacgcagctcccatctctattttaaaaattaaaaatacatacaaaattaaaaacagccaggtgccatggcacgcgcctgtagtgccaactactcgggaggctgaggcaggggaatcacttgaacttgggaggcggaggttgcagtgagacaagatctcaccactgcactccaccctggcaacagagggagactccacctcaaaaaaaaaaaaaaagaaaaaaattaaaaacatatttgtgggctcagatcatgggtaaagcactgtctcccctacgttcaccccctgccatcaatttggaatattaggagtttggaaaaaggtagttttagaatgagagggaacaatgaaaactaagtgtccactgtgtgcctgcatgctgcacagtgctgccagttttgtcaactccctgtaaggtagactcatactgatgaggaccctggcaggaagtcacatgcaccgagagaccacgtttttcctggcatatgaaactcctcacaatagaaactgcaggctgaaaatgaaatgggtaaggaaagttctttaaaaaaataaaaatagggctgggggtggtggctcacacctgtaatccgagcactttgggaggccaaggcaggcggatcatgaggtcaggggttcaagaccagcctgaccaacatggtgaaacctcgtctctactaaaaacaaaaatcagctgggcgtggtggcacgtgcctatagtcccagctactcaggtggctgaggcaggagaatcgcttgaacccgggaggcagaggttgcagtgagccgagattgcgctactgcactccagcctgagtgacagagtgagactctgtttcaataaatacataaataaaataataaaagtaaaaggctgggcatggtggctcacgcctgtaatcccagcactttgggaggctgaggcgagcagatcacctgaggtcaggagttcgagrccagcctgttcaatatggtgaaaccctgtctctactacaaatacaaaaattagccgggcatggtggcaggcatctataatcccaggtactcaagaggctgaggcaggagaatcgcttgaacccgggaggcagaggttgcagtgagccaagatcgcaccgttgcactccagcctaggtgacaagagtgagactccatctcaaaaaaaaaaaaaagaaagaaatacaaaaattagccgggcatggtggcttgcgcctgtaatcccagctactcgggaggctgaggcaggagaatcgcttgaacccgggaggcagaggttgcagtgagccaagatcgcactgttgcactccagcctgggcgacaagagtgagactccatctcaaaaaaaaaaaaaaaaaaaaagaaatacaaaaattagccgggcatggtggcttgcgcctgtaatcccagctactcgggacgctgaggcaggagaatcacttgaaccccagaggcggaggttgcagtgagccaagatggcaccactgcagtccagcctgggcaacagagcaagactccatctcaaaaaaataaaataggccaggtgtggtggctcacgcctgtaatcccagcactttgggaggctgaggcaggcggatcacgaagtcaggaattcaagaccagcctggccaaaatggtgaaaccccgtctctactaaaaatacaaaaattagcctggcgtggtggtgcgtgcctgtaatcccagctactcaggaggctaaagcaggagaatcatttgaacctgggaggcggaggttgcagtgaaccgagaccgtgccactgcactccagcctgggtgacagagcaagactctgtctcataaaaataaataaataaaataaataaataaataaaataaaataataaaaataaaaggccaggcatggtggctcacgcctgtaatcccaacactttgggaggccaaggcgagtggatcatctgaggtcaggagtttgagaccagcctggtcagcatggtgaaatcctgtctttactagaaatacaaaaattagccaggtgtggtggcaagcatctgtaatcccaggtactcaggaggctgaggcaggagaatcgcttgaacctgggaggcggaggttgcagtgagccgagactgtgccattgcactccagcctgggcaacaagagtgagactccatcccccaaaaaaaagggccaggcacggtggctcacgcctgtaatcccagcactttgggaggtcgaggcaggcggatcacctgaggtcaggagttcgagaccagcctgaccaacatggagaaaccccgtctctactaaaaatacaaaattagccaggtgtggtggcacatgcctgtaatcccagctacttgggaggctgaggcaggggaattgcttgaacccgggaggcggatgttgcagtgagccaagatcacgccattgcactccagcctgggcaacaagagcaaaactctgtttcaaaaaaaaaaagaaagaaagaaagaaatacaaaaaatagccgggcatggtggcttgcgcctataatcccagctactcgggaggctgaggcaggagaatcgcttgaaccccagaggcagaggttgcagtgtgccaagatcacaccactgcactccagcctgggcaacagagcaagactccatctcaaaaaaataaaataggccgggtgtggtggctcacgcctgtagtctcagcaatttgggaggccaaggcgggcagatcacctgaggtcaggaattcgagaccagcctggccaacatggcgaacgaaaccccatctgtactaaaaatacaaaaattgctcggtgtggtggcgggcacctgtaatcccagctacttgggaggctgaggcaggagaaccgcttgaacatgggaggcagaggttgcagtgagccgagatcatgccactgccctccagcccaggcaacagagcaagactccgtctcaataaaataaaataaataaaacacataaataattttaaaaacccacacatctgatgtaagattaaaggaaggtttttttgttttgagacagggtctccctttgtcacccctggctggagtgcagtggcatgacttcggctcactgcaacttccgctttccaggtttaagtgattctcctgtctcagcctcctgagtagctgggattacaggtgtgcactaccacggctggctaatttttgtattcttcgtagagatagggtttcatcatgttgtccaggctagtctcgaactcctgacttcaggtgatccacccgccttggcctcccaaagtgctgggattacaggcatgagccaccgtgcctggccttaaaggaaggctttttagatgaaattatggagggtagatcagaggtggattcctgcaggggaaggtcccttattgattgattgattgattcagactgagtctctgttgctcaggctggagtgcagtggcatgatcatagctcactgaagccttgacctcccaggctcaagtgatcctccccactaagcctcttgagtagctgggaccacaggtgtgtgccactacacctggctaattttttaatttttttgtagagccagggtctcactttgttgcccaggctgctgtcaaactcttggacttaaacaatcctccygcctcggtctcccaaagcgctgggtgtgagccactgcacccggcctccctaacctgtacaggtctgcattatgtagggtgatcatgcacactgtccctgcgacagcccgggcagtcagctgctgcagtcatgcatygagaaagyctccagggcagtgctctcagcatacgtggaaatcaaaattgctcccagagaagcaagtgccctccgcacaaggctggatttacgttctctgggcctggaggccaagggagctccagaggggagactgatcactcttacatcctgtctggcctggtctcaggccacacaagcttccctcaccctccaccagaggtcccccacctyccgcccggagactgggctccatgccctgtccctgcggagccttggcctgcctcccgggtttgcagttgtgatttatttttggcacgttagcctccggtcatcaaatagcaaaacccaaaacaacagcagatgatatcttccaagtgtctgctcgggacacggcttcagccctctgtggtcccctctccccggggggctttgggattcttgtcaagctccttcaagagcctgcaagcacttaaccgtgagtagctagcccagtgatggacaaaagccaggtgataggcagggagcggggaggactgggggtggagaagatagaaacccccacatccattccatccatgtctcttttctgaaggcggatggaccagggagagtggcagcattgacccttgaaacctccatctgcaggaattttctacagaaaagaggtccccgggactgatctggtttttggactcagagttcaggggagggaagttatgtgccaaaaagtaccaggccaggcaggcgcgatggctcacgcctataatcccagcactttgggaggccaaggtgggagggtcacttgaggtcaggagttcaagaccagcctggccaacatggtgaaaccccatatctactaaaaatacaaaaattagctgggtatgatggctcgtgcctgtagtcctagctactcaggaggctgaggcaagagaatcgcttgaacccggaaagcagaagttgcagtgagctgagatctcaccactgcactccagcctgggcgacagagcgagattctgtctaaaaaaaggactgggccacctactcccatgtggtgaccctgtccacaggggtcttgggaaaggtgtgaggggtgggtggggcagtagacagaggcacaaagttggccccagtcagagctggggctggggcaagataaccgcctcctcagccccccaggaaaggtgagtgcagccacaagttggccaagctggctgtgccaaggactggaggcttgcgcctaggctggcatctcatatgggggtccaagtgtactttctgctcatggagggctgggggagaggagagagctagcgctacccagctttgggaggtgatgaggcaaaggtgcccattgtgaggacttaggacttaccagcaaatgggcttgtttttatgggaaacagacagtcccgggctccgccaagttgctgatggggcaggcagagaaggcctgtgtgtgagcagcccaggggcctggcaccagcagaggggacttgttattctaaaccttcttctggtaaccaggcacccagtagtggggccaccaggattcctggaacagcctgcccaatcccggaggcagccagagctgctgttggctggtcagcaaattggctcctttgtgagaccaggccttcttaggcccagaagcagtgggggaaagggggttggaggcagctttggcactgctgagtggcaggttgggcctattttctatctgcccttttccctgttggttttctgcattcctcaaatcctgcatctgattttgttttgttttgtctttttttttttgagatggagtctcactctgttgcccaggctggagtgcagtggcatgatctcagctcactgcaagctccacctcccgggttcacaccattctcctgcctcagcctcctgagtagctgggactacaggtgcctgccaccacgcccggctaattttttgtattttttagtagaaacagggtttcaccgtgttagccaggatggtctcgatctcctgacctcgtgatcctcctgcctcggcctcccaaagtgctgggattacaggcatgagccactgcgcccagcctgttttgtcttattttttgagacagagtctcactcactccgtcacctaggctggagtgcactggtgcactctcagctcactgcaaccccacctcctgggttcaagtgatcctcctgcctcagccttccaagtagctgggaccacaggcccgagagccatcatgcctggctaatttttgtattttttgcagagatggggtctcgccatgtagcccaggctggtctcgaactcctgacctcaagtgatctgcccacctcagcctcccaaagtgctgggatgacaggtgtgagccatcacgccacgcctaaatcctacatctgaagcaggagttgagttccctggtaggrgcctccatgttcctgacacaaagcggggtagctcagcgcctctgtgtacaggcctgagtgtcctggctctstactgcctctatcctgcagcaggacccctcagggctcactggccattgttaagtaggacatggggcattcttccagcaggaccctgagccaaaggggtacctgcccaacccttgactcacattcaaggtatagcccctgccggacacctgcactgggtatggggggcagagatggctaggacatcctagagatgataatctagtgggggaggtgacagcatacactgacaagtgacaccagaggcggaccaggatggacccacccagctctccatccctcagagcacccagcatggtggttggcaaagagtgggtgttcagtgtctgcagaatggagatgtaatgaatgagtgagtgagtgattatgaaagtcccagttatggatagaatacatgaggaagggccaggtgcagtggctcatgcctgtaatcccagcactttgggaggccaaggtgtgtggatcatttgcggtcaggagtttgagaccatcccggccaacatggtgaaactccatctctactaaaaatacaaaaattagccaggcatggtggtgcatgtctgtaatcccagctattctggaggctgaggcaggagaattgcttgaaccttggaggtggaggttgcagtgaaccaagaccacaccactgcacttcagcctgggtgacggactgagactccgtctccacaaaaaacaccaaaaacaaaaacaaacaaacaaaaaaacatgaggaaggagcagtgggatggagtgcaggaagcctgtcctagaagggggtgtgttttcagagaacacagtcacaacaaggggagataaggagaggctacaggagtggcctatttaaaaggaaattgtggccaggtccagtggtggttcatgcctataatcccatctctttgggaggctgaggcgggaagattgcttgaggccaggagtttgagactagcttgggcaacatagggagaccccgtctctacaaaaaacttaaatattagggcctggcatggtgtttcacgcctttaatcccagcactttgggagaccaaggtgggaggatcacctgaggtcaggagttcgagaccagcctggccaacatggcgaaaccctgtctctaataaaaatacaacaattagccaggcgtggtggtaggtgcttgtaattccagcttcttgggaggctgaggcaggagaatcgcttgaacctgggaggtggagggtgcagtgagctgagagccaagattgtgccactgcactccagcctgggggatactttagtcctagctactcaggaggctagggtgtgaggatcgcttgagcccaggtggttgagccggcagtgagctataatcgtaccactgcactctggtacagagatgggtaacagagcatgaccccatctctacaaagatttttttttttttgagccggagtctggctgtgtcgcccaggctggagggcagtgatgcgatctcggctcactgcaacctctgcctcctgggttcaagcgattctcctgcctcagcctcccaagtagctgagactacaagcgtgtgccaccacatccggctaatttttgtatagtagagatgaggtttcaccatgttggccaggctggtctcgaaatcctggcctcaagtgatctatctgcctcagcctcccaaagtctgggattataggtgtgagccaccacgaacggcctcaattcacaaacatttatttggaacattcactataggccagtgtagtgccaggagatgtaaggatgagtgagaaacagttccagaccccaaggagaacagcccctgggtcaggaaggctgacagcttctttcttttcccctctcagagccacccagagttccctcactgaagatctgagcatgacccgggacgaggcactgccggactctcattctgcacaggacttctatgagaattatgagcccaaagagatcctgggcaggtaaagcccaagctttccccacgaagtgctgtcctaggctccagcagaccctgtgggctacagccagctctgctccaccccgagtactaacgccactttcatccccaaagtgctgttcacttggagaaaccctttgtttggggtcctgccctcctgaagccaggacagataagagaaacctctcccagcaaaaagttcccaggggcaggcgcaatggctcacacctgtaatcccagcactttgggaggctgaggtgggaggattgcttgaggccaagagttcaagatcagcctgggcaacatagcaagaccccgtatctttttttttttttttttaagatagggtcttgccctgtcatccaggttggagtacagtggcatgatcttgactcactacgatctctgcctcctaggctcaagtgatcctcccacctcagcctccctagtagctgggacaacaggtatgtgccaccaggtctggctaaccatctctattttttttttwaaaaaggggggrccaggcacagtggctcatgcctgcaatagcagcacttcctgcaataccagggaggccaaggcaggaggatcacctgagatcaggagtttgagaccagcctggccaacatgttgaaaccccatctccagtaaaaatacaaaaattagctctgtgtggtggcaggtacctgtagtcccagctactcaggaggctgaggcaagagaattgcttgaacccgggaggtggaggttgcagtgagctaagattgtgccactgcactccagcctggcaatagagcgagactccgtctcaaaaaaaaaaaaaaaaaaagcactgaacggctcaaaaaggaaaaaaaaaaaaaaaaaagagtcacacggcctgagagcaggcttgttactcaccagttctgggcaaatcacctgtctgtgcctgtatttattcatccaccatttccaaaagctcagaggaagttgggggaaagtgtaaatctctgtcaagggcaggacatctctgctgcagcctctaatctgggaccccccatggggtgaggggccccccgaggccatctgtcctctgcactcccaggggcgttagcagtgtggtcaggcgatgcatccacaagcccacgagccaggagtacgccgtgaaggtcatcgacgtcaccggtggaggcagcttcagcccggaggaggtgcgggagctgcgagaagccacgctgaaggaggtggacatcctgcgcaaggtctcagggcaccccaacatcagtgagtgatggccccaagccacacggcagggtgcccccctgtgattctgccctgacagcccaagccagggartgtggccccaccgcacagccaactagaaccacccaggctcaaggctcccagctccaccctcactgctctgatagaaggggtcccaggcagggatggatgcaggcaggggaatgggggtttgatgtccctgggctgaattagccaggcatgctggtgcatgcctgtaatcccagccactcgggargctgaagcaggagcatcactcaagcccagtagtttgaggctgcagtgagttatgattgcactattacactccagcctgggtgagacagtgagatcctgtctctaataataataataataataataataataataataataataataaagtccctgggcctgcccacatcccaggttgacgtctttgagcaccctcctgattcccstgtcagcttttgaagttagcccacagcagcctcggtccctgacccccgtgccccggctgcccctgcctgggctcccctgctacttgagacaagctagccatttccatttcagtacagctgaaggacacttatgagaccaacactttcttcttcttggtgtttgacctgtaagtacccagcactggagcaagccacacctgagagaacctccgactgctgtcccctccccaaccccagggctgcctggagaccacagccagctcctgcgctgaggatgccaaatacaatcacggtgtttagacagatcagcccctggggtcaggctgccggctttggaaacctgggttcaccacttgtgggctggatcatttctttaaatcttggttttctcatcagtattatgggagtgataatagcacagtgactggcatagtgtgaatactaataattattagctacaggcgggcgcagtggctcacaaccgtaatcccagcagtttgggaggctgaggccccagctacgcgggaggctgaggcaggagaatcgcttgaacccaggaggcggaggttgaagtgagccgagatcacgccgttgaactccagcctgggctacgagagcgaaactccatctcaaaaacaaaaacaaaacaaaacaaaaaaaaccccaaaactcttggcctcacgtgattctcccacctyggcctcccaaagtgctgggattacaggcataagccaccgtgcctggcacagtatagtgatataattgttctattttattattggttgttagtctctgactgtgcctaacttataaacttcatcttaggtatgtacatataggaaaaacatagtaagtataggcttcagtgctatccatggtttcaggcatccactgggggtcttggaacatatcctatgcagataaagagggatgactgtagacatatataaagtagaacaaggggttagcaagagacaggggcttccttagaccgagtggtcaggaaagcatgtccaggaagtgacccaagcagagggtggcaggatgtaaggtcggtcagcaccaaagaccaggtcctgcaggcattttagccatagtaaggagtttggagggtcaagactgggagggtgacatgatctgatttacttttttttttttttttgagacagagttttgctattgtcgcccaggctggagtatagtggtgcgatctcggctcactgcaacctccgtctcctgggttcaagtgattctcctgcctcagtctcccaagtagctgggattacaggcacccaccaccatgcccagcaaattttttatgtgtgtactgttttagtagagacagggttttgccatgttggccagtctggtctcgaactcctgacctcaagtgatccactcgcctcggcctcccaaagtgctgggattacaggcgtgagccactgcgcccaggctgacttccttttgaaaagatctcactgactatctagggacgactgtaatgaggcgggattggaaaaagggaggccagcagtattgaggagagaggcaggtggtagaggttgcatctggggtgtggtccaaagatcaatatcatcatcaccatcaccaccatcatcaccatcatcatgcccctgctttggcatcaataggattagtaagatgagccccttatttctaagcatcaaatgtgaacaatacaaagtgctctgtgaaatgcaaattccagacttatcatgggccaggcacagtgcctcacacctgtaatctcaacactttgggaggctgtggtgggaggattgcttgaggccaggagtttgagaccagcctgggcaacaaagtgagaccccatctctacaaaaaaatataaaattaaggccaggcatggtggttcacccctgtaatcccagtactttgggaggctgaggcaggcggatcagatgaagccgggagttcgagaccagcctgggcaacatggcaaaaccccatctctacaaaaaatacaaaagttagcccaggatggtgacagatatctgtaatcccagtcactcaggaggatgaggcacaagaatggcatgaacccaggaagcagaggttgcagttagctgagatcgtgccactgcactccagcctgggcaacagaggaagactttctcggacccctccagactcaccagctgcagctgtctcgactgctctgtggcactgtcctgtatagcccttggggacagctcaaatgtctttaacctttgaagaagttgctgggggaagctatttttaatgctgccctgaggagccctccagggtataactagattgttctagcagagtcctttctagatcatcccaggaggtaagaagattgaacctcaattcttaatcctgtaattggcaaactwtgctcctgcaactcttgcacagccgattcttcccatttgtttcctgggaaaaaatcgggatactcggccaggcgtggtggctcacgcctgtaatcccaacactttgggaggctgagacgggtgatcacctgaggtcaggagttgaagaccagcctgggcaacatgatgaaacgctgtctctactaaaaatacaaaaattagctgggtgtggtagtgggcacctgtaatcccagctactcgggaggctgaggtaggagaattgcttgaacctgggaggcagaggttgcagtgagccgagattgcatcattgcactccagcctgggtgatgagcaaaaactccatctcaaaaaaaaaaaaaaaaaaaaatcgggatactcacgtccttctgatctgggtctggggtcctgggccagtggttcatagtcccctctttcagcctccagccatcatttaggccccgatacatcccagtccacactgtcacttccacagatgggaagacactgatacaatggagatggaacagaaatggtgcttgggctgggactctcccaagtccaccaacttcagggcccagggcagggcaaggtactgctcacagggccaccagctcsgggcccattgcttccctggtcacttctagccatcctggcctggaactagggtaatgggaacctggggaggggacttagctgaagaaatgcctacctcatgaaatggtgggaaaaatttttccaggggaaaaattcagtcaggggagaaacctaggcctattcctcggagggttgatgagagcctgagcccctgatgtgggccacctctccagcctcctctgcttttctcccagttcttccagaacacttctcacttccccrgctcctctccccagactgtggytctccayggagagtggcccacttagcttctagaggtatcagggyggaaggcagctctctgggagcagggtaagggcagtggtggtcttgggaccgatccagctatcaaccctctgtttccacaggatgaagagaggggagctctttgactacctcactgagaaggtcaccttgagtgagaaggaaaccaggtgagggtccctttgcccttctctccgctccctcccacgtggcttagggccacaggcactggggtctcaggggaggcagggcgtgcacatgtctgggctgrgcgtgtgtgctgctcccttgcagtgtggctgaaatgtgagctgtgtctccctgcctgttacctgaccctgagcagaggaagagtaacaagtgtgtgccccaccctagaaagatcatgcgagctctgctggaggtgatctgcaccttgcacaaactcaacatcgtgcaccgggacctgaagcccgagaacattctcttggatgacaacatgaacatcaagctcacagactttggcttttcctgccagctggagccgggagagaggctgcgaggtctggtaacatggccttggcccacgtccaggcctcgggtgctcaatcaaccatctgcagaatagagatggtctgggtttctcccctaacttaattgttccctggaataaaaattccaccatttcaagggctagggatttttttttctttttctttctttttttttttttttgagatggagtctcactctgtcgcccaggctggagtgcagtggcacaatctcggctcactgcaacttccacctcccgagttcaagtgattctcctgcctcaacctcctgagtagctgtgattgcaggcacgcgccacaacgctcggctaatttttgtatttttagtagagacagggtttcaccatgttggtcaggctggtctcgaactcctgaccttacgatccgcccgcctcggcctcccaaagtgctgtgattacaggcgtgagccaccatgcccagcagggctaggcatttcttcaggtaagtcctctcccaggttcccattacccttgttccaggccaggatggctagaagtgaccagggaagcaatgggccatgagctggtggccctgtgggcagtatcccgccctgccctgggccctgaagttggtggatgttgggggagtcccagcccsagcgccatttctgttccatcatctccattgtctctttggacttcctctctttttyttttgaaacagagtctcactctgtcaccaggctggagtgaagtggggcgatctcagctcactgcaaactccacctcccaggttcaagcgattctcctgtctcagcctcctgagtagctgggactacaggcacatgccaccacgcccagctaatttttgtatttttagtagagatggagtttygccatgttggccaggctggtctcgaactcctggcctcagatgagccacctgcctyggcctcccaaagtgctaggattatagaaatgagccactgcggccagcctggacttcctcttctgagtgccctgctgacctgccctgatgatgactgttcctgcagaggtctgygggacccccagttacctggcccctgagattatcgagtgctccatgaatgaggaccacccgggctacgggaaagaggtggacatgtgagtgcrccgggaaaggaggagcacccagctaggctgggcaagggaggaagtaggcagggctgggccggtgcccctggcgctgggtaagtggccctgggccctcgcatgtccaggtggagcactggcgtcatcatgtacacgctgctggccggctccccgcccttctggcaccggaagcagatgctgatgctgaggatgatcatgagcggcaactaccagtttggctcgcccgagtgggatgattactcggacaccgtgaaggacctggtgagaggccaggccaactggctcctgggctcagggctgcgatgccaggcgcccctgcccggggaggccctgcctttcctgacatgctggaggggacctgccttgacatkctcggttcccctctcctcctctcacaggtctcccgattcctggtggtgcaaccccagaaccgctayacagcggaagaggccttggcacaccccttcttccagcagtacttggtrgaggaagtgcggcacttcagcccccgggggaagttcaaggtactaagcgtcctgatccaggcccgccagctccctaagtgcaaacctctaagccccctcctctcccaggagtccttacaccccgtgaatttccagagtacccatccctcccctcccagctgccctgtgatggcttcaaagacggcaggtgtcagcccactggctcggtccctgaggatgctggccaagtgggaagtrggggacactaggaarrccccgcagaagccacccaaggcttcgtggcaaacragcccagagcgtccctgtgctggaggggcagggcctggcagggcgggggctgcagcccagcttctccgcctggccctgcaggtgatcgctctgaccgtgctggcttcagtgcggatctactaccagtaccgccgggtgaagcctgtgacccgggagatcgtcatccgagacccctatgccctccggcctctgcgccggctcatcgacgcctacgctttccgaatctatggccactgggtgaagaaggggcagcagcagaaccgggcagcccttttcgagaacacacccaaggccgtgctcctctccctggccgaggaggactactgaggggctggccagtcagggagggctagggggcaggtggggaggggaagccatggaaatacaagtcaaaggggtgagatgcgtgcaggcctctgcagaaggagcacttggccctggccaggaacccctggaactgaggccacgatcccctctcaaaggctgtgcacaagggaagtgggtgttcccaccacacagcaatacctgcaggctggggcaggccctgggtgggcagagatcacacgtggcctgagaaccaggaaccccctgctcctctacttcctagatgagccaccatctccatttctctttaggggaggcccagagttactgacactcaggctttcttcccttagggtcacagggtgaggatcaaagacacaaatgtctgagatacacaattgcaggagattttattggccccatgacatccagtgacagtgtgggagcaggctactctccagggacatgtttttggaggcatatggagaagggggcccaggcgaggtggctcacacctgtaatcccagcactttgggaggtcgaggtgggaggatcgcttgaggccaggagttcgagaccaccctgggcaacagagcgagatcccatcactacaaaaattcaaaaaattagccaggcatggtggtgcacacttgtagtcccagctactcaggaggctgaggtgggagaattgcttgggcccaggaattcaaggctagagtgagccgtgatcaccastgcactctagcctgggcaacagagaaagaccctgtctcaaaaaaaaaaaaaaaaaaaaaaagaataggaagcttctgatatttgtctttctggagtactatttgctttgtgattcccacaatgcaatgcttcacctagtacatcatctggttctcccagacccttttaggactgaactgtgctttaaatagttacatgtctgcctgttacacagtggaaactagtttccttcagagggacacgaaaccacagatgaggccacaaagaaagcattctccttccacagcaactggctgagaaaacagaaccaggaaaattctgccttgaggaaacaatgtcagcttcctgaatcatccagggagaaagggggagagaatagattttaaaatgcttaaaaaatggcctttcagagtgctctgttccaaytgtttgtgtgtttgcaatcctgtgtcaataatactyggcctctaacagaaacacctggcccccagccatcgtcaacacacattgggccccttctccaaaacacaggaggctgagtcctctcctgccctggtgagaggcgcctgccacagagggatgggagacagggaaggggaagttctttcctgaggctgaagctctygagcttggaattgcgctgtttgcaacatggccagggaatgacagtgaccctagaaggcttttctccttgtcaccacccggctgcttacagctcccctggcggccggcctgcgtctgcagcacagcggaaaccgaggttgtctgaggctgaatctggagtgttgcccatcctgccagcagagaaggggagagaggacagacacgtcctgagaaaaaggcctagggcttacccatcttgcctgcctcatccgcagggccggccatgatcagggagcatgagggctggggagagcatggtctggaaagaagcctggtgtgaggacaggtcctgagcctgtgccagtcctgggagaaaggggacaagaaggggctttgggacaaaaggagtcttgcaagagtagggggagggacagtggccccaagagacagcactgragagcagaaaagacagtgactaacttctatgttagcagttgacaacagctcagtagagaaaacctgtccacaagcaatgagaatatcacggccgggtgcagtggctcacacctgtaatcctagcattctgggaggccaaggcgggctgattgcttgagtccaggagtatgagacaaacctaggcagcatggcaaaaactcatctctacaaaaattagctgcacctgtagtcccagatacttgaggagctgaggtggaagaatcgctagagcctggcagtttgaggctgtagtgagctgagactgtgccactgcactccagcctggacaacagagcaagactctgtctcaaaaaaaaaaaagatttttcgtgtgcccaccagtttgaagagtcagtaagtccatgaccaccagtaatgacctactggtgtggtcattctacttccctccctttgcccacctagtggtaaggacaagaggagaaaccccataattaagatgccacacacagtctccctgggtaccaagagctggcaggagagtcacaaggtgtcctgggtccctttgcttttcatagcaagtgctgctggctttcttttttgtacccacaactgggcacaggctcagggaggtgctgggaccagctcrtcacacacagacggttggtggtgtgaaggtagggacactctgggaccgggattcagacatcagcccccagctacaaggccccgtgttgcctgggaccaagccccttacctggtggtgacccgggcccggtgattggcagagccatcagctgtgtcgatccaggatgccccccggaggacgcgcatgtcctgctcagcagcctggtacggtgatgctgtccactcccacacgttccccaggaggtcatagagccctgcagccccaccggcgggtcaggccaggctgggaccygccgaccaccccgcntaccctctgaggtcctgggggccaaatggcagaagggaggtgcttccctctgcctcctctctcagacatgatggtcccaacagccagttcatgggcacagccgcaagcccaagacagctcttaccgtagttgttctgggcggggaaagcattcactggggagactccatggaagccatyctcagctttgtctcccttggggaactttccctgatgggagaaaggaagggtaaaggatttaccacctgtcccaaagcaggtcctcatgcctatccagaggaaaaccaaggtcgtcttgctgttgcatctggggaaggggaagggcacggggyggtgacctaagattcctatctagagctcccaaacccatcaccttacatccccagggtgacccccactgctggattaggaakagtgtttcccctgtacccacagggctccaggtcaagcccagcccacacctgacttctccactctcagcaacatcctgccctctgcctggaaccccacatgccacagtgcctcaagaagacaggatcctctgcatcctgcccccatgtctcatgcctgagcactgcagcctattcctgctggccttctcaggacagtgcttttttatttgcttattttagttttattttttattcacttttttttttttgaggcagggtctcgttctgtcgccaaggctagagtacagtggtagctcactgcactccagcgtggggcaacagagagagactctgtctcaaaaaaaaaaaaaaaaagaaagcacttatgacccattgtcttttgctttaccagcttatgagtcatcagttgcattagaacccaagccttctggatgccgcggcctaacaacacagtgcccagcctccagcaggtctctgtcaatgcttggtgaaaggaggaacgtaggtcttacctgccacaggttggtgcggtttggctggaaccagttcccccatgggtaaacttgacctgcgaggagagcaaggaggcagcagaggagggggaggtgaagaattagggaaggaaaaaagaacacagaaagagtgagggaatcaaaaggaagttagagggtgatgagaaaaaagagtgaatgacctgcttttatttgccatgcccatcctctccactcgctgaactgcattagagggccctggcctcctcatgtgctccagggcaatgtaatcctaagcatggttctgggacctgagccagtttataaagcatctgttatcagttcatgttgagaaaagtacagaaatcgagaaacttgaaattggacttagattgcataaatgaatgagccagaggcaacctcacaggtcatattaaaaacttcgatcactggctggtcgcggtggctcacacttgtaatcccagcactttgggagaccgaggcagatggatcacgaggtcaggggttcgagaccagcctggccaacacagtgaaatcctgtctctactaaaaatacaaaaattatgcagggcatggtggctcacgcctgtaatcccagcactttgggaggccaaggcagacggatcaggaggtcaggagatcgagatcatcctggctaacacggtgaaaccccgtctctactaaaaatacaaaaaattagccgggcgaggtggcgggcgcctgtagtcccagctacttgggaggctgaggcaggagaatggcgtgaacccgggaggcggagcttgcagtgagccgcgatcgcgccaccatactccagcctgggcgacacagcgacactctgtctcaaaaaaaaaaaaaaatagccgggcatggtggcaggtgcctgtaatcccaggtactagggaggctgaggcaggagaatcccttgaacccgggaggcggaggttgcagggagctgagatcgtgccactgtactccagccttgggcgacagagctagactgtctcaaaacaaaaaacaaaaaacaaaaaactttgatcactgatgtacctggtgttcactgaaagattgtgtagaggggtttaatgtgcggagttgctttttgctgtcctaactttttgtgtaattaggattgcagaatgacaaatgaccgagttaggagcaaacagtgattctttttttttttttttgagacggagtcttactctgtcgcccaggctggagtgcagtggcgtgatctcggctcactgcaacctccacctgccaggttcacgccattcccctgcctcagcctcccaagtagctgggactacaggcgcccgccaccaagcccagctaatttttttttgtatttttagtagagacggggtttcactgtgttagccaggatggtctcaacctcctgacctcgtgatccacccacctcggcctcccaaagtgctttgattacaggcgtgagccactgcgcccggccgcaaacagtgactcttaacattaatctctgtaccccagaggcagaagtgtgtagtcttggtaattctttttccttatgctatgttgctctagttatatttattgaaatgtaacatgtctgtggaatttccaataaaatattttatgtctgttctttcaattttccagttattaatttttatggtattttatatcagtctgagatggactagaaattaaaaaaaaaaaaaaaacactggtcctccaccacagatagcttaagaagcactgctctagggaacacagacccttcctgccccatccccccgctttttcttttgagacagggtcttgttctgtcactcaggccagacagcagtggtgcgatcatagctcgccgcagctttgaactcctaggctcaaaggatcttcccacctcagcctcctgagtagctgggactacaggcacatgccaccaggcccagctcatttttgtatttttcggagagacagggtctccctatattgcccaggctagtcttttactcctggcctcaagcgatcctcctgccccagcctcccaaagtgttgggattacaggcataagccacygcgcccagcccctttccaccctttaaagcccctcatgctgggcaggatggggagaagaataaaggaaaatcgccttatcatctggatacccttcaagccccctcgggcggcaaactcccactcttcctccgtgggcagtcgttttccccgccaagcacagtaggcacgggcgtcattccagctcacgtgtaacactgggtgctccagtctctctcggatgccagagccaggacctgcaggctgacrgccaggattaagtgagacaggcttccgggagcgcattaagtcggaggcaggctaggtttagggcgcccgcgttcagcttttaccactagatggagcaagagagctggaagagagccgggtgagtgaccagtggtcggagtcagaaaaaagagactacaggaggctgaagggagaaatggatgggtaacaggaaacaggattcgggcaggtgaaacaggcctgctgagcgctttccctgatattcccctatccttctttgaaactcagtgttcctggatgtacgaggggtagagaggaggcygggcctggagaataagagtcaagcaggggtagaaaatgaggtagcggaatcagcccttacctgcctccaaaatgccttttccactggaagccaccagagtacagactgcgaaaaagaaggagaccgactgcaagatgctccggcccagcaaaggcacctccccgactgagccacaggacgcagaacagagacgtcaggctgagactcaggtggtctaagtgaggttgtggctgattttttttttttttttttttttttttttgagacaagatcttgctctgtcactcaggctagagtgcagtggcaccatcagagctcactgcagtctcaacctcctggactcaggtaatcctcccacctcaacctcctgagtagctgggactacaggtgtgcatgaccatgcccagctaattttcttttttttcttttttttgtagatatgggatctatgttgcccaggctggtcttgaattcttgggctcaagcaattgtcccacctcggcctcccaaagtgctggggttacaggcgtgagctgctgcgcccagctgagactggaatctttatagagcccatcttaccacccttattagaggttggcttgccaaggtgatctctctttttttttttcttttgagacacagtctcactctgtcacccaggctggagtgcagtggcgccatctcggctcactgcaacctctgccttccaggttcaagcgattctcatgcctcagcctcctgagtagctcagattacaggagcgtgccaccatgcctgtctaatttttgtatttttagtatagacggggtttcgccatgttggtcttgaactcctgacctcaggtgatccactcacctcagcctctcaaagtgctgagattataggcatgagacaccacgctcggcccaccaaggtgatctcttgattcaagttccttggatcctatcctgacttggacatttaggcaagagctaacttgggttcagggttaacttcctgggagtgtgtactgatctgacgctccatggtgagtttctcttgcttcccctctgcctccacctctcaggtctgattctccactgtgtcccaggtaacccatgtcccacaggattccctgtccaggtcccactcctatcccctcagctgcaagaccaggttctctcaccttcattggctgggtggctttgtttctcagctcatcagagacaaagtcctcaaagacaaagctccatccaaacatctcagcttctgtccgatactttttctccctgacaaaatccctataaagacatagttcagctggttcagctggtgaggttctgtgcccaccccatcttctcctgctccaggamacttcagatatccctgtcctgtaagttatacaccacagagtgttcatgattgccaaggaattaacctgaagcctgagtgattttcttttaaattagaatacaacgaattcacatacagtaaaattcactctcttcagtgtttagttctgtgaggttaattaattttttattttatttgtttgtttatttgtgtatttatttagagatggagtctcactctgtcgcccaggctggagtgcaatggtgtgatctcggctcactgcaagctccgcctcccggtttcacgccattctcctgcctcagcctcccaagtagctgggattacaggcgtctgccaccacgcccaggtaatttttgtatttttagtagtgacagggtttcaccatgttggccaggctggtctcgaactcctgacctagtgatccacctgcctcggcctcccaaagggctgagattacaggcgtgagccaccacacctgtcctatttatttatttttttgagacaaagtctcactctgttgcccaggctggagtgcagtgacacaatctcagctcactgcaacctccacctcccaggttcaagtgattctctagcctcagtctcttaagtagctgggattacagacgcataccaccacgcccagctaatttttgtattttttgtaaagatagggtttcgcaatgttagccaggctggtctcgaactcctaacttcaggtgatccacccaaagtggcctcccaaagtgttgggattacaggtgtgaggcacaacacttggccaatattttttttttttttttttgagacagagtcttgctctgtctcaaaaagactgttgcccaggctggagtgcagtggtgcaatctcagctcactgcaacctccacctcctgggttcaagcgattctcttgcctcagcttccccagtagctgggattacaggtgcacaccaccatgcccactaatttttgtctttttagtagagacgggtttcaccatgttggccaggctggtctcaaactcctgacttcatgatctgcccgcctcggcctcccaaagtgctgggattgcaggcatgagccactgtgcccaaattattttttatttaattatttatttatttatttatttatttatttatttttagacggagtctcactctatggcccaggcttgagtgcagtggcatgaactcagctcactgcaacctctacctcctgggttcaagcgataatcttgcctcagcctcctgagtagctgggattacaggtgtatgccagcacacccggctaatttttgtatttttagtagtgatggggtttcaccatgttggtcaggttggtcttgaactcctgaccttgtgatctgcctgcctcagcctcccaaagtgctgggattacaggtgtgagccactgcgcccaaccaatcatttatttttttgagaccaggtctcactctgtcacccaggctggagtgcagtggcacaatcatggcttactgtagcatcgacctcctgggttcaagagattctcgtgcctcagcctcctgatttattttaattatttatattttgagactgggtctcactctgtcacccagactgcagtgcagtggcataatcacagctcactgcagccttgacctcctgggcccaagcaattttccctcctcagcctcccaagtagctgtgactacaggtgcatgccaccatgcctagctaattttgtagagatggggtctcactatgttgcccaggctggtctaaaaattctgagctcaagtgatccacacacctcggactcccaaagtgttgggactacaggcatgagccactgtgctcagcagttctgtgagtttgacaaagcatatagtcactacaataatcaagatacagaatagttccatcggtcacctccaaaaaaatttccctgcaactcaccaaccacggaccaggtttttttgtccctatagttttgcctttcccagaacaccatataacttgaatcatacagtatgtagtcttctgggtctggcggaggtttccttcacttagcaaaaggcttctgagattcatccatgttgttgccattagtagtctgtccctttttatcgatgagtagtatcttattgtatggacataccatattttgttcatacacttaccagctgaagatcatgtgagttatctcctgtttttggagatcatgaataaagccactggagcaggagatttaagggtggggaatgtgtctcttttctgaaaggtctccagcacatcttttttttttttcttttttttgagaaaggatgtctctctgttgcccaggctggagtgcagtggtgcaatcatggctcactacagcctcaaccttccacactcaagtgatcctcctgcctcaacctccctaatagctgagactacaagtgtgtgctaccatgaagggctaatttttttttttttaatttttagtagagatgggggtctgtgttgcccaggatggtctcgaactcctgggctcaagtgatcctcccacctcagcctcccaaattgttgggattacagacgtgagccactgcatccagcccttcatcacatatctcatctcacaacaaccatcagagatagatgtaacaggtgttattgttattaactccatttaagaggtgaaaaacactgaaccaaatagaagtgaaaaattgggcttttaaaatggatttttggccgggcgtggtggctcacagctgtaatcccaacacttcaggaggccaaggcaggtggatcacctgaggtcaagagttcaagaccagcctgaccaacatggagaaaccctgtctctactaaaaatacaaaaaatagctgggcgtggtggtgcatgcctgtaatcccagctactcaggaggctgaggtaggagaatcgcttgaacccaggaggtggaggttgtggtgagctgagatcgcaccattgcactccagcctaggcaacaagaggaaaactgtgtctctaaataaataaataaatacaaataaataaaatggattttcaaggccaggcatggtgggtcacacctataatcccagcattttgggaggccacggcagaaggatcatttgagcccaggagttcgagaccagcctgggcaacagggcaaaaccctgtctctaccaaaaatacaaaacaaaataagctgggtgtgatagtgcgcacctgtagtcccaggtgatggtttgagcctgggacgcagaggctgcagcgagctgagatcataccactgaacttcagcctgggtgacagagccagaccctgtctcaaaaaaataataacaataacaataataataataaaatgaattttcatatactttggtatggtttagtaagtttcagggggcagactgtcagggtaagatggattgttatatatatgtatttatatatatatgtgtgtgtatgtatatttatatacttatttacttatttatttattttagcagagatagggtctccctatgttaccagcctggtctcagactcctgagctcaagcaatcctcccacctcggcctcccaaagtgctcacattgcaggtgtgagccagcacacctggcctataaggggaatttaaaggactctctactatgatgtcccttctcccaatcccttccccatgtagaagaggtttctgttgagtgactggcgtttgcttatatttctcagtgctatgcccagtgtaatggaaaatgcactggctcaagagcccagggatttgagttccaggccaagctcatccactaactgagagagtcagtcaaacctctttggatttcaggttcttcatctgaataacatatcccatagtacactgcaaagatgacacgtgacagtgaacaagttagttttcctttagatattaagaatgaggccaagtgcagtggctcatgcctgtaatcccagcactttgggaggctgaggtgggcagatagttgaggtcaggagttcgagcccagcctggccaacatggagaaaccccgtctctactaaaaaaatacaaaaaaaaaaaaattagccgggcgtggtggtgaacacctgtaattccagctgctcggcaggcgaaggcaggagaattgcttgaacccgggaggtggaggttgcagtgagcgagattgcgccactgcactccagcacctgggtgacagagggagtcagtctcaaaaaacaaaaaaaaaaaaaagaaagaaaaaagaatgagattagagagggtcttcattcctcctggaagaatacctgatgtacctgaaatctttgttggtgacaggaaatatgtcgatggcaaagggtttcactgtcgcctcccgcacaggcccttcaccatctctgctgtctggagaatttgttcccatcaggaatctcccaccctgcagttggaccatgctagtagcctgtccatttcctgcagagaaaaaagagagttaccagtaatacatgcatatatataaaacaagtggtaatatttggatcatatgcaatactcatgatggtataacaaaacacaacaaaaaatgtggaggcttaaaaatctggctttaaattccttttgggctgggcacggtggctcacacctgtaatcccagcactttgagaggccgaggcgggtagatgacgaggtcagatcaagaccatcctggctaacacggtgaaaccccttctctactaaaaatacaaaaaaaaaaattagccgggcgtggtggcagtcgcctgtagtcccagctacttgggaggctgaggcaggagaatggtgtaaacccgggaggcggagcttgcagtgagccgagagtgtgccactgcactccacctgggcaacagagcgagactctgtctcaaaaaaaaaaaaaaaaaaaaagaaagaaaaaaagaaaattccttttgcgttttgtttgtttggcttcacattcttgttctgccacttaatttgctgggaaaccttaggcaaattacttaatctgagattcaatttcttgtctttttttttttttttttcgtgacaggatctcgctgtgtcacccagactggagtgcagtggtgcactctgggttcactgcaacctctgcccccgtcagctcaagcaatcctcccacctcagcctcctgagtagctgggaccacaagtgtgcaccaccacacctggctaatttttgtattttttgtagagatggggttttgttatgtcgcccaggctggtctcaaactcctgagctcaaatgatccttccacctcagcctcccaaagtgctgggattataggtgtgagccagcacgcccagctgagattcaatttcttcatctgaaaaatggggatatctatggacgaccatagcttattaataaaagaaaaaataagtatgaaaaatagggatamtatctcactatctcttaggtagcagctgtatcaattaaaataacatggaaccaggagcaatggctcagagacagggtgcagaggctaaggcaggaggattgcttgagcccaggagttcaaggttgtagtgagctatcattgtgtcactgcactccagcctgggtgacagagtgagaccctgtctcaaaaaataaaaaataaaaagataataataacaataagatagcatgggtgaaatgttgaacacatggtagatttgcacttacctctttcttcctctacacaagtccttttcttcctctacacaagcccttgtcccagctaggtgaatttagacactctatcctaaaatacatctagcactttctttccatccttctgctcatgctgtttctctgcctcttcctctccacttactgaactcttatcagttcttagtgattctcaccattatatgagccagaagagaagcatataatacatatatgacagtatatccctggcctctgccataagtgcataattattgccaaatagttgaatgagcacctttagacttgtatgaatgcctcagaaaatcatagaattaaaaaggactggccaggtgcgatggctcacacctggaatcccagcactttgggaggccgaggcgggcagattacctgaggtcaggagttggagaccagtctggccaacatggcgaaaccccrtctctactaaaaatacaaaaatcagccaggcgtggtgtcaggtgcctgtaatcccagctctcaggaggctgaggcaggagaatcgcttgcacccgggaggcggaggttgcagtgagccgagatcacgccactgcactccggcctgggcgacaggagcgagactccgtctcaaagaaacaaacaaaaccaaaaataagccaggtatgatggtgtacacctgtaatcccaactactcsggaagctgaggcaggagaatcacttgaacctgggggggcggaggttgcagtgaaccaagatcgcgccactgcactccagcctggagggacacagcaagactctgtctcaaaataaataaataaataaawaataaaaaaggatctttgcttcaacctccttattccacaggagcaaaccaagatccaaaaaagaaatatgacttaaagagctggttagcaggagacaggactagatttaggtctctttacggtgctgtttccaataagccatactgcttcagctgatgcaccacttcacagtgtctttccaagaaaggatgtctaagcactacaacttctttcaaggcagagtccttgtcttttgatgttcctcaagatcctatctttggatctcttattctgacacactctcagtgatttcatccattttcagtttttcgttttttttgttttgttttgtttttgatttttttttttttttttttttttgtgaggcggagccttgctctgttgtcccggtcagagtgcagtggcccgatctcggaaaactgcaacctccgcctcctgggttcaagcgattctcccgcctcagcctcctgaatagctgggactacaggcgcccgccaccacgcccggctaatttttttgtatttttagtagagacggggtttcaccatgttgggcaggctgctcgaactcctgacctcgtgatccgcccgcctcaggctcttaaagtgctgggatttcaagcgtgagccacctcacctggcccattttcagtttctttcacaaatatattgcaaagggaaaaaacggatcatcctggcgtggtggcttacgcctgtaatcccagcactttgggaaactgaggcagggattgcttgaggctgcagtcagctatgatggaaccattcactccagcctgggcaacacgtcgagaccttgycccccgccccaccaaaaataaataaataaataaataaaaggagtaagtagggaaatctcagattgaatcggaattaagaaataacatacaattgcaatgtatgagctttattttgtccctaattcagccagcaaacgttaaaaaccatttatgagataatagatgaatctgaacagactgaatatattattaagaagcactgtcaattttttaggtgagaaacggtttgactattcaagcttaataaatccctagaataaaatgggataatgtctggacccacttccaaatggctccaggagagggggagtgtgcgattccgcaggagcaggactggccacaaactggcagctatttaagcyggccgagtacgtgggggcgggggtcgttcctcgttatattctcctttttccttttttttttttttttttttttgagacggagtctcgctgtcgcccaggctggagtgcagtggcgctatctccgctcactgcaggctccaccccccggggttcacgccattctcctgcctcagcctccctagtagctgggactacaagcgcccgccatcacgcccrgctaattttttgaatttttagtagagacggggtttcactgtgttagccaggatggtctcgatttcctgacctcgtgatccgcccgcctcggcytcccaaagtgctgggattacaggcgtgagccaccgcgtccggcctttkttttttttttttttttttttttttgagataaagtatcgatctgtcgcccaggctggaatgcaatggcacgatctcggctcactgcaacctccgcctcctgggttcaagcgagtctcctgtctcagcctcccgagtagctgggattacaggcacccgccgccacgcccggatagttgtgtttttttgtttttgtatttttgtagagacagggtttcacgttggccaggctggtctccaactcctgacctcaagtgatccacccgcctcggcctcccaaagtgctgggattacaggctcgagccaccgcgcccggcctctctttcccttttttaggtttgaaagattccacaacaagaagttgaaaagtataaggcggtgaggcgccacgcgcaccgagagctacctccccagcctgccgctgcagccgcatcccggaagccggcagaagggcctaaggctctctcccgtcagggcggancgccccatccccttcccagcgcccccaggatggacggccggttcactgacctagcttgagccacgcgccgaccaggagcgacagcaggggcagcagcggtaacccatgccgggccatcaggactgccgcgctgcgccgcgtacacccacggccccgctgcgcatgcgccctcatgcaccgcagcggcagtcgacccctatgcacatgcgcasgctgcgccaccacccgccccgcacccartagttcagcagggggaaactgacggagcgaggcggaggactggccacaccaccttcaggaccgcccagggaattaaggaaaaccacgttgagggtcccggccgttccagaggccccttcactacttttctgaacctttggacagttttcattccccttaagattgcttttgtgcgtcataccattgcaagaacagaaaggaggtttcaacttaacatttattgcacaactcacttcaggccactgctgacatcccaaaacacagcctagtaacacacaacttcaccttcaaggactgcagagatagaccaactatatataaataatctcgtggaaacgtaatttgggtgagaaaaatatgacgctagagactttgcgatgaatattttgcctaagttcagaagcttgaaaatacagttggcctacaatctcaaatttcacccaataaccgtggcccttagtcaccacaccttccatcatctttttacctctgcctgttcttgccctttacagttgcagctctctcaactcccttgcctctagttgactcctcttcccatttcctacaactttgtggcgggagcattttagcaaagccatttcaaaggcgttcaaagtccaactgatccaatgcatttactcagaaatttataccaacagggatgctttcaatattttaaattacttgagcatttatattagcataaaaattttaaaaccaaatgcttaacaatagggtagttggataatttaacatacgtccacataaaattaaaccattaaaatttgcttttcaagaaatatttaataacaaggtaagtaacatatgcttatctaacatggaattttatgtcactgctgctaaagcaaaacatcctgttcactggataaaagacctgctttatgtgtatacacttcwgtgcaatttttaaaaatactrtratttcagaacttccaaatttcmacagatgccagkgttctctccttttttcatatgggaaaatttctttcaaaattatttgaagcttggacaaaaattccacagctgtawtcctcaggatcactttgcagtctycaagattcagatacagaggaagmttcaattcaacctttcagagaagacattccagctcgcatgatctcatcaaccaagagaatgttggtggcaaycacagtgctgaaagggggacaaaaataagatggctcagatgattaggagccctaattcgactcaacttcccacttccaaccaagctgcacacattacatccaattaaatttcccccttcccctctacacatcagagggckagttcrgtttccatacttccagctgatcacattattcatgggggaaaggagcractaaacagagaacaccaaatgaaaaaagtatgattctctaacagtttagttttcattttcccaaacttaccaggagtgaagaagctgtttctttacacaatagttatcccatacgcctacttctgctgccaccattggctcacctaaaaggcaaccaaatcttaaaataarttcagtcagtaagaaccaacaataytgtgtgcagctttgcttatcactgatgactcatttcctccagtattaactatgagaattcaaagcttctctgttagcccaattttctactctaaaccatgacccccgtccacaatatttgatgaatgtctgacttatacttagaagtcctgaacacccctctcttcttctggatacatttctgtttactcatactgaagtatagcacttcaactataatctgactaaaatggactgatcatttccctcattccagaaaccttttctattaatgttgacaataggtcttgcacatactgcatggaggtacctgttatctcctactttgtacttaatttgtgttgttttgttacaggaacctaagatcagggctgtcaccatttcactagatttctacatccccttttctggcattaattgctatctttagctggttttcacccatgaatataatcaccacatctattttcttatcatagtacttgattaaaaactgagtaaggcaaatgcaatatgaaaatccttcaacattaatctgaaccatctaccaccactcaacatctccaaaattgtatccccaaattactcatgtctactcgtcccttaattatacctagtcattccattttttattaatatcctattttatcccattttagaacccagagttccctaacagcactggtgtcaaattgcaaagcaaaacatttttaatctttcctggcttcaactcacacgtattacatctagttttccctctacaacagttgcattctcttacctgtgttcaggtccacacccacaagctgaccygattctgaatgttctgcttgaattttaactaatgtttcctgaaggtcaaaaccagagttctgagcaagaacctaaagtaaacaaatttaattcttgagaaaacaggaactaataactgatagtaaaaaaaaaaaaaaaaaaaaaaagaaaaaagaaaaagaaaatctcggcctggtgcagtggctcacgcctgtaatcccaggactttgggaggccgtggaaggtggatcacctgaggtcaggagttcgagaccagcctggccaacatggtgaaaccccatctctactaaaaataaaaaaaaacctggccgggtgtggtggcaggtgcctgtaatcccagctactcgagaggctgaggctgcagtgagctgagatcgcaccattacactccagcctgggaaacaagaacaaaactgtctcaaaaaaaaaaaaaaaaaaaaactcattgcataaagacagaacatttatgttcccttcagagaataccagacacaagttactgatcaactctctcaactaccccaaacccagcagcaatacaccagtcataaattatatatcaaaactggtatataatagaaaacaatgatatcagtytaaaacaaaagcaaaaagcaagtttgtactcaagtataacccctaatactgcaaatattaaactacaggttatctcttgccatctgcaatgtcagctattcaggcttcccagagaaaccaaatatatctggatgatgaggaatacctgttctagagtcagaaagaaaactgatcaaacttgcttatccaaaatccactttatgaataaatcctacattatcagaaaggtttgatcagctgaatcttttggaagattgactgttaaaagcatgcacaccttgggaataatgagcaatgcatcagcaaatgcttggactccaagctgtgccctgccctttacactgggcttatgtttaatcagggcttctgccattgccacttccacggcaccagcacctggaaccacacagcctgttggatgggggaaaaggaaaaatgctaagaaaactgcagaactaattatgaataacaaaatatacatatgaaagccattaatttcttacaaatttactatgacaaaatacaagtgactaacataccaaataggagaatggttcaaccagaatggcttcactagccactggcagctttcaacagatcagtattagttcatttatttgtattcacctttaataatgatatgctatgaaaaaccttagcataccatcagtcattctaaagggaagactgcttttgcatggtgtctggctgtgtaaactactgataaaaacacagtattcggccatgcctttcagaccagcaaaacaatataaaagaattgaaatacagtgaggatcttaccatcatcaatagcatttttgacagccctcaagccgtccctcactgcatctttgatctgagtgagtgtgtgcttatttggtcctttgatcaataatgtgacagaacgagggttgttacatttctcaataaaggtaaacttctcttctccctatgtgtagaaaaaatatgattttcaaaaacaggatttgtgcagagtgaagagagaagagggacttacagagaatgacaagtagcatattaataaggaacaaacttgatcacattaaagcaaattatctccttttgaaaaatcacataaaagaaatgtgattttccccatcaatggcttcccattactacacataaaccttcaaaatgtatataaacaaaaatctgatcctgaatttcaattaatttttctgctaaagacttcatgaaccaggcacggtggctcatgcctgtaatctcagcactttgggaggctgagggtgaaggacagcctgagcccgggagtttaagaccagcctgggcaacacaattatgaacctgtttctacaaaaattaccaagaaaaaaaaaaaattagccagtcatggtagcacacacgtctgtggtcccacctgctcagaagcctgaggcgggaggatcacttgaacccaggaagatgaggctgtagtgaactgtgatcacaccactgcactccagcccgggcaggagtgagaccccacctcaaacaaacaaacaaaaataattcacgagctaaaaggttctattacctttaagaaaaaaatacacttaccaatgtatactcatatacaagtcctgcatgtcccaagcagtcaggacttaggtcgtcaaaagaattcagggctaccccaccacaagcaagagtcagcctgaaatagcattttaagggagatggataagcaacgttaccagtgaatttcaaagataagaccagtaatttttaggaaggaatttttcagaattacacacaaaattaaattttaaaatgtactttaagcctttccatttgccatcaaccagctaaaaactagtcttttctcttaaccctccatttaaaccactctccccaagttagcaaatgaaatctaaaaggtggacaagagctctttattagccaggcatggtggctcacacctgtaatcccaacactttgggaggytgaggtgggtggatcacttgaggccaggagtttgagaccagcctagctaacatggcaaaaccccatctctactaaaaaaacacaaagcaattcagtgggcatggtggcagacacccgtaatcccaactactcgggaggctgagaatcctatgaacccaggaagtggtagtcgcaatgaaccaagatcatgccactgcacgaaagagcaagactgtctcaaaaaataataataawaaatttttwaaaaaagctttttattgtggggagctctttggaaaaaagtatattgaattcagaaacaaaaagtaaaataatgtttacaaggggcaagggggagggagaaatggggagtaactatttaatgggtatacagtttcagtttgtgatgatgaaaaaagtcctagagatggacagtgctgacggggtgcacaatgtgaatatagttaatgccaattaactatacagttgaaaaacccaaaaataaagtataaggaaaaagaaataatcccaattcacttgcaaaatgagtaaaagtcaaattactcggatacctctccatatttctccttttagctctgcgcagagcractatgccttcttttgaaagagcatctaaggaaaaggggtcaattccctgtaacaaaaataaaaattaatttcaacatctttcaccttaaaagtaaaaaggatgatacgtactatttagtttatacattgagttttcattctcaccttttgattaataacaacaaatcctttatctgaatcgccacagactttccttttcagttctattatttttttaaccctatcttcaatgaattttctttcagctttcacgagtttttctctctcttctgcactcttgtaaaaaaagccagaattcacttctctattaagaaaaaaaaaagttacagaaagcagggaaacattaagaaagcagcttctgaaactggattagtcctaagatttaacagttcactgagctccaatcctgccccttatgcatcttcagagactgtttcctatagctcccccaaaccaatttgagcattattgtccttacagtgggaaacaaagtttcacaaaaaagtaactcgcctaaaatacgaagcttctccatttcactgttaaggggctataaacttacgttttctcatactctaatgacacgttacaagtgaggatgyatgcatcctccacccttttcttcatatcaggatgccgtgctccgtggtccaaaacaagccctctgattaagctgtttaaacacacacaaaattatggttattgattttcagatgggtatttaatatattaaacactgaaatgagaaggtattgatatttcacgcagtcacatttttcttttttgagatgaagtctcgctctgttgcccaggatggagtgtagtggtgccatcttggctcaccgcaagctccacctcctgggttcacaccattctcctacctcagcctctcaagcagctgggactacaggcacccacaaccatgcccagctaattcttttgtatttttagtagagacggggtttcaccgtgttagccaggatggtttcgatctcctgatctcgtgatcygcccgccttggcctcccaaagtgctgggattacaggcatgagccactgcgcccggcctatttcttaaattacctgaagatcctacgctgtacagaaaagtctgcagagatggtctcactggtaggctgtcaaactgtgatgacgtcctttaaaaacatgttttctaccaagcacctgtaatcccagcacttacggaggcagaagtgagaggacaccttaatcccaggaatttaaaaccagcctgggcaacatagggagactccattctccacacagacacacacacacamacaccccaaagggaaaacaaacatgttttctaactaactctttgaaaaaaatatttttttaaattcctctactacttctcattatgctttgtacctagcaattcaataaatgccaaatgactgatgttgttcacttttcagaatcattctaaccataaacataacattcaccttatttcaggagaaaatattactaaaaacaatattctcctagcagtttatccaacttatatcttcaggtaaatatataacattttatatccaaagatatttttaaaattgccatctcacgcctgtaatcccagcactttgggaggccgaggtgggcggatcacgaggtcaggagatcgagatcatcctggttaacatggtgaaaccccgtctctactaaaaatacaaaaattatccgggcatggtggcgggcgcctgtagtcccagctactcgggaggctgaggcaggagaatggtgtgaacccgggaggcagagcttgcagtgagccgagatcatgccactgtacactccaggctgggcgacagagcaagactccatctcaaaaaaaaaaaaagccaactatctatattgtacaaagcacccctaaatttctaaacacagtttattttttgtttttgttttttttttaatgggacggggtttcgctcttgtcacccaggctggagtgcaatggtgtggtctcagctcactgcaacctccgcctcccaggttcaagctattctgctgcctcagcctcccgagtagctgggattacagtcatgcccggcacgcctggttaatttttgtaattttaatagagacggggyttccccatgttggccaggctggtctggaactcctgacctgaggtgatttgcccaccacagcctcccaaagtgctgggattacaggtgtgagcctccatgcccattagtatttcacagtcttctaccacctaccttgtatcagtttcagatttatgtttcatctccatgatctcaatcatgaagagatcaataggttcatcttgctttttaatggccaaaatggagtccactacagcctgcaattggaggagcataaccgttaagtaaattcaatttgcagcagaaacatgttgcttttcagaaggctaaagtaggcagtttcattttacaattctacactgatttaagtctttttctatcagcaaatagaatacattatatgtaaaaggcaacagctgaagtcatttacatttctgaaatctccatctataattcccaaacattaacattaattaacattaacattcctcgttttattaaaaatactggtaactggaagctttctaataaaaaaatctccactttataaaccttttaatgaaagcttcaattttacttttataacctggttaggtatactattattttaatttcctcatttttagagacacagattaggtatcattgccacaaaaatgaacctacacagcaccttgtaattgaaattggtaatcatattcatgtttctactatcagagattttctatataggtatactataccagacatagacaaaatttaatacatacctctgttaagacatctgcaagttcagcatgaactttagtacgaagagatgttctggccacatctataagtgtttccctgtccatctctctgcttactttgacttcttccaaaaactgaagggccttttcctttgcagcttcaaatccttcagtgattattctaggatgaaggccctaaaataaacacacattaacacttgcatcttcaattaggtgcaaccatagttcatgataaagttcaggtaattattgaaggagtgttctggatcatcatacctttgaacacgaggtaatataatgtgctggctttctgaatacatttaaaaggacaaatattcctttcaatgcagagcagatgaacaggtaatgaatgctctagcacagggtcaaagccaagggaactataaagcacacttgggtgttcactgtgcaaaccactctgaatcatttcaaaaccaacactgtgtcccaacaactcacagatggtagcattatcctatctttattttctttcattttttttgagatggagtttcgcacttgttacccaggctggagtacaatggcacaatctcgactcaccacaacstccacctcctgggttcaagcaattctcctgcctcagcttcccaagtagctgggattacaggcatgcaccaccacgcctggctaatttttgtatttttagtagacacggggtttctccatgttggtcagactggtctcgaactcccaacctcaggtgatccgcccacctcggcctctcaaagtgctgggattatgggcgtgagccactgcgcctggactattctatcctttctataggtaatctcaaactaactcacatcatttactaataaaaataaagactgttctctttctccaggaaattctgacaatacattcatattcactgaggtttgctttaaccttggaactagtcagggctaaaaaagtggaatttatccaaatataagcttttggttgcctttttcctaacaaatatgcctagtcctaaacattccatttttagatctcaattattaatctacactaaagacagatgcaaatcacayaggcaatgcaacttgattacaaaattattttcaggccaagaaaggttctataacctgtccaaggtcacaatttgttttagaccaggataaagacccagatttaagccccctaattctactgtatgacctcagctactattaacagcacatcaatttgtataaatatcagacacttcctatatacaaaaaaaaattacagaaacaagagttgtgcatacttcagaaatgtagagatccgcctgtttcagcagctctccaatgattaggacattagaagtcgtaccatcaccagttatatcatcctgggctgttgctacctttgctattaaggaagctgttgggtgttgaatttgctgwaagtagaaaaagaatgaatcacttaaaacaatatgaagcagtctaaatataccacagacaaaatgcaggaagggcctctttgagtgctatctacttgaaaaagctacccaaatgttggctacaaattacttcgattaactatcatgcacatgcaattataatgattgaaacgtcttcatgtgtaatttatttcccaggttatctctactttacagatgaggaagcttgaggctcagtagaagtttactcaagatgacagagctaccagttaacagtaacacataattgtacatccttgcctctttatggcaagtgtagagctctagtgagaataagccaggtatctcctaaagggcacacacattataattatttttgtaggtttgtaattttttcaaagaaaactgaaaaacagacttctggagattggagagaggttccaatgggacgagacttctgaggtggtagcaacaatttattagctacagtggtggttgtgtgtgtccattttataattatttcttaaattgtaaatgttcaatgtgcttctctctacctacgctgtatttctcacacactaaaacccaaataattttttgttttgttttggagataccctcactctgtctcctacactggaatgcagtggcacaatcttggctcaccgaaacctcagtctcccaggtttaagcgatcgattctcctgcctcagcctctgaagcagctgggactacaggcgtgcaggaccacacccggctaatttttgtatttttagctgagtcggagttttaaccatgttggccagggctggtcgtgaactcctggcctcaaatgatccacctaccttggcctgccaaagtgctgcgattacaagcataagccaccacacctagcccccaaacaattctgaagtcaagtttaactgtggctccacttttcaaacacgggccaccactgagcccactaaaaacaaaaactacacctcctaggttagcaagtccttactaaagatatttcatctggatgttgatggcatggtataccactagcaaaaccctacatattattctgaactcaaatcagcaggaaataatttccttttcttggatttgaactgctaagttttgggaatttagggatgagtaaaaagcatactcccctcaataatctaatattytccatccctaagacttgcaaagagacagatttatctcccctccagttggagatagagatgagacctaacagagaaactgctgttttaaaaagagaaaacccagctgggcacgggcctggtaatcccagcactttgggaggctgatgcggggggatcgcctgaagtcaggcgttcaagaccagcctggccaacacggtgaaatcctgtctctactaaaaatacaaaaatcaactgggcgtagtggcgcgagcctgtaatcctagctacttgggagactgagacagaagaatcgcttgaacccgggagggagaggttgcagtgagttgagattgtgccaccggactccaggctggtcgacagagcgagacttcgtctaattaaaaaaaaaaaaaaaraaaagaaaagaaaaatcatcctcatgcattttgcccatgtgattgtgtcaacctctcttaatttttcaagttttaaaataattaactttaatatacaattacagccctttagcccggactgtgaatggcaaaaaagcagggattcaaaggcagggctgtcagactccaggcactcaggactattactgattacacgccacttctgaatgttctcctaccttgaaaatggacactgcaaatcttyctacaaagaaaacattctacggaaaatcaagacctttctgacctagcccagagcacctctcaccatttcgtgaagcagcacattgccgtctttagtaagtttgatgtctccagcgccagaaacgagcctgtttaaaggacagaaatgaaccagactatgactttttcaacgataactaaaagtcccattagaaaacgggcttttcccagattttagggagccagggatgtggggctagttatgtccagcaggatggaggacaggtgtagtgcccaccccgtccccgcagagattgtgycgagtcctcagggtgcctggaagccccagagggcggggaacgccgcgctctagagccgctttgttctccgcggagactgcatcgatgcgggaagaaatggccgggacggtggggcttaggagggacacaggaccgaccccggaggacgccgagaaggacggctgcgcagccccgaggcggcgggctccagtccgcggtcccgggcccgccaggwgcgcggcggcgcgcggtgcccgcccggccctccggttcagccccgccttacatcttcatggtgcccttgggccccaggttggtccttagcacgtcctgcagaccccgcgctgcgctgatgttgaccgccagcgccgcctgcgctcgggccacctcggccttggggttcagggtcttcaccgccgccatagctgctccagcggaggaaaaggaaacgatgctgagtgcccagagccggcgcggcgtggccgggaggaactatccgggtcttctggaaaagtcggcccgtctggccggcccccagcgtgcccgcgcgccgccgccattgggccacaggtcgtccggcgcccgctcattggtccgcggctgcacggctcctgcggtcccacccttcgcgcctcggccttgtcgtcatcgcgcacgggaggagcttgttcccggcattccgtgctccttggttccggcgttggagctctttggggcccagctttgcggacccgggagctcgggacgcaggcggggcttgtgctccgcgggggcagggcgtagggtgggcctcytacctcccctgatctcgcggtttgttccgtttcattggagcttcccggaccgtgtgctcgacggtgccctaggtgccgtggggccacacgcgagtctgataagcaccctcccccggaatcatgcggtgctgtgaggcctagcgaagatgaagatagaatgcaaggtagaaagtgctggatacctttagaaagctgcaggactkgtgcgatgggagttgagacgtaagaacctgcccgtccgtagggctctggatgctgctgaggcccgaggcccctatggcagatttgaaaattcacccttgtagagtcattcctgcctttgagcggactcccttttaaggtaaatttccaaagagctccacaattgtttccagtatccagtgtcccgccaaataccagggattcagtaacacgtggtattttactttatttrttttctttttgtaaacatagggtctcactatgttgcccagggtggtctcaaactcctgagctcaagtgatactcctgagttcaagtgatcctcccgcctcggccttccaaagtgttgggattacaggcgtgagccaccgcgcccggctgtattttatttttaataaataacggaaattgttctgaattcaaaaggcaccaaagggcatgtagtgaaaattaaatcttcctcccacttctagttcaacactagagacaagcaaagttacccctgggtactctatgaattttcggaatgctttctgaatttataaacttacatatgaatataatcatttccccacacaaatggcaattcataatacacactgcagggtgtgttatactttaagtgtcttggagattgtgccatatcaagactaatgggaagtcctcggtaacagcagcgtgatgttctttgtaagaatgactcaactaggggccagggctgggtggctcacgcctgtaatcccagcactttgggaggatgaggcgggggcatcacttgtgcccgggagttcaagaccagtctgggtaacatagcgagactccatctatacaacaaatacaaaaattagccaggcgtggtggtgcacgtctgtgatcccagctacttgggaggctgaggtgggaggattgctggaatctgggaggtggaggttgcagtcagctatgatcttgccactgcacttcagcctgggctacggagctgaccctttctcaaaaagaatgacacaactaaccggtcacctactgactgatgtttaagttgttcacagtctgctattcagactgcagtgaatatctgggtatatgatgctcttaggtgggtttgtgtatttgagaatcacaaaaacatctatatatgtgactagtagcactgcacgatagaagactagttattagttccataggcattacacggtgtgcatgcggatttattataactgctgttaaaaatgttatgaggaggccamgcatggtggcgcacgyttgtaatcccagtactttgggaagccgaggtgggcggatcacttgaggtcaggagttcaagaccatcctggccaacatggtgaaaccccgtctctgtaaaaatacatcagcctggcctggtggtgtgcatctgtgatccaagctacttgggaggctgaggcatgagaattgcttgaactcaggaagcagaggttgcagtgagccgagatcatgtcactgcactccagcctgggcaacagagcgagattcctcaaaaaaaataataataataataaaggccaggtacagtgattcacayctgtaatcccagcactttgggaggcagaagcgggtggatcacctgaggtcaggagttcgagaccagcctggccaacatagtgaaacccgtctctactaaaaatacaaaaattagctgggcatggtggcggctgcctgtaatcccagttcctcgggaggctgaggcgggagaatcacttaaacctgggagttggagattgcagtgagcggagactgcattactgcactccagcctgggcaacaacagcgagacttgtctcccaggcgacatctgatggaagcatattaaatacataaataggtgttcttgataaggggaaaaaacaatttaaataacatgtataagaagttctcacttttgaaacatttcccatgggtctgtacagggaggggaacatcacacactgggacctgtcagggggtgggagcaaggggagggagagcattaagacaaatacctaatgcaagcagggtttaaaacttagaggatgggggctggacgcagtggcttatgcctgtaatcccagcactttgggaggccgaggcgggcagatcacaaggtcaggagatcgacactatcctggctaacacggtgaaacctcgtctctactaaaaatacaaaaaaaaaaattagctgggcatggtggcgggtgcgtgtagttccagctactgggaaggctgaggtgagagaatggcatgaatccaagaggcggagcttgcagtgagccgagatggagccactgcactccagcctgggtgacacagtgagactctgtctcaaagaaaaaaacaaccaccaaaaaaaccctagaggatgggttgaagggtgcagcaaaccaccatgggatatgtatacctatctaacaaaactgctcattctgcacatatatccctgaacttaaagcaaaaaaaaaaaaaaaagccaggtgtggtggcacacgcctgtaatcccagctacttgtgtggctgaggtggaattgcttgaacccaggaggcggaggttgcagtgagccagaatcacagcactgcactcccagtctcggcgacagagtgagaccttgtctcaaaaatggaaggaatttgtaaaaaacagtaagaagaattcccatactctacccacagatcccccagtgtaaacatcacatttaacccaggaataagaaattacagtgatgccggatccaatctatagatttcattcaaattttgctaattatgtcatgaatcttctatctctggcccaggattctatttatccaaaattacatttcacatttagttgtcatgttcttcagtctggaacagttctgcaatttttcagtctttaatgatcttggcatttttttgaatactggccagttattttacagactgtcccttactttagggttatttgatgtttccttatgattttttttttttttttcaaattttttaaagacagagtgttgctcttttgcccaggctggagtgcagtggcatgatctctgctcactgcagcctccgcctcctcgggttcaagtgattctcctgcctcagcctccagagtagctgggattacaggcacccaccaccatgccgggctaatttttgtacttttagtagaaatggggtttcaccatgttagccaggctggttttgaactcctgacctcaggtgatctgcctgccttggcctcccaaagtgccgggattacaggcatgagccaccacgcctggcctgatgtttccttatgtttaaatacagattatggccgggcacagtggctcacaactgtaatcccagcactttgggaggccaaggccggcrgatcgtgaggtcaagagatcaagaccatcctggccaacatggtgcaacaccgtctctactaaaaatacaaaaaattaactgggcatggtggtgcacgcctgtaatcccagttactcagtaggctgaggcaggagaatcacttgaacccaggaggtggagattgcagtgagtcaagatcacgccactgcactccagcctgggtgacagagcgaggctcttatcaaaaaaaaaaaaaaaagcaggttattcatttttggcaagaacaccagagaaattaacgtgtccttttcaaggcattataggaagagtcacatgatgtcagtttttctcattcctggtgatgttaactttgttcacttggttaatatttgccagattgctctactttaaagttagtagtttttctttgtatttaataagcatttaataagcatcttatgggaaaatatgtgactgttctgtttttcatcataacaatgcctactaatttaagcatccattttttctttttttttttttgagacagggtctcaccctgtcgcccaggctggagtgcagtagctcaatcacacagcttactgcagcctgaacctcctgggctcagcttcctatctcagcctcctgagtagctgagactacagacgtgcaccactatggctggctaatttaaaacttttttttttttttgtagagagaaggtcatgctatgttgtctgggtgagtttcaaacttctgggctcaagcagtcctcctgcctcagcctcccaaagtgctggggttacaggcgtgagccactgtacccagcccatcaataatttttgcctgaaacaattattactgtgatctttgtattgaaagtcctccatggatctgttgtgtgcttacatgtcttgctgtgtgtgccaagaatgcaaggcccaagaatgctctttatctggggcttttctcagggttgtttatacagttgctaatcttcagagacaagttaatgtttcttcctggacaaagagcaggcttgcccactcactacttggtatgaaaacaatagatttcagctgggtgtagtggctgatgtctataatcctagccctttttttttttttttttttgaggtggagtctcactctgctcattctcactctgttgcccaggctggagtgtagtggtgcgataccggctcactgcaacctccaccttctgggttcaagtgattctcctgcctcaacctcttgagtagctgggactacaggctcccgccaccatgcccagctaatttgtgtatgtttgtagagacagggcttcaccatgttggccaggctggtctcgaacccttgacttcaggtgatttgccccctcggcctcccaaagtcctgggattacaggtgtaagccaccgtgcaaagccatcccagcactttggaaggccaacgtgggaggatcctttgaggccaggagttcaagaccagcctagacaacatggtgagaccccatctctacaaaaataaaacaataaaacaccgaggtgggcagatcacctgaggtcaggagttcgagaccagcctgaccatcatggagaaaccccgtctctactaaaaaaatacacaattagccaggcatgatggtgcattcctgtaatcccagctactcaggaggctgaggcaggagaatagcttgaacccaggaagcagaggttgcagtgggccaaaatagcgccattgcactccagcctgggcgacgagtgaaactttatctctaaaaaataataaataaataataaaaaccaataaaacaacaacaacaaaagcaatagattccccgagctgagtgttccttagctgtgatccaaacccaccatctttgaggcatccatctgggccacattgtgttaccccatggaagttggagggaaaggggaactgatgcaaatatcctactgcccacactgcttgctgtgctgtaagcaataaagttctttgtctctgacacaggagacttgtttctttcttttttttttttttttttgagacaaagtcttgctctgtcacccaggctagagtgcagtggcatgatcttggctcattgcagcttctgcttcctgggtttaagcgattctccttgcctcaacctcctgagtagctgggactataggcatgcaccaccacacccagctaatttttgtatttttagtagaggtggggtttcaccatgttggccaggatggtctcgatatcctgacctcatgatccacctgcctcggcctcccaaagtcctgggattacaggcctggagccaccgcgcctggccaggagtcttctttcttaggccacatccataaaacaagcaagagactaacgtattagtttgtaagtagggtaaagtcaaatctcagacctaaccrtttgcaagtggtaattttctattaattttttcttttatatatttttaagagatagagtctcactctggtgcccaggctggagtgcagtggcgcaatcactgcttactgcaacctcgaccttctgggctcaagtgatccaccatcatgcctggctaatttttttgcagagacaagttctctgaaaagctatgttgctcaggctggtcttgaactcctggcctcaagtgatcctcccactttggcctaccaaattgctaggattacaggagtgagccactgcacctggccaattttctgctttcatcattcattatacatttattggttgaaattctgctgtaaggaagaactttcccttctcctccatgaatgactgactgaatgaatgaatttgtatcagtatggattcaagaattctatttttttttttttttttttgaggcagagtttcactcttgttgcccaggctggagtgcaatggcacgatctcagctcactgcaatctccacctcccgagttcaagcgattgtcctgcctcagcctcccgagtagctgggattacaggcatgcaccagcatgcccagctaattttgtatttttagtagagatggggtttctccatgttggtcaggctggtctcaaactcctaacctcaagtgatctgcctgcctggattacaagcatgagccaccacacctggccctttttttttccagtctcactgtgtcacctaggctaaataaagtgcagcggcacaatcattagctcactgcagcttttaactcctgggctcaagtgatcctcccacctcagcctcccaagtagctagcctcaagcgatcctcctgcctcagcctcccaaagtgctgggattacaggtgtcagccaccatgattgacctattatctgatttcagccagcaatattgtttttcttaatattattcttacactgttaattaaatgtgatttaaataatcttttaactcycggttattatagatgaaacagcctgcaaaaactcaccctacttcatttattccataatctttgtcctcctaatttttctattgcatcatttctgtattgtcagagtaggtaacgtttacattctgttttttctcccccaaacctgggtttatttagtcttagttttgcaatgatgtacactcaatgctcttgcttgtccctttgctgaagttccctttgctatccattggtgagtaatgtttattcattagcagtgtcctcaagaaaaatattcccatgcaagaccaggcacagtggctcatgcctgtratcccagcactttgtgaggccaaggtggacagaccacctgaggtcaggagttcaagaccagccttaccaacatggagaaaccccgtctctactaaaaatacaaaattagccaggcgtgtattcccagctacacgggaggctgaggcaggagaatcacttgaacctacgaggcgacagttgcggtgcaccaagatcgcgccattgcacttcagcctgggcaacaagacgaaactccatctcaaaaaaaaaatattctcatgggaaaaatatccccagaattcctgtatgttcaaaactatcgtttgtagcctttgtgtgtgaatgatggcttggcttgttttaaaacaaaaaaatcgctggctcataactttattcatttgtttttttgagacagggtcttgctctgttgctcaggctggagtgcagtggcatgatcacagctcactgcagcttccaccctggggctcaagctatcctcccaccttagcctcccaacaggtgtgcgccaccacgcccagtgaattttttttgttttattgtagagacaggggttggggtgggtggggggaggggtggtctcatgttgcccaggctggtctcgaactcctgacctccagtgatcctcctaccttggcctcccaaagtgctaggattacaggcatgagccaccacgcccagcctctatatctttaaatatttatttatttatttatttatttatttttagagatatggggtcttactctgttgctgaggctagccttgaactcctggcctcatgtgatcctcctacctcagcctacctagtagctgggattacaggttcaagtcaccacacccagttaaatacttatttgttctaatgtttgggttatcttcgttgaaaatttcaattgtgcatgttggctttctttggtctgtcctctacagctgtctttttttttttgagatagagtctcactctatcgcccaggctggagtgcaatggtgccatctcagctcactgcaacctccccttcccaagttcaagcaattttcatgccgcagcctcctagctgggattacaggtatgcaccacctcgcctcacaaattctaatttttgtatttttagtagagacaggtttcaccatgttggccaggstggtcttgaactcccgacctcaggtgatccaccaaccttggcctcccaaagtgctgggattacaagcgtgagccactgcaccccgccaactatcattttttctctaatttcatttaattccttttgtttatatgatttgcttttctcatttttatcatccatattggttaatatatttttcatagtgtccacttttatttgtcctctttttagcttcatattcacttctgtgatggttattttacctgttttttggagatggtgtctcaatatgtttcctaggttggatctgaacgcctaggctcaagtgatcctcctgcctcagcctcctgagtagttggcattataggcatgtgccaccatgcccagtgtgatagttatgtgttttccttctacatccttttttttttttttttccttctgagacagggtcccactctgttgccgaagctggagtgcagtggcacgaacatgtctcactgcagcctcaacctcctgggctcaagctttcctcctgcctcagcctcctgtgtagctgggaccacaagcactcgtcaccacacctggataattttttgatgttttgtagagacagtgcttcagtttgttgcctgtgctggtcttgaactcctggcctcaagcaatccttctgctttggcctcccagattgctgagattacaggtgtgagtcactgtgcccggctcccttctgcttctttcctggattttgtcagttttgtcttgccttattttgtcatgttttccatgaatctctatatttgtatttttgtttgtccttcttggaaataattcattaagttttttttcagacagatttttttttttttttttttgagacagaatctcgctctgtcgcccaggctggagtgtagggatcttggctcactgtaaacctccgcctcccggattcaagcgattctcctgcttcagcctcccaagtagctgggattacaggtgcacgacaccacaccctgstaatttttgtagttttagtagagacgaggtttcaccctgttggccaggctggtctcgaactcctgacctcaggtgatccaccagcctcggccacccaaagtgctgggattacaggcatgagccactgcgcccggtccagatctttttttttttgagacagagtctcgctctgttgcccaggctagagtgccagtggcacaatctcagctgactgcaacctctgcctcccagttcaagcagttctcctgcctcagcctcacgaatagctgggattgcaggcatgcactaccacaccgggctaatttttgtatttttattagagacagggttttgccatgttgccccagctggtcttgaactcctggtctcaagtgatctgcccacctcggcctcccaaagtgctgggattacaagtgtgagccaccgtgcccggcgcactcacacgtttctaatgtctctccatgtccaaattttctcttcttacaaggacaccggtcacattagattagggctcactctgaacacctcattttaacataatcgcctctttaaagaccttgtctccaggccagactaggtggctcatgcctgtaatcccagcacttcgggaggcctaggcgggcagatcacaaggtcaagagatcgagaccatcctggccaacatggtgaaaccccatctctactaaaaatacaaaaattagctgggcatggtggcaggcacctgtggtcccagctatttgggaggctgaggcagaagaatcgcttgaacctgggaggcagaggttgcagtgagctgagattgtgccactgcactccagcctaggccacagagcgagattctgtctcaaaaaaaaaaaaaaaaaaaaagagagagagagagagatagagtcttgctatgataatcaagctggtcttgcattcctgggctcaagcaatcctctcgccttggcctcccaaagtgtttggattacaggcgtgagcttctgtgctggccaaaacagaatgttggagacacacactgaatttacttggaaggctgattgttttcccacgccctccctaggagggtgagctgggtgttgggaccttaactctgcccataagatgttcaggccaggagagatgccctttaccccttgggttacaagggtttccactccctttctgcttgattgaggcttgccctcagttctttgtatccctgctctgctctgcttgtttcaaacaacacatttttgcactgtgtcatgaacagctcatcttcagagagtctgtttttgctggtgttttccgggatctgcatgtgcctcttcccatgtaactttggtaggccttgtgcaggtcttggagtttccagtgwctttttgtcttctagtttcgttgaatatgggatttctgcctcattcccccsctcaccaccatatctccctatcactttgcataatttctaggaggaggaaggggacaattcagtcaaatattgccacagttcttatactataatcatatcgctttgtaatataaatttctcccactttttccattataagattaaaaatagctcacaccaaaatcccatcgcttgaacccagaaggcagagattgtagtgtgttgagattacaccacggaactccagcctggacagagacagagccagaccctgtcccaaaaaaataaaaataaataagtaaataaawgaataatgtttccttttttatatagatatatagacatagatatataaccatatatcatacctggatatagacacacatagagatttctttgttcaaaaatggctcaaacgatatatacgttcttcaacttcctttattcatgtgaacatatcatgggcatatttccatggtatgacttattttgaatgccaatgtttatattaaatcacatttcaaactgtgttcactgtgttctttcaagacatttatattattttaatgtattggtatttttttttttttgatggagtcttkctctgtcacccaggctggagtgcagtggcacgatctcagctcactgcaagctctgcctcccaggttcacgccattctcctgcctcagcctcccaagtagctgggactacaggcgcccgccaccacgcccagctaatttttttgtatttttagtagatacggggtttcaccatgttagcgaggatggtctcgatctcctgacctcgtgatccgcccacctcggcctcccaaagtgctgggattacaggcgtgagctactgcgcccagccatatattgtttttttttttttaatttttttttttttttttttgagacagagtctttctctgtcaccagggtggagtgcagtggtgcaatctcggcttactgcaacctccacttcctgggttcaagcgatttccctgcttcagcctcacaagtaggtgggactacaggcacgtactaccatgcccagctaattttttgtattttagtagagatgggctttcaccatgttggccaggatggtctcgatctcctgacatcgtgatctgcctgccttggcctcccaaagtgctgggattacaggtgtgagccaccgtgcccggccagcaatgtattggtatttaacgtattgataagaaatattacaattgttagcaaatattttatacacacagatataaaaagcatccgtatacctaccatcctacttaaaggaaaattattataatatcattgattaactacataccttttctcaatctcatttcctttcttactttcagaagtaactactgtcctgaattttatgttgtaaattatcatttatgacattaaatgatagtctctttttaaagtttccagkggctattggagcatcacagtaactgagaatgttcacagtactgctgtgagaattcttatatatgtgtcattttttttttttttttttttgagacagagttttgttcttgtttcccgggcgggtatgcaatggcatgatcacaggtctccgcctcccgggttccgcctcccgggttcaagcgattatcttgccttggcctcctgagtaactaggattacaggtatgcaccactacacccagctaattttgtatttttagtggagacggggtttctccatgttggtcaggctggtcttgaactcctgacctcaggtgatctgcccgcctcagcctctcaaagtgctgtgattacaggtgtgagccactgcacccagcctcatttttttcttttttttgggggacggagtctcactctgtcacccaggctggagtgcagtggcgtgatcttagcacagcctcaacctcccaggctcaagccatcctcccacctcagcctcccaagtacctgggattcgaggtgtgtgcctcgaggtgtgtgcacgtccagctaattttgtttattttttgtacagattaggtcttagtatgttgcccagggtggtcttgaactcctgggctcaagcgatcctcccacctaggcctcccaaagtgctaggattagaagcatgaggcaccacacccagcttactcatgcaagtttctcctgagtgtcttcctcaggtgggattgctgggtcatagaaattgcacgtgttcagtgttttttgtctgtttgttttttagacggagtctcgctttatcgcccaggctagagtgcagtggcgcgatctccgctcactgcaagctccgcctcttgggttcatgccattctcctccctcagcctcccaagtagctgggactgcaggcgcccaccactacgcccggctaattttttttttttttttttgtattttttgtatttttagtagagacggggtttcaccgtgttagccaggatggtttccatctcctgactttgtgatctgccctcctcggcctcccaaagtgctgggattacaggtgtgagccaccgcacctggccgcatgtgttcaatgttactgaataacaccatattgttttccggagggcttgttccaatttactatactttagaaggctattagcactgaatgacttataaaaagagtacatgattctaatataattagccatgagaaaatttgtggctgggcacggtggctcactcttgtaatcccagcactttgggaggccaaggcgagtggatcacctgaggccaggggttcaagaccagcctatccaacatggtgaaaccccgtctgtactaaaaatacaaaaattagccgggcatggtggtgcatgcttgtaatcccacctacttgggaggctgaggcaggagaatcacttgaacccaggaggcagaggttgcagagagccaagatcacgctactgcactccagcctgggtgacagagcaagactccatctcaaaaaaaaaaaaaaaaaaaaaaaatttgttagcttacaaaaatgtgatctatagaaaacctttcagagctgggtaaagtggatcacacttgggcttgagcccaggagttggagaccaatgagacccagactctactaaacaaaaaccagcctggtgtggtggcacacacctgtggtccaacctactcggaaggctgaggcaggaagattgcttgagcccaggagttcgaagcttcagtgagctatgatcgtgccactgcacttcagcctgggttacagtgagaccctgcctcaaaagaaaaaaaaaaaaaggaaagaaaacctttccggaacagtagtatgacctgtattacttttgactaaccaattgtgattaaaactttgcaaaataatttgctaatatttttattacaccttcattatgctgtattgtatttggttcttatgtgctattattccagtaattatgcctttgtcttcattatgctatattgtatttggttcacatgtcctatcattccactaagaacagctatgaagctttttttttttttttttgagacagagtctggctttgtcacacaggctggagtgcagtggtgtaatctcggttcactgcaacctctgcctcccgggttcaagtgattctcctgcttcagcctcctcagtagctgagattacaggcgcctgccatcaggcctggctactttttgtatttttagttgagatggggtttcgccatgttggccaggctggtctcaaactcctgacctcaggtgatcctcccgcctcagcctccctaagtgctgggattacaggcatgagccactgtgcccggcctgatgaagcatattttaatctgtttcacagttttgccttgtctggmaagattacctcctggttgttacacttgtatgtgaccactcattagtgtcttctaggcaactatatatatatattttaatgtgatgtgctctagcaaaacaatgtctacaatacagccatctcatgctcacaagtatcaatataggtgtgartatgaggtggattccaggaccatgaagaggtggcagattttaattaattaactaattaatttttcagagacaagggcttgctctgttacccagactggagtacagtggcatgatcacggctcactgtaacctcgaaatcctgggctcaaatgatcctcccgcctcagcctcccaagtagctgggactataggcatgcaccaccacacccagccagattttagtaaatataaatattttatctgaaatttttaagaatatttaatattttaaagaatacttaatattaaacatttatgaaatacaaataatagcataagttaactcttctagccttccacatttacttacttgagtttcttttcacctcaaacaaaataaattctgttaccacttagatacaaacatttggtgtttaacattttgtttcttttattatgctttttatttgtttatttgtgggtttttttgagatggattctcgctctgttgcccaggctggagtgcagtggcatgtctcagctcactgcaannnnnnnnnnnnnnnnnnnnnnnnnnnnnnnnnnnnnnnnnnnnnnnnnnnnnnnnnnnnnnnnnnnnnnnnnnnnnnnnnnnnnnnnnnnnnnnnnnnnnnnnnnnnnnnnnnnnnnnnnnnnnnnnnnnnnnnnnnnnnnnnnnnnnnnnnnnnnnnnnnnnnnnnnngtgcccggcctattatgctttttaaaaaactactgcaggctgggcgtggtggctcatgcctgtaatcccagcactttgggaggccgaggtgggcagatcatttgaggtcaggagtttgagaccagcctggccaacatggtgaaaccccatctctactaaaaatacaaaaattagctgggcacggtagtgtgcgcttgtaatcccagctactggggaggttgaggcaggagaatcgcttgaacccaggaggcggaggttgcaatgagctgagatagcaccactgcactccagcctgggcaayagagtgagactcagtctcgggggaaaaaaaaattgtgttttggtggggagggtcctgtagctaagggtagagatgctgtgaccaagtgtcctgccccagggattgcatcctctgcgtgggtgagcatcttagagtgagcctggagtgcagactgtcagcctttgaggtttcaggttatgtttttgagtggatctcaatgcccagctccagccagctaactccagtggtaaatgtttgggggaaacaccccttatttgttgtagttaacatacaaggagctgggcaagtgacacatggaataattttttttttaaacggagtttcactctgttgctcaggctgtagtgcagtggcacgatcttggttcactgcaacctcctccccccacccgggttcaagcaattctcctgcctcagcctaccaagtagccgggactacaggcatgcaccaccatgccccgctaatttttgtatttttgctggagatggagttttgccatgttggccaggctggtctcgaactcctgacctcaggtgatcygcttgcctcagcctcccaaagtgctgggattacatgcttgagccaccgcgcctggccagaaaatttttaaaaagaaataggccgggcgcggtatctcacatctgtaatcccaacactttgggaggccaaggaggaaggatcgcttgagcccaggtgtttgagcccagcctgggaaacacagtgagacccccccccatctctatttaaaaacataaataaaaattaaaaataaaagtaaggtgcaaagactctcattttgttactcatggttgcattttaattaagaatataagtagtcttggccgggcgtggtggctcacgcctgtaatcccagcactttgggaggccaaggcgggcggatcacgaggtcaggaratcgagaccatcctggctaacacggtgaaaccccgtctctaytaaaaaatacaaaaaattagccgggcgtggtggcgggcgcccgtagtcccggctacttgggtggctgaggcaggagaataccgtgaatccaggaggcggagcttgcagtgagccgagatcgtgccactgcactccagcccaggcgacagagcgagactccgtctcaaaaaaaaaagaatataagtagtctttgaagttcttttgggacctacactgctgcaagcgtataatgccaaacgtggatttcaaaagaggccccccgacggagatttcactaattgctaaatcagtgcagcagtcccttgcttccctcacctatccttatcctaagtggtggtggcggcagcgcggagcagcttctgaaggtccgggagctcttttcctctgcaaagcggaggtgccacaggcaccgtgcacctctcagactgcaggggctgagcccccggaggaggagggggctggttcagggagcccctcccctggggcggggccaaatcgtcctcccagcccggctttgcagagcagacagatctggtgtctccagtttacagaagcacttgcagaactcatcagaagccaccccgcttatcagcagatctcaagagagcgttcggtggaggccctgggtctgcacagctcacctccctgggaactgctcgcccgagcgtcggagccggcgctggccccctgcagccggaaggttgcagccgcaggagccccggaggcccaggacacagggtaagtcccggcttgtgccttccctgcgcccaactttcagattttgccgactttccttttcctcttccaggcttcctctctgagtctacatttcttcttaatcgcgtaggcagatcatttcctaaaatctccaggctttcttttcattgatttattttttgggtagcttcacttgtctaatcttacagcagctgcctgttgccaaacagcatgaatgaatgatgcaatcctacacaggagcacccttagtgcaagattggaacaatccccaaactcagagttgaagtgtccgactttgtcttctttcccattagaattagaattttaaaataagtacttaccagatacattgttataacgatacagccttaagttgggaattaaataaatcatgctttcattcattaaatatatttattatattttcttttctttttttatttttatttatttttttttttttcagacagagtctcgttctgtcgcccaggctggagtgcagtggtgtgatctcggctcacttcaacctccgcctacagggttcaagggattctcctgcctcagcctcctgagtatctgggtacccaccatcatgcctaactaattttttaatttttgtatttttagtagagacagggtttcaccatgttagccaggctggtctcaaactcctggcctcaagcgatccacctgcctccacctctgcctcccaaagtgctgggattacaggcatgaccactgtacctggtcactatattttctttatgtatgatttgcatattattactttttaaatatttgatgactgatattggaatgaggatcagggaggaaaataataaaatccaagatttctgtattaccgtgccgggtaggttttcaatatcatgaccatatagccctgtcactttcatgtcggtgaaacaaagtagtcaggacttttaaaattttcaaatgatttaatatatgcctgatacctaccctcctttccttccttcttttttttttttttaagagacagggtctcacttggtcacccaggctagagtgcagcggtgcaatcatagctcattggaatctcaaactcctgagcccaaactcctgcctcagcctcccaagtagctgggactacaaatacgcaccaccatgcctggctcatttattttattttttgtggagatggcatttcactatgttgcccaggcttatcttgaactcctgggctcaagcagtcctccctcctcggcctcccgaagtgctgggattacaggtgtgagtccccatgcccggcctttttttttttttttgagactcgctctgtcacccaggctgaagtgcagtggcacgatctcagctcactgcaagctctgcctcctgggttcatgccattctcctgcctcagcctcccgagtagctgggactacaggtgcccagtagcatgcctggctaaattttttttgtatttttggtagagacgtggtttcgccatgttagccaggatggtcctgatctgacctcgtgatccgcccgccttagcctcccaaagtgctgggattacaggtgtgagccatcatgcccgcccaagtctgcttccttgtctctgcatttagttctcctaagagattctctttccctctcccttgtctttgtaccctgctaatcaggtgtacatgatttcctatcagacttgaaccttgcagaattgaagccatagaagagtatgttgactctacagtgcttgaaggtgggtaggagtaaagcatttcccagaggaagcagtcttaggaaattttgcctctgacccatttttgtgccagtcccgccaggagagagagtgaagccagtctccctctttcctgttttgtgtatggacttcgatgttcatttcctcattctctctttctaggctcttgctcttgcagaatccacaggtctttcttgaggaaatctgtagacagaactttgtgctgcgtttttatctagggaaggaacagaagagtgtcgtctcctagaaatctagcactggagaaacgtgagtctgatttgccttttcttggttttgttttggttttttgctgtcattgtaatgttttttacgcattgaactgttacacgtttgtctatctgctagcagtttactcttttttgagacagagtcttgctttgtcgcctaggctggagtgcagtggcgcaatcttggcttactgcaacctccacctcctgggttcaagtgatatctcctgtctcagcctcctgagtagttgggattacaggtgtgggccaccacacctggctaattttcgtatgtttagtagagacagggttttgccaygttarccaggctggtctcgaactcctgacctcaggtcatccatccacctcggcctcccaaagtactgggattacaggcgtgagccactgcacccggccagcagtttactcctcacctgaattttaaaaattgatgtcaactatgtggcatgcagaagatctcagcttcccagaatagctggttatattacatatcatttcaacttttattttagctttaaggagtacatgtgcaggtttgttacatgggtatatcacatgatgctgaagtttggggtacaattgatcccatcacccagggtttgagcgcagtacccagtaggtagtttctcagtccttgccctccttcccctgccttcttgtagtcctcagttttttttgtttgtttgttttgtttgttttttttttttttgagacggagtctcgctctgtcgcccaggccagactgcggactgcagtggcggaatctcggctcactgcaagctccgcttcccgggttcacgccattctcctgcctcagcctcccgagtagctgggactacaggcgcccgccaccgcgcccggctaattttttrtatttttagtagagacggggtttcaccttgttagccaggatggtctcgatctcctgacctcatgatccacccgcctcagcctcccaaagtgctgggattacaggcgtgagccaccgcgcccggcccctcagttttttgttgttgttgttttttgttttcacagagtctcgctctgtcacccaggctggagtacaatggtgtgatctcggctcactgcaacctccacctccaaggttcaagtgattctcctgcctcagcctcctgagtagctgggattrcagrtgcccaccaccatgcctggctaatttttgtatatttaatagggacagcatttcaccatgttggccaggctggtcttgaactcttgatctcaagtgagttgcccgccttggcctcccaaagtgctgggattacagctgtgagccaccgcacctggccatcactgtgtgtttttcccgtctttgtatcctcatgtacccastttagctcccacttataagtgagaacatgtggtatttggttttctgttcctgcgctaattcacttakgataacggcctccagctgcatctgtgttgcagcaaaggacatgttttcattcttttttatggctgtgctggcttttttttttaggccgggcatggtggctcacaccttgggaggccgaggtgagctcccagcactttgggaggccgaggtgagcagaactcctgaggtcaggagttcaagactagcctgtccaacatggtgaaaccccatctccactaaaaatacaaaaattacctgggtgtggtggcgcacacttctgatcccagctattcgggaggctgaggcatgagaatcacttgaacccaggaagcagagattgcagtgagccaaaatcataccactgcactccggcctgagtgacagagcaggactccatctctaaacaaaagataaaataaaatatagtgtaagtgcatgtgctggggatcccagcccttgttacagggaacctctttgactctcctctgattcagaaccttttcagaatctactgtgtattcttttttttttttttctttttttttttttgagatggagtctcgctctgtcgcccaggctagactgcagtgtggcacaatctcggctcactgcaacctctgcctcccaggtccaagcaattctcctgcctcagcctccccacgcccggctatactttgtactctttcaatgcccggggacctgaacaaatttatccctactaccaaagcaaataagcttggttctcgcaactatgcatgaccttcacaactctgtacaggcttttattttttcttacacaggtgaagataagaggtcagtcctaacaaggtgaaggaagtaaggtgatcttagaagcctcttgaaagatacagagattgagaagttgggaaagcatttctttgggcaaggaaatttttcctcttatccaaaatcagacctccgaaggctggccctgsaggaaagcttgcttttgtactttggaactagggatgagaaggccttgtcagcagtggctttttttttttttttttttttaatcagttggtcctttgcttgccaagagatgaactagctggggccagccaggcagaagttctgttctgagctgcagaaggcagtggtccggatgggacctgggagctgctgtgtctgagaatctgagaatagaccttcccaccggcatgtcttctaccctggccctgccctctccctccctgttagagccaaatacgaagaatccagagtccattctctggcaatgatttttctgtgtgtggaattctaatgtacacaatttactttgaagcaactgaccttactcagcagactttttccccctatagccacgagaattttaaatacgcatagattgtgagtcactcctggtggagacaatgaaaagaggaggaaattggccaggcttggtggctcacacctgtcatcccagcactttgggaggccgaggcaggtgaatcacttgaggtcaggagtttgagaccagccyggccaatatggtgaaaccccatctctactaaaaatacagaagaattagccaggcgtggtggcaggcgcctgtaattccagctactcaggaggcaggagaatcgcttgaacctgggaggcggaggttgcagtgagccaagatcacatcacygcactccatcctgggcaacagagtgagaccccatctcaaaaaaagtaaaaataaaaattaagaaggaggaaatcaaaagtgtacagggaggtgcaccattttgcagagcaggatgggaagagctaaaaggagctgtggccgagtttgctctgctgcccaatcaagcagggagggagttgatactcttgtaacccaatgggtgaaggccatctcccctggcctgaccgtttcatgggcagagttaaggtcctaaaatccagctcagtctcctagggagggtgtggaaaaagaatcagccttccaagtaaattcaatgtaaagtgagtctctaacattctattttggccagcatggtggcttacacttataatcccagcactttgggaggctgagatgggaggatcatttgaggccaggaattcaagaccggcctgggtaacatagtgagacctcatctctacaaaaataataataatagtaacttagctgggtgtggtggtgcgtgcctgtggtctctgctactcaggaggctgaggcaggaggatcacttcacctaggaggttgaggccacagtgagctatgattataccattggcactccagtgtgggcaacagagtgagaccttgtctctaaaaaaagccaaaaatattctgttttctccttgggaccacattacaacccaggaggcaggtgtcaacaattctgagctgtaagtcaggcctaatgttcagctggggatgtgtaaatcagttctcacttttagtggaggaaatgtacctttcctttcaaactcaaggctgatggtcttgcttttttttttttttgaggcagggtctcactctgtcacccaggctggagtgctgtggcctcactgcacccttgaactcctggactcaagccatcctcccaccacaggctcttgactatctgggaccacaggcatgcaccaccatgccccactttttttttttttttttttttttttagagaaagaatcttactgtgttctcgagaactgatctcaaactcctgggctcaagtgatcctgctgtcttagcctcccaaagtgctgggattattacaagtgtgagccactgcactcggccaatctcattgaaactattgctagtgtcagtggttggaaagaggttcaagtacctggttggcctttttttttttttttttgagatggagtcttgctcttgtcatccaggctggagtgcagtggtgggatctcggctcactgcaaactccacctcccgcgttcaagcaattctcctgcctcagcatcctgagtagctgggattacaggcacctgactaatttttgtacttttggccagggtggtctcgaactcctgaccttgtgattcgcctgccttggcctcccaaagtgctgggattacaggcgtgagccaccgctcccggccaaagtaactggtttttcaaacatggccagtaattatttgtctaatcatttcgacaagactggaaacctcttgaagatggcacccatgcattatgcattcctctttgggtcttgtgtcagggtccctggggactggctttgagattctggtgtccatcagtcattctcaggagcattgcccattcttagttatgttatgttgcctcatgcatcttcttttttttttttttttgtttttgagacagagttttgctcttgttgcccaggctggggtgcaatagcgcaatctcggctcgccgcaacttctgcctcccgggttcaagcgattctcttgcctcagcctcctgagtagctgggatgacaggcatgtagcaccatgcccagctaattttgtatttttagtagagacggggtttcaccatgttggtcaggctggtctcgaactcccaacctcaggtgatccacccgcttcagcctcccaaagtgctgggattacaggcatgagccaccgtgccgggccttctcatgtaccttcttaaaaagttctttagcttatcccacttacctcattttagctcctcttacaccatttgtctgtttctggcttcctcttcactcacctatggttcattctccattcttagtggacttgcactacagtaagtgctgctactctgctgatagacctgctgacttcaaggtctttacagtgagcctgcctgggcatgtagtatgaattagcttgatttctgctggaccaaagccaaatgactggtttctttttattttttatctttttttttttaatagagacagggtttcaccatgttggccaggctggtctcaaactcctagccttaagcaatcacctgtcttggctgcccaaagtcctgggaacaggcatcagccaccatgctggcccttgttgagttcttttttttttttttttttttttgagatggagwctcgctctgtcacccaggctgcagtgcagtgcagtggtgcaatctcggcttactgcaatctccatgtctccacctcccagattcaagcggttctcccgcctctccgtcccaagtagctgggattacaggtgcctgccaccatgcccggctaatttttgtatttttagtagagatggggtttcaccatgttggccaggcrggtctcgaactcctgacctcaagtgatcctcctgcttcagcctcccaaagtgctgagattacaagtgtgagccactgcagccggccccttgttgagttcttaataactgcttaggttcaactctatttaattcataaaatatttaattcatgaaacatttaactaacacctattgggtgctgggtgcagagatagaagataattcaactggagtgattgactgattttctgggttgatggggaggaaataatgtggtataagggaggccacttgatctgcacggtgaagaagtaggactttcttcatgacatgggggatatggtgattccaggcagaggagcagcatttgaaatggtgtagaggaataaaaaaacacatgacataggccgggtgcggtggctcatgcctataatcccagcacttttgggaggccaaggcaggtggattgcctgaggtcaggaattcgagaccagcctgggcaacatggtgaaaccttgtctctactcaaaatacaaaaattagctggatgtggtggcacgtgcctatagtctcaactactcagaacgctgagggaggagaattgcttgaacccgggatggggaggttgcagtgagtcgagattgcaccactgcactacactccagcctgggtgacagagcaagactccgtctcaaaaaaaaaaaagtccttagtattccttgagccataaattgtgtgtgtcaccaggcgcagttgctcacgcctgtagttccagcactttgggaggctgagtcgcatggatcattttagcccaaaagtttgagaccacccttgggcaacatggtaaaacaccatctctactaaaaatacaaaaaattagccagatatcatgcctgcctgtagtcccagctgctcaggaggctgagccagggaggcagaggttgcagtgagctgagattgcaccactgcactccagcctgggtgacagagtgaggcyctaactcaaaataaaaaaaaatgtgtgtgtgtgtatgtgtgtgcatgtgcatgtgaataatgtgtgtgtgtaaaaatgtgtgtgtatgtgtatttgtgcggactgaggttggtaaaatccacaggcataggagccagatcgtgatgggcataaattatgtaataaagacattatgttaatggctgggtactgtggctctggtagggcacggtggctcacacctgtaatcccagctctttgggaggctgaggcaggaggatcatttgaggtcaggagttcgagaccagacaggccaacatggtgaaacccyatctctactaaaaatgcaaaaattagctgggcgtggtggcatgcacctataatcctagctacttgggaggctgaggcaggagaatcacttgaacctgggaggcagaggttgcagtgagtcaagattgtgccmctgcactccagcctgggtgacagagcgagactccttctcaaaaaaaaaaaaaaaaagatttattaatagacactgaaatttgaatttcatttttatttattattattacttttgagacagggtctcactctgtcacccaggctgcagtgcagtgtcatggtcrtagctcactgcagcctcaaactcctgtgctcaagcaatccttctgcctcaccctcctgagtagctaggtctataggtgtgtgccactacacctggctaattttaaaaatacttttgtagagatgaagtcttggtatgttgcccagataggtgttgaactcctggcttcaagtaatcctcccacctcagcctcccaaagtgctagaattacaggtgtgagccactgcagccagcctgaaatttgaatttcattagtttttacatgtcaaaaaatattattcttcttttgatttttttttcaactgtttaaaatgtaaaaatcagccagtcgtggtggctcacacctgtagtcccagctactcaagaggccatgatggaaggttcacttgagcccaggagtttgaggctacagtgagctatgatggyaccactgcactccagcctaggtgacagaatgagatcctgtctcaaaaaaagtaaagtaggccgggcgcggtggctcacgcttgtaatcccagcactttgagaggccgaggcgggcggatcacgaggtcaggagatygakaccacggtgaaaccccgtctctactaaaaatacaaaaaattagccgggcrtggtggcaggcacctgtagtcccagctacttagagaggctgaggcaggagaatggcgtgaacccgggaggyggagcttgcagtgagcggagatcgcgccactgcactccagcctgggcgacagagccagactctgtctcaaacaaaaaaaacaamaaaaaaaagtaaaataaaataaatgtaaaaatcattcttacttgtgagccataccaaaccaggtggcagggtggatttggcctacaagctatagtttgctgacccctgacttaaaatatttttttttccaggtcaacttaaaatggccttattctgccaactgcattggttggaaatcagttgagcagtgggttgttcaactgctttgagtctgtttttaactgcagtctattctaaatatagattacttacatcatctgtgtagccttgtatatgacatattagtctctgataggaggctggtctaggcaatcttgagggtccctttcatcctaattctagtccaaagattttctaaaaaataaaggccaggcatgggggctcatgcctgtaatcccagcaatttgggagacctaggtgggaggattgcttgagtccaggagttgaagaccattctgggcaacatagcaagacccccatctcttcaaaaaaaaatttataaattagccaagcatagtggtgcgcacctgtagtcccagctacttgggagactgaggcaggaggatcacttgagccctggatttggaggctgcagtgagtcatgattgtaccactgcactccagcatgggtgacagagtgagaacttgtctaaaaaaaaaaaaatttgttttgactctctgtcctctgcagcttctgtagcagtgtggcttccagagtttcttcctgtaccttcaccattttcgttctccttcccaggctcaagtcaggacataaaggtggtggtcctgcaggctctgtccttagcactcttttcttctccctctctctattctccctggactttatttttatgattttttcttttcttcagacagggtctcattctgtggccccatgctggagtgcagtggcgtgatcttggctcactgcaatctccgcctcccaggttcaagagagtctcctgcctcagccttctgagaagctgggactacaggtgcacgccatcctgcccggctaatttttagttttttagtagagatggggttttgccatgttggccaggatggtcttgaactcctggcttcaagtgatgctcccgcctcagcctcccagagtgctgggattacaggcgtgagccaccgcgcccagcctcttcctggactttaatcagaccatgtcttcaactagcccctgtacattggcgacattgtgtatgtttagccctcatatttagctctgaccttttttctgaggcttaaagcctttcccagtatctggaagttaaagtctaaactccttagcctggccctaggacctgcttagtstgaattcctgatgcacagccaggcccctgggccaagccatagggtagcttccagcaggtcatctgcttccttctccttgtctttgctcacactcctcgctctgccatcacaagcctccctccttgtctccacccccgctccctctcctcccagcacatgccaaatcgatgccctgccctttgacaacccactcagagggccacttacctgtcagattcagctcaaatacttgtgcctccttgaagccttctttttttttcttttagttagagtcagggtcttgctctgttgcccaggctggagtgcagtggcacgatctcagctcactgcagctctacctcctgggttcaagtaattctcctgcttcagtctcccaagtagctgggattacaggcgtgcaccactatgctcagctaattttttgtattattatttttagtagagacttggtctctctatgttgcccacgctggtcttgaactcctggcctcaagcaatcctcctcctgccttagcctcccaaagtgctgggattacagggatgagccactgtgcccagtctgaagccctgtttcatagataaggctaaacatttttcctgtgttcccacagagccttatgcacacctctgcttttttttttttttttttttttgagacggagtctcgctttgtcgccckggctggrgtgcagtggcgcgatcttggctcaccgcaagctccacctcccaggttcacgccattctcctgcctcagcctcccgagtggstgggactacaggcgcctgccaccacgcccggctaattttttwatatttttagtagagacagggtttcactgtgttagccaggatgttctcggatctcctgacctcgtgatccgcccgcctcagcctcccaaagtcctgggattacaggcctgagccaccgcgcccggcctcacacctccgctttaatgcttgcttcctcactacaattaggtagaaaaaaaaaaaacaactatatatatatctaaaagaaaagaaagayggcttcaaggaggcacaggtatttgagctactcaggaggctgaggcaggagaatcacttgaacctgagtggtggaggttgcagtaagccaagatcgtaccactgccctccagcctgggcaacagagtaagactccacctaaaaaaaaaaaagaaagaaagaaagaagaaactggygtagtgtgggaagtaaacaaaaagaaaaggaaaaaaaaatgaatctgtgagaacactcttakgtggcctgcactgactttgacacaaattagattggcttagtaggcaaggtgggatcttttcataattttatttgatgtctttaaatacatttatcttttttcttgtaggaggaaaattcttccagcgatggtctcccactcagagctgaggaagcttttctactcagcagatgctgtgtgttttgatgttgacagcacggtcatcagagaagaaggaatcgatgagctagccaaaatctgtggcgttgaggacgcggtgtcagaaatgtagggatagcatttattcactttatgaaatgataaagactttctaaagagtgactgttttggatgaagtgctagaccctggctatggaacatttgcactaggctttttctttcattccttagagctgaatttgacatattcattcatttatataaatatttatggcaaacaaacatggataagacatgttcttagcttgatcggggaatgacaaccgtcactaactaaagaagatggcctggggggcgaggtccaagtgtccagtggctttgtgtcatggttgaaagtgtgaccttagtggttccctggaaaggttcagagtctcttggtggatcctgggtcagatcccctctctccctcctgccctcccgccctgcagctggggacctccctctgcagtcccagtcccccagtcatgcaccatgtcattttctttttttttttttcgagacggagtctcattttgtcacccaggctggagtgcagtgacccaatctcagctcactgcaacctctgcctcccagattcaagcaattctcctgcctcagccttttgagtagctgggattacaggcgcatgccaccacgctcggctaatttttgtatttttagtagagatggggtttcaccatgttggccagggtagtctcgaactcctgacctcgtgatccgcccaccttgggctaccaaagtgctgggattacaggcatgagctgctgcacccggacactatttcattttcaactgcctttcatggaagaatgyttaacctttggtctctttcttgatttatgacagctcacagcttgcaagaaaaatacctatggataggctgtgtgcctttttttttttttagatggaatcttaactctgtcatccaggctggggtgcagtggtgagatcttggctcactgcaacctctgcctcccgggttccagcaattctcctgcctcagcctcctaagtagctgggattacaggcgtgcaccaccacacctggctaatttttgcatttttttagtaaagatggggttttgtcatgttgaccaggctggtctcagactcctggcttcaggtgatctgcccacctcagcttcccaaagtgtttgggattrtgggcatgagtcactgcacccagcctgttaatgttattttcaagcaatccttcaaaagtttattccaaggccttgctctcctagtagcaaagcctgtctgttgcacactgggctcttggtascatcttccttttggtggatgtcgtgcagacccggggcagtaaggcatgttaaccttgaggacatcggacctggctggcctgactgttgggtctccctcctaggacacggcgagccatgggyggggcagtgcctttcaaagctgctctcacagagcgcttagccctcatccagccctccagggagcaggtgcagagactcatagcagagcaacccccacacctgacccccggcataaggtaagaggaaccccggctccaggtgtatttcagcaccagtgttggggggcacatcctcccaagagcatctaactattcctttagagtgccctctgggtggtttatttattttcattttmattttttaattttttaattatttttttaaattgtattttttcgagatgaagtctcactctgtcactcaggctggagtgcagtggtgaaatgtcagctcactgcagcttctgcctcccaagttcatgcaattctcctgcctcagcctcccgagtagatgggattacaggtgcccaccagcacacctaggtaatttttgtatttttagtagagatgggtttcgccatgttgaccacactgcttgaactcttgacctcaaatgatctgcctgcctgggcctcccaaagtgctgggattatagctgtgagccactgcacccggcctattattattttttttagagtcagcgtctcattctgttgcccatgttggagtacagtagtataatcatggcttactacagcgttgaactcctggggtcaagtggccctccctcctwagcctccttaatagtggggactacaggtgcatgccaccatgcccagctaatttttaaaaaaaaattttttttgagagacagggtctcactttgtcacccaggctggagtgcagtggcatgaatagagctcactgcagcatcagccttctgggctcaagggatcctcctgcctcagcttcctaagtagctgggactacagacgtaggccaccatgcctaattttttttttttttaattttctgtagacacagggtctcactatgttgcccaggctggtcttgaacttgtgggctcaaatgatcaattttcccacctcagcctcccaaagtgttggaattataggtttgagccactatacccagcctttaaaatattttttgtagagatgggggtcttgctatgttgcccaggctgttctcaagctcctggcctcaagtgattttctaccttggcctcccaaactgctggatttaaaggcgtggcctgtgtggtgcttttggcacttacacgtggtcttgtctggccagttgtctggtcctgtcggtttctgcctttcctctttctccagggaaaacctaagctttccttgtttgtcctcatcttgtgtttttctgggtccatgggcagagtagagttctggaacggtttcctaaagcagacaaaccctacccattgttttttttttgttgttgttgttttttgagacagagtctcgcactgttgccaagctggtgtgcagtggtgcagtctcggctcactgcaacctccacctcccaggttgaagcaattctcctgcctcagcctcccaggtagctgggattacaggcatgtgccaacatgcccagctaatttttgtatttttagtagagatggagtttcactattttggtcaggctggtctcgaatgcctgagctcgtgatccacctgcctcggcctcccaaaatgctgggattacaggcgtgagccaccacgcccagcccctacccattgatttctaagtgcatttagaaaaacatataaggctgggcatggtggctcatgcatgtaatcccagcactttgggaggccaagacaggcagatcacctgaggtcaggagttcaagaccagcctggccaacatggtgaaaccccatgtctactaaaaatacaaaagttagctgggcgtggtggtgcgcatctgttgtcccagctactcgggaggctgacacaagagaatcgcttgaaccctgtaggaggaggttgcagtgagctgagatcgcaccactgcactccagcctgatgacagagacagagggagactccatctcaaaaaaaaaaaaaaaaaaagtaactgggtgtggtggcaggtgcctgtaatcccagctacctgtgaggctgaaggaggagaatcgctggaaccctggaggcagaggttgcagtgagccgagatcgcaccaytgcactccagcctgggcgacagagcgagactccatctcaaaaaaaaaagaaaaagaaaaacatatataaaacattaacaccccaggcagtataccttgtcaaacatacctcaggcaaatgcattcaggagaagaaaatgtatcttatttccctcttcatgtttcgttttttttttttttttcttttgtattactcagtgttgggtattttgtattttattttgcagggagctggtaagtcgcctacaggagcgaaatgttcaggttttcctaatatctggtggctttaggagtattgtagagcatgttgcttcaaagctcaatatcccagcaaccaatgtatttgccaataggctgaaattctactttaacggtaagatgttaacagtaacatgttccctttcttagcagttccattgttcagtattctgggtaatgtctttggaatgcaacttgaacagtcacatcagagttaaatattgagatgaatggttctcttaattgatgtcttttgccctttggtaccctttgctcagcaaaatagacttaggtcatcacctgtcctagctttggtatctataacatcacctgtctgtacataaatgtctgcatttcgtgaaacattaactcctacgaagccccctatgacttactttgctatatgttatatttcaactttatgggagcttctatgcatttgaagcaatttagactcaagaaggagacttttggctgggcacggtggctcacgcctgtaatctcagaactttgggagcctgaggcgggaggatcacttgaggtcaggagttcaagaccagcctggccaacatggtggaaccccaactctgctaaaaaaaaaaatacaaaaattagctgggcatggtggcacatgccyatagtcccagctacttgggaggctgagggaggagaatcacttgaasctgggaggcggaggctgcagtgagctgagatctcgccactgcacttccagcctgggtgacagagcgagaccctgtctttaaaaaaaaaacaagacagagactttagaagggagacttttgttaatggattactgaactacagcccttggggaagcctcctgtcccctctctggtccatagcggtgccacagctgttatattatctcagatcgccagttacatcaaggagtgactgatagtgattttttttttttttttttttttagacagggtctcactctattgctctggctgaagtgcagtggctccatctcggctcactgcaacctctgcctcctgggtgcaagcgattctcctgcctcagcctcccaagtagctgggattacaggtgcccaccaccacacctggctaatttttgtattttttttttagtagagtcggggtttcatcatgttggtcacgctggtctcaaactcctggcctgagatgatccacctgccttggcctcccaaagtgttgggattacaggcgtgagccactgtatgttaacagaacattcttgaatgatctagagatagagatcattgaaaaaagaagtcaagaatgagtgtggtaattactgtaaaaatagaaataattgataaaaaataagctggaatttcctcttgggtgacataatatattaacattttaaatttaatatattaaggctgggtgtggtggctcacgcctgtaatcccagaactttgggaggccgaggcaagtctgatcacctgcggtcaggagtttgagaccagcctggccaatgtggcaaaaccccatctctactaaaaatacaaaacttagctggtgtggtggcatgcgcctataatcccagctacttgggaggctgagacaygagaatggtttgaacctgggaggcggatattgcagtgagccgagatcacaccactgcactccagcctgggcaacagagtgagacactgtctcaaaaataaatwaattaattaattaatttgatactactattttatggtgttctgccacctcaacaaggtttgagaattactggaagcttaaaggatacaacaaaattcacccaatttatttatgacctaatagagccatctctacaattgatagttataatttaaaagcaaaggttggctaggtgtgatggctcacacctgtaatcccagcactttgggaggctgaggcaggaggatcacatgagcctaggagttccagaccaacctgggcaacataccaagaccccatttctataatcataatcataatcataaaaggaaataaaagcaaagcaaagcttgtttattcccaggaacaggtgtggagctccaggctgtstgactttaccgacggccatttttagccttctcagtgacatttaagtgaagatatcatctatgcagaaagctggcattggtcagatacttctctgggtctttaaccctatttttatttctcttttaaggtgaatatgcaggttttgatgagacgcagccaayagctgaatctggtggaaaaggaaaagtgattaaacttttaaaggaaaaatttcattttaagaaaataatcatgattggagatggtgccacagatatggaagcctgtcctcctgctgtatgtattaagggtgctaattttttttcaggttgtacttttgttttatttatttatttattatttctttattttttttgagacggagtttcactcttgttgcccaggttggagtgcagtggcgtgatctcagcttactgcaatatccgcctcctgggttcaaaccattcttgtgtctcagcctcccaagtagctgggattacaggcacacgccaccatgccagctaagttttgtatttttagtagagacaatgtttcgccacgttggccatgctggtctcgaactcctgacctcaggtgatctgcctgcttcagcctcccaaagtgctgggattacaggcatgagccaccgtgcccggccgtacttttgttttagacagctgatgcatcctatattcccaacactttgggaggtcgaggcaggaagatggcttgagcacaggagtttgagaccagcctggtcaacatagtgagaccccatctctacaaaataaataaataaaataaaataaaaacagctgatttcgaactacataagatttaaaacaggagttaacaaaaacaactctcattacaagataaaaatgaagtaataaaaacacattcaatcttgttttgtcaactttgtgcaaacccaagaaaagttgtgaataaggaactaaaaaccttttaaaacttttaacaatgccttatccccgtaggatgggcaccaccttttagcctaggtgtgtgctcaataagttgatttcatttccccaaataataccatcaacaactcataaccaagattttaatgtcattttatgctttatatactagctcctcatacattacctcatttaatcttcataacagccctgtgaagtcaaatattatgttttgttttgtttttcttagatagagtctcactctgtcacccaggctggagtgcagtggtgtgctctcagctcactgcaacctccgccctctgggctcaagtgattctcccaccttagcctcccaagtagctgggaccacagacgcattccaccacacccagctaagattttgtgtttttggtagaggcagagttatgctatatttcccaggctggtctcaaattcctgagctcaagcgatctcccctgctttggcctcccaaagtgctggtatcacaggtatgaaccaccatgcctggccaaatgttgtgttcttcttactgataggggaactgaggcttgcagagattatatgatttacctgtaacatatcagagcattttgtttttatttatttatttatttttattttttggagacagggtcttgctatgttgcccaggctggagtgcagtgttgcgatcatagcttatcacagccctgaacttctgggctcaaatgatcctcccgcctcagcctccttggtagctgggattacaggtgtgtgccactgcatcccacaccacaacagcattttattcctctgaattaatgtcattttctgagactagcagaggttttatttattttttgagacaggttcttgctctgtcacctaggccggagtgcagtggtgcaatctcagctcattgcagcctcaacgtcccagaccaagcgatcttcccatctcagcctcctgagtagctgggactgcaggcgcatgccaccacacctatctaattttgtttatgttttgtagagatgaggtctcactatgttgcccaggctaatcttgaactcctggcttaagtgatcttcctgccttggcctgccagagtgctgggattacaggtgtgagccaacatgcccggccagggattttatttctaagcattttaaaatcaatgctatatatatrtgtgtgtgtgtgtgtgtgtgtgtgtgtgtgtgtgtatacacatacacatatacgtatatatatgtgtgtgtatataaatatatacacacatatgtatatatatgtgtgtatataaatatatacatacacatatacatatatgtgtgtatatatatacatatatagtatatgtgtgtatatatataatcaaatgctatatagcaagtgtcataaatatcaaatgtgtccatttcacatagggctttgcctttgccatgtcattctaacgtaagaaaaactacaccaaaaatatagtgtggccaggcgcagtggctcrcgcctgtaatcccagcactttgggaggctgaggcaggtggatcacctgaggccaggagtttgagaccggcctgggcaacacggtgaaactccgtccctactaaaatacaaaaaaattagagacagggtttcaccatgttggcgaggctagtgtcaaactcctgacctcaggtgatccacccacctcagcctcccaaagtgctggattacaggcatgagctaccacacccagccgcctttgagtctttttactgttagcttagataatttataaccaatgttggggttgtctaagtagtgaacattgggctactagtttaatgaggaatgcataaaagtaaaatgaagagatttctcagggagctcccaatctcattttcaagaaatgacaaaatcagccaggagcggtggctcacgcctgtgatcccagcactttgggaggctgaggcgggaggattgcttaagcacagaggttcaagaccagctgagcaacgtggcaaaactctgtctctaaaaatttattcagggattgtggtgtgcacctgtcatcccggctactcaggaggctgaggcaggatgatcacttgagcccagaagttcaaggctgcagtgagccatgacggtgccactgcactccagcctgggtgacagggtgagactctgtctcaagaaacaaaaaaggaatgacaaaattagatgggtgcagtggagcatacctgtaatcccagcactttggaagctgacgcaggaggaggttgagagcagcctggcaacatagcaagaccctacaaaaaataaaaaaaagtagccaggcgaggtggggcacacctggagtcacagctactcaggaggctgaggcatgagaatcrcttgaacccaggaggcagaggttgcagtgagtggagattgtgtcactgcactccagcctgggtgacagagcgagactccaaaaaataaataaataaataaaaataaaaatcatttctctctcttttcttccttcttaggatgctttcattggatttggaggaaatgtgatcaggcaacaagtcaaggataacgccaaatggtatatcactgattttgtagagctgctgggagaactggaagaataacatccattgtygtacagctccaaacaacttcagatgaatttttacaagttatacagattgatactgtttgcttacagttgcctattacaacttgctatagaaagttggtacaaatgatctgtactttaaactacagttaggaatcctagaagattgctttttttttttttttaactgtagttccagtattatatgatgactattgatttcctggagaggttttttttttttttgagacagaatcttgctctgttgcccaggctggagtgcagtggcgcggtctcggctcactgcaagctctgcctcccaggttcacgccattctcctgcctcagcctcccgagtagctgggactacaggcacccgccaccacayccggctaattttttgtatttttagtagagacggggtttgaccgtgttagccaggatggtcttgatctcctgaccttgtgatccgcctgcctcagcctcccaaagtgctgggattacaggcttgggccaccgcgcccagccaatgtcctagagagttttgtgatctgaattctttatgtatatttgtagctatatttcatacaaagtgctttaagtgtggagagtcaattaaacacctttactcttagaaatacggattcggcagccttcagtgaatattggtttctctttggtatgtcaataaaagtttatccgtatgtcagaacggatttgtggaattttcagttctgcctcttgcatattggaatacccaatatttcaggtaccgtgttgaagcataaatagcccccaggcaagaaacaggcttaagactctactttgcttagtgctgggtacaatgtcctcaccccatgagcccactcccacttcctgaagccctgggacctggaaagtccttttttttacttcttgggatttgtcatatatgaaatgttacaaaagttttttgttttttgttttcctccaatataacaatagagtcttaaacaaaagtactgattaaaaatggatatttgggctcaggcctgtaatctcagcactgtgggaggacaagttaagaggatcacttgaggacaggaattcgagaccagcctggacaacagagcaagaccctgtctctacaaaaaataaaaacattagctggatgtggcggcacrcacctgtagtcccagctacttggtgggctgagatgggaggatcccttgaactcagtagttcaaggctgcagtgagctgtgactctgccattgtactccagcctgggtgacagtgagaccccgtctcttaaaaaaaaaaaaaaaaaaaagatattcgaaaatcacataaagtaaaagaaataaaaacaagttttactaatcacaaaggccagcattttcccctaaatgaattaaatattaataactcctaacagcctatataaaccatttcttttttataaatgacttggaaatactcgaaagccaggtttatgtttgttttgagcagagccaagcaagggaaatttcagaacatgctttgaatgtgtgagatgctataccctccctggaggaaaaatggggggagggaaagctacggggttaacattgagaattagttgaaaaatgtatcatttaaccaaatttggccaaataattaaataattattcagccacataagcaaatcagatgaatcaaatttcctccaaatcagtttctgaaggagagacatgaaataagtttggcaccatttaaatgagattccaaacaatgaggccgttgttcccaactgtgaatacctcctggccgctctcctagaaactgttttgtggtgtttgcacttttcagtagtgccaagctctgggcaggaccaggcatgccaggaccttgaaaagtgctgcaaacggcatcagcctctgcaccgcctggtgtgcatggcaggagcaggccatgggtggacaggtgggaggaccaatcccccactggttttcactgtctgaccgtcacagctgctattgccacacgggttcttcttgcctgcggcccagagagagcccatttctcaatacaggggaattgcaatagagacagagattaattcatgcagaaccagccgaacaggaggccggagctttattcttacatcaatcaccccaaaaattcggaggctagactttttcaaggatactttggcaggccaggggattcgcttctggctggggccatggggtggggtggggtgaggtggtggggcggcaggggtggggaggtcatcggatccaggtggagctactgatggtcagaaatgcaaaaacctgggccaggcacggtggctcacgcctgtaatcccagcactttgggaggccgaggcgagcagatcacttgagatcaggagttgaagaccagcctggccaacacggtgaaactccatctctactaaaaatacaaaaattagtggggcgtggtggagcacacctgttatcccaggtacttgggtggctgaggcaggagaatcacttgaaaaactccagggggcagaggctgcagtgagcggagagatcacaccactgcactccagcctgggcgacagagtgaaactgtctcaaaaaaaaagaaaaaaagaaatgcgaaaatctgaaaagacatctcaaaaggccaatcttaggttctacagtggtgatgtaacccgcaggagtaacggggaattgcaaatcttgtgcctgccctctggaataataactggaaatggtgttgatgtgtacaccttggcagaatttaggcttctctcatcctccttgcctggtggtctctcattagctttattaaggtggttgagttttggggaagggctgttatcttttttttctttttttttttgagacgagtctcactctgtcacccagggtggagtggagtggcgcaatcttgcctcactgcaacctccgcctcctgggttcaagtgattctcctgccacagcctcctgagtagctgggattacaggcatgtgccaccacgcccagctaatttttttctgtatttttagtagagacggagtttcaccatgttggtcaagctggtctcgaactcctgacctcgtgatcctcccgcctcggcctcccaaagtgctgggattacaagtgtgagacaccacacccggccaagctattatcatttaagctataaactaaatgtctcccagttttgcttggtccaagcccagctatgattaagggcagtttgaaggctaaaggcaagattggggggtggttaaattacatctcacttgttagagtttttgcaaatgtggtttcatttgtgtgtgtgtgtctgggggttttgttttttttgttgttgttgttttttgagacacagtctcgctctgtcatccaggctgaagtgcagtggcacgatctcggctcactgcaacctccgcctcctgggttctcatttttctttgctggtccatctttcacaagcatgcaaaggtggtttcagagcccatccatggggctgtggcctgaacataaggtggacatgaatttggctcagagggatctgatcctccgagaaatactgatggccacatgggaccctttataagaggggctggtcccacaggctgcccagctctcagcaaactgcccaaaagctgccgtctcagacaatccctgctttgttgtgttagaggagtgagtttgaaatgatacaagaactgcctttcatacgttttgaattctggactcactggaaacagctacggaacagctctcccaggagttacgcacatgcctacactaggatggactcagaaaggcatggctgattgtccgtgtgacgccattgttcattctgattatgaacaccgcttacgtaaacagaaagagctaagaattgggatcatgaagccaagagcagaaatttttcagggtattaagttgaaacaataaaagtcctttaaagcttttatatgctttaaaaaaatgactttatgcccccacccactccattctctcctggtttaactgctgcttattttttatttttatttttttgttgagacagggtctcactctgtcggtcaggcaggagtacagtggtaagattatagctcattgcagcctggaactcctgggctcaagcggacctcctgctttgacctcctaactgggaccacaggtgcacaccaccacacctggctaatatttaaattttttgtggagatgggggtcttgctgtgttgtccaggctggtcttgaactcctggcctcaaacgatcctctgttctcagcctccaaaagtgttgggattgtaagtgtgagccactgcatgcaggcctaactgctggtttaatgattcttccatttctctctcttctactggagacaagtgtgtctgtctccatggtacccagggaggcccactggggctgctgctcccaagggcaaggccacaagagagcggcagatttcagagattggcctcaggaagcggtaacatgaacctgatggcttttgaccctacgaccctcagaatctttatgagcagcttcagaaaagctaaccatgagtcacagtgcttattttcacattttgcaaggtgttttcatgtctcctcatgtgattctcacagtcctaaggtcagcagtatagaaactgctgtcctttttttttttttttttttttttgagatggtgtctcgctctgtcactaggggctggagtacagtggtacgatctgagctctgcgacctctgcctcccaggttcaagtgattctcttgcctcagcctcccaaatagctgggattacaggcaccatgcctagctaatttttgtattttttgtagagactgggttttgctatgttgcccaggctggtctcaaactcttggcctcaagagatccacccacctcagcctcccaaagtgctgggattacaggtgtgagccaccgcgcccggccctgctgtcctctttaacagctgggaaataccctaccagagttcatgacagctgtgagattacattcagagctggaacccgaggcaatgatttccacaccattctttatcttgtaagcattcctagagagttaacaatttagcaggccaggattatccaccccaagtgaatacttaacactgtggtcacaagtgctgacatatgaatacaatggagaaattttactccctgagatggaaggcctgttttgcaaaaacttcaagtggttttcatctattttttaaatttttttgtagagatgggggtctcattatgttaggctcaggaactcaagatcagctttacaatgtagcaagactcatctctacaaaaaacacaaaaagtagacagatgttgtggctcatgcctgccgtcccagctactcaggaggctgaggcaggaggatggcttgagcccaggaggatgaggctgcagtgagccataattacaccactgcactccagcctgggcgacagagtgagaccccgtctccacagaaaaacaaaaaaccccaaaactgacagtctctatactttttcttctccttcattctcttctctctccctctctccttttacttcttccctcctttctttttgttgattcatcttattattgaccatctatgatgccccagaaataaactgaaagtataaatttaataagaaatacatttatagagcagggtgcggtggctcatgcctgtaaccccagcactttgggaggccgaggtgggcagatcacgaagtcaggagtgcgagaccagcctggccaacatagtgaaacctcgtttctactaaaaatacaaaaattagccagacgtggtggtgcactcctccagtcccagctactccggaggctgaggcaggagaatcgcttgaacctgggaggcggaagttgtggtgagctgagatcacgccacttcactccagcctgggcaacagagcgagacttcacctcaaaaaaaaaaaaaaaagaaaaagaaatacatttgtaggccatgatggtgggctcaagtctataatcccagcactttgggaggccaaggcaagcagatcaaatgaggcctggagttcaagaccagcctgcccaacatggtgaaaccccatctctactaaaaatacaaaaattagctgtgcttggcgcacacctgtaatcccagctacttgggaggctgaggcaggagaattgcttgaacccgggaggtggaggttgcagtgagccaagatcctgccactgcactccagcctgggtgacagagtgacaccctgtctcaaaaaataaaaaaaaaataaaaatttgtagtgaattcttataactttatattgcatcagcaaccttttgaaatttaagttggactttctactaccagaagcagggctcagtcattcttttttttgagacaaggtgtcgctctgttgcccaggctggagtgcagtgctgtgatctcggctcactgcaacctcctcctcccaggttcaagcaattctcctgcctcagcctcccgagtagctgggattacaggcatgtaccaccatgccggctaatttttgtatttttagtagagatggggtttcactatattggctgggctggtctcgaactcctgatctcaggtgatccgcctgcctcagcctcccaaagtgctgagattacaggcgtgagccgccacagcaccgggccaactcagtcactcttgacactgtttccagttctactccctgacccccacagtccctcaatgtggtggatccagaagtctgccttacacaactgccccctggtggccaccttcccgtgggacagttacatgcagcctgttcagcaggccccactgaccctcacaccgacacggactgtgcagatatgctgcagtgaccaccattcagtcactgcaagacctcctggaactcgtgactgcttgctttattttttgtttgttttttgagacagggtgtgtctctgttgcccaggctggggtgcagtggtgcaatctcagcttactgcagccttgatctcccaggctcaagtgatcctcctacctcagcctcccaagtaagctgggactacaggcgcy

SEQ ID NO: 94097 - DNA, 45447 bp, Homo sapiens
cactgggcatcagagaaaatcaaatcaaaatgacaatgagataccatctcacaccagttagaatggtgatcattaaaaagtcaggaaacaacgggtgctggagaggatgtggagaaataggaacacttttacactgttggtgggactggaaactagttcaaccattgtggaagtcagtgtggcgattcctcagggatctagaactagaaatactatttgacccagcaatcccattactggatatataaccagaggtttataaatcatgctgctataaagacacatgcacacgtatgtttattgcggcactattcacaatagcaaagacttggaaccaacccaaatgtccagcaatgatagactggattaagaaaatgtggcacatatacaccatggaatactatgcagctataaaaaaggatgagttcgtgtcctttgtagggacgtggatgaagctggaaaccatcattctcagcaaactatcgcaaggacaaaaaaccaaacaccgcatgttctcactcataggtgggaattgaacaatgagaacacatggacacaggaaggggaacatcacactctggggactgttgtggggtggggggagtggggagggatagcattaggagatatacctaatgtcaaatgacgagttaatgggtgcagcacaccaacatggcacatgtatacatatgtaactaacctgcacgttgtgcacatgtaccctaaaacttaaagtataataaaaaaaaatgtggaccactgggcaatcactgggcagtcataaagataaaataacatatatacatgaaagtgttacgcataatgtaaaaagcttatagaaaaaataatcatttctcaggtatgaagctacattttaataacctgaaaatattttaagtaatacatttattatgcatatattttcaaagacaagaatgatgttattgattatggtaatatgaaggttacctcagattgttaccactttcaacctgctcacaatgtaaattctgttatcaataactaataatagaaaagaacatattattatatattcctgttaaacttttcaaatatagtacacgtaactctgtgaacaaatcttccctctagggcgttccctagaaagtcctcgatttagctagcagtgtttgcaagtttgcattttctctaacaattcttaatcaatcaccatcatcatcatggtcatatcaattgctaaacatgtcctgtgactatgtgatagtccaggcatcaatctaaaatctaaaaagatttgtgctttacaatccacagtgaaagaataaacaaggcaatgctttaaatagagtttttttttaaattaatcttttctttatatcaacttggatataattaggcaaaaattgggaaaatatgtgtcatatctaatatcagtttctcacagtgccaaattaattaactagaataatggtgattaaactctatagactacttgattattgcagaggaatataatttttaatttaagctttcaagaataaatcttagactgcaaaatcagggaattttctggatttgggtctacttctcttctctcatttttttctcaaccagagatgtttgggatttcaatcacaagtgtgaggatattggacattactgcataatgggtatggtgagtacttccttatgttcaccacagtctagtttgctactaacagcttaggagagaatgaaagccaatgagggtgggagaagataaactgttagctaatgcatacaggttcagttttcttcatctccatgtctagtcaatgcctttcaactaatacctgttactctttcatcaaactttctgcctgcctttctaagagcagtgcacattacattttacttagccagtgttctcaaaagggaagttagtaactttctgtaaaagaaagactttactcttcattgcaactgatctctctctctcccactgtaaaactgattgaggtgcttaaggttctcaagaaattgctactcatagccctgtgattacttttataaaggcgggggggaggggaaatcagtagaatggaatggttgattactcagggaaaagattctttcttttttgaattttcttctcaaattatggagggaaggaaagggagtgggaaaatgttcaagaaataagtttatgtgaaactgggaatgttatttcctggtatatgcagattaatgatccctttgtcattgcctccccagcagagcacaggcttcaggaggcaggtggaaaagtatgagaaaggcttgaaaatttaagtgggataaaggaagatgatccaataggcagagaaagagaacagtggggataagtacagaggaaaagactgatgagttccaagagcttatggtgaagcagtcatctttgtagaggagtttgagagtggcagagatgaggagagaaagtggatttttaaatatgttttatttttctttgggtataaaggcctcacttctttgaatacatgaaaaaaataagtacagatatgagtaacttttttgtttcagtcaaaaaacagaaaccactgtatttcaacagggggaatttcataccaggaaatttgttacatggattatggaaaagtagagaatcccaacatggggtgcagaggcaacataatataaagatgaacaactacaggaagtggttaccaccctaggggttagagggaaactaggaggtggtggtgtaacttgagttcagaagccagggccacctggcagaatcttgagctacagtggtgatggctaggactagctcatgccacagggggagaggctgactggtgaaagttggagcctcagtgcagatgcagccccttcatggatgccacttaaagcagaaagctcagggaagaaacactatggcttatctcctgctatccattctccaattcagctaaacatactagaagccagagggccaaggagcctggcaatacaattttctctgaaacacagtagagcaaggaaagtggggaatagacctgagagcaagaggcaaataattggcacatgttttaattgtctaagtgtgtttctttgaattcatctctgtgtggaacagaaccacgagactaacttctctttatgtggtttacacatggtctaagagccatagcattctaaaaagtacctttccttgaatattaagaagtgaaaaacactactactttgctaattatcgtaattacagaagcttcccaagtagttcatggacaacaatcaaaagagtacttatgtcttttttttccttcttttgttccctttcactcctcccatttcttttttttttacctccatattagctataactgctgtacaactacccttgtgcaattagtcaatattgatctcataatggggttactatcctaccttcctgtctctttcatgtcttgaagagtgggtaccaacaagggaaatgatgctacatttagcttttggcatctaccatatctgacatatctttgtgctgaccctgtttactcacttagcatataggatgtcatgtttgcctggaaacatgattgccatctaaacattttggtatatttcttgtattttgtcatgttttcctatagttgtatgtggagtgatttaatgtagggtttttagtgtaggcatagtaaggcttttttctagtatcttggtcaaaagtataaccaaatttcttgggttttaaatcccaactctactatttgctagttatgtgaacttggccaagtaactgaactgctctggaactcagtttccttatctgtaaatataatcataataatagaatctgctttacagtggttgagttgtgaggatcaaatgaattgatgtgtgtgtgtttgcatgtgtgtctatatgtgtaatacacacatatatgcagtcatatcacttaactatgggggatttgttctgagaaatgtatccttaggtgattttgttgttgtgtgaaaatcatagagtgtatttacataaacctgatggtatagtctactacacgcctaggctacatggtatagcctatggctgctaggctacaaaccttatcgttttttattgtactgaatactgtcagagattctaacacaatggtatctaaccatagttaaccatagaaaatagacaataaaaataaagtataaaagattaaaaatggtacacctgtataaggcacttaccatgagtagagcttggagaactagaagttactctatgtgtcagtgagtgagtggtgaatggataggaaggcctagaacatttttgtacactcctatagattttatgaacactgtacacttaggctatactaaatatgcaaaacattttgttttttcaataatgaaataaatttagcttactgtaactttttatttataaacttttgcttttttaatttcttgactcttttgtaataaccctaagcttaaaacaaaaaaaattttacagctgtacaaaaatgttttaatatccatatctagaagctttattctgtttttaaattttttatttttatattttacctttaaaacatttttgttaaaagctaagacacaaacatacacattagcctaggcccacacaaagtcaggatcattaatatcactgtcttccacctccacattttgccccactggacagtcttcaagggcactaacatgcatgaagctgtcatctatgacagcaatgcattcttctggaataccttctgaaggacctgcctgagattcttttacagttaacttttttataagtaggagtatactctaaaataatgattaaaagtatagtctagtaaataaatgaaccagtaacatagtcatctatttttactatcaagtactatgtaatgtacataattgtatgtgctatacttttacaactggcagctcagtaggtttgtttacaccagcattgccacaaacacatgagtaatgtgttatgctacaatgtcactagatggtaggaatttttcagcacacacacacaagtatatatattatatattatattatatattatatatatatgtatatatatatatatatatatagagagagagagagagagagagagagagagagatggagtcttgctctgtcgcccaggctggggtgcaatgacacaatctcggctcactgcaacctgactcccaggttcaagtgattctcctgcctcagcctcctgagtagctgggactacaggtgcccaccaccatgcccagctaatttttgtatttttagtagagacggggtttcaccatgttggccagattggtcccaaactcctgacctcaagtgatccaccccactcagcctctcaaagtgctgggattacaggcgtgagccaccgtgcctggccaacaccattataatcttatgggaccactgtcatacatgtggttcatcattggccaaagcatctgtatttatatatgtatgtttcaaattatatatatatatatatatatatatatatatatatatatatgatagctatacatgaacatacacacacacatatatagacatatatagcacataaaattggcacatattaagcattttgtaaatatcaaccattacaattgttactacttttctcagcaaggctatgaatgctgttccagcctgtcaaaatcacacctgtttaatgtgttttacccagcacgaagtcatgtctagttgagtggcttaaaaattgtgatcaaatagctggttagttaaaaagttatttcactgtgtaaaatacatcccttaaaatgcactgttatttatctcttagttgtagaaattggtttcattttccactatgtttaattgtgactggatcattatagaccctttttttgtagttgttgaggtttaaagatttaagtttgttatggatgcaagcttttcagttgaccaatgattattagccaatttctgataaaagaaaaggaaaccgattgccccagggctgctgttttcatttcctcattggaagaagaagcatagtatagaagaaaggcaaacacaacacattcaacctctgccaccatggggaactgggctgtgaatgaggggctctccatttttgtcattgtaagtaccaacaagagataagttataaattctctgacttctcggggttatcttggaactaaaatagaccaaagcttttttgttcatttgaggaattgtgttgaaactgatttaccatgtgaacctatatctatctgtaaacagactgagtccattcttccaaattccttaatggaaagaacatatctgggggctcacttctagcttacttctgaattcctaggaggaataaattagccagcatttcgcagaaggagtagaaaatatttcatgctaatgatctctgattctgagttgtttagtaatgtttactcagacgcacatgtctatgtgtttatactactttaaaaatgacaaattgaaattttataccattttctaaataaaaaatataagattgactcatgtatgggaagtaggcctttatttcagtaattacactaaatataataaaacttctcaaatttattttcaaaaacaagtaccttcttttttcagagatctaaacttgagttatttataagatttataaaaattcaaaagaacagaattgaaataagtcatctagattcataaatatgtagtatgtatatttatatataattgtatatatatataaatcaatatagtctggagaaactatgtaagtaaagatatagctaatttacaagtggacagaatgatttctgtactttttaaaacaaagaaaatcaactgttctcttaaaatggtgttatcagcaaagcaataatggacaaattgggtagatagaaatacgatttttaaatagcctttctaaataaccaatagaagcattacacagatgttaaaaagtacaattatgaatggaatatgaatggagcttttgtaaaaatttatcatgaaaaataatgagtctttgagttttaaatatagaaagcaattagtggcacaaataaaaacaacaaatattttgttataaaaaatgtttacgccaaaccaacattctactgcaacagagaattcttccgagtattcgaagctgtaaacttaacttcttatcaccatttttaagggcaaataatttctatagaaagtaagttcaaattaaacttttagctctcgccacaatttttcccaggaaatgacctccttctaaattatatactcatgcacttgaaagtgaaaacacagcttggaaagtcagagtaaagaaagaatgacaagatcaggaaattgggaagttgctttagcacttttttctttgtaaagagagaatattatcaagtgtctagagcatataatagcttcaaagcatagttgagaaaagatcactatggagctgaaggtagagaactgggtagtgtgaccacttgatccagtcagtgcttaggataaaatgaactgtcatgatctagaaagctgtttttgttgtaaatcccaagcccctcactatgctcaatattctctccttgaagcattaagtaaaactaatcaaggaaaatggaaggcttggcattttagctgatgagaattcactagctggattactgtgtggtagagggaggtgattagcacctgtgagaacagaacgcagtgtcatactggtggagggaaagcaatagtaatatgttcccttcctttctcattttaagtggagtggcctgctatcagctacctatccaaggttaagcaaaagagaggggaaaaaaagggagtggggtaatgtaagactgataatttggtatactggccaaatcataaaacaatcatggggaacaacacagggtggagaggttttaattatagacaagtgtagtgacactgttgaggaaagagctggctctaagctggttatatccagctttgtcactacctttgtcaaagttggacttggggaagtcctgacccttatctgactccagtcttgtgtggaatctactgtggaaatgcggaaacttcatgcaattatttctgtttgtgcagctggtttgsctgsggttgaacgtcttcctctttgtctggtattaccgggtttawgatattccacctaagttcttttacacawgaaaacttcttggggtaagtataaattccatcccatgcaatattggctggttcacatttctcatcagacattcttgttcatcttcctgttagcattttaaatamatattctgaccaacccaaacagtaccattagcctcactccctccattgcaacttcctgggcaacagtcacttaaagccttccagtctgggaccaacaaaagtggggcagagggccccagtggcatccttccccaaccaagaaccatgtgccattgtttagcttaaaggagaaatctaatactcactctgaaatggaagggcaggttggagcaatccatccaggagtgacacatgtgggacaagtgggactttccatattttctaagtcacctaattcctagtacttttttgcatgaagagctctgctcctaatcacatgttatgaaatgatcttcagaaaataaatctctctctacatataaagactcgaggaacttgctcaagggccacatctgttgactaggacagtagagtgaaggcccttcagtttccttgggtcctttagtattctgagtttccttgaactgtcaggcctcttgcctccagaagacatctgttacatcatgctgaaactatgaattaattgcttaatattaattattataagtattataaatcataaataaataattttagcatataattatgctagatcattataattgttgttagcttattcacattgatgctttctcccgccaaaatatgcaacttctttagacattacaaatataataattataatgccaaagcattataccataccaatttaagatactgttaagatcaatttaagtgctaagaaaatatttaaaatctttaaaagtcttgatacttaactctagttaatgatatgcaccttaagtgttaaagagaaagtgaactgttgtctgtaacttactttgaaatgcatcaaaaattagatgagttgatggatgkatacaggaatggatagatagaatgtgataaagcaagcataaaaggtataatctgggagatgaataaacaggtatttattgtaaatttccttcaacttgtctttatgtttgaacattttaataataaaatgttgaattagggcaaaaggtcaatttcagatgaaaacaaagggtcctagctagccctaaaggaaaaccgttggctctgaaggaccttcctgtacagatcacttggtgtctctggtgtgtggcctcatgctaagaaccttggggaagtggggacagggcatattctgtgctcaaaaaagtcactctgctccctttcccgcctcttctagtcagcactggcactggmcaksgcccctgcagcctgcctgaatttcaacygcatgctgattctcttgccagtctgtcgaaatctgctgtccttcctcaggggttccagtgcggtaagagaaaatgttttactaagttcctctaattttcaaaggccatcaagcaaaatgcccttttttaggtaaaaacaaatgaatgatttgggaggattccagcttctgtagaatactcatgagccaagccattatctagtatatttctgtgctatttggggatggagctccctaagacaactatttggaaaacaaattttgaaaaaacacacaaaaccacctatacctcaacagtagcaatgaagtagcacacacgtacacgtttacacacacacacatatatatatgatagatatgcatatatacagagctttaggaagttgacatgtgatatctgggagttaatctttcagtgtcattcaaaaaaatttaagtcagaggaaatatcttctgtggataatatctcaaggagatggagtcaatggacagagtcacactataatgaatgtaaccaagaagtgttggcttcatggaactggggagcatagagctttctaaatgtccagaattcctttgactctcactycaacaatttagtaagccactaaatgtactgtgctagaagggggaaaaaataagtaggaagaatctctgtaacccataaaatggtatacaaatttcttactagtattattgtacaaagatgacaaacaaggaacttaaaatctacaagtgtactcaaataaatattatacaaagcaaaatatgatgggttccacaaagctttacaaataaaatactatggggaagcaagagagaagttgtgtcaggtggggcagagaatgaagaagggcattttagagaaggtgacattrgagatgagtatataaaaataagcttctaagaggtgtaaaggagagagaaaggcattctatgtggagaagatggcatggacagaagcacaggaaatagtgaggaaatcgtattcttgaaggccaagaattggcatagccttggcttctctttgtattattattataaatatttttttgccacctgtgaccacaccaaagagggtagctgggaaaaaagtagggattggtgtcctggtgggaccaattccgtggttcattaatgactagtagcttctaggttttttttaaaaaataaaaggtatagtaagctttttgaaaaaaatacttattaagtagagatcacttatggaggacagcagaaagcaaactacttttgtgggaatgtagggattgtacagggcagatgcctgacataaggctggagaaaagaggtaggattttactggtaaactagaactgcatatgtatagttgaggagttcatgcttaatttggcaattacagaatatttgaaggaggcagtgaactaaactgtaataacaagcataacttgccttgaactctgcctcatttttcctagttacactaaattcatgctgatccagagaatttttttctttaagaacatataacattcaatttactaatataggactagaggctataatttagcttttattttatgacttaactatttacaaaataccatttcatcttaaaccaactgccaaaattgggctctcacaaatctaaagtacaagttggcagaaataactgttacaccttcgcttcctcagaaaaagaagaatgttgataaccaatttaagatgttccagaaagagtcgtgatatcttcctctgaaaaattctgtgatgaggttcctttccttaagccataaattctatgctacgcaatgttgtcttgcaaactgagagctaaccaaaaccaaaaactaacaacagtacttggtattaaacattgattacaaggatttccaaaaaatcttccaaatttaagaaatcacagaggtaaaattacactcaattgaaagttttattaatgagccacctattgtaaagtataacgtttaatatatcgtaagtgcccagtgaacatttgctaaatgaagcccatgcactatagcttatttttgagttgggttctctatcacccaggctggagtgcagtggtacgatcatagctcactgcagcctggaactcctgggctcaagtgatcatccctccttgacttccatacatgtggggattacaggcatgagtcacctgcctggcgagttccttgtttctaaggagacacaattcatttttattctccctacccccattagaatagtttctatttagaggaagtaaagcctgagaaacaggcaatgttttcaccaagatggcctgttaagaaatcttggttagtctacaagtccaaatttcactgccggtgagcaccatgtcccatgagcagcacatgttgtaatgccagcttttatgcctcctgtgacccaggagggaagatctgcatgagagtctctaaagacagggatgaaatgagactgcccttcaaatcgcagagaagcttggctgtataactacatagatctttatataaaagaatatgttttaaaactatcagcaagcaacattcttttatagatcaagcatgtactttcttctgggattcctaacctgaaatgtgaacttttctaataaaacttcttctgtgattgtgattaaaatgagtgagtgtgctgtaactaatgttggaaatcatatagctgccactcattgaagcttaatggaattcaccgcatgaaatctgcacatcaaaccagtaaagtgggaacaaaattaaatggaagtgttggcattcaaacccaggtcattgtgtccccagagcccattcactttaaatcatgctgccaaaacttcttgaaattgtgctgttgcagtattatgatcctagaaagccattatatatatgagtgtttgagcatgccaagtaacctagactagaaatgacaaggatgttataaatacaaggacttaatagtaggacactatataagcaaaataaccacgaacttgcattcagtttctagaggtctcaatcattgaaactttgctttgtaatccttctggttacctagagaaagaaagccccagggttgcccaccccaccactccaggaaaggtaggggtaaaggctctcagactgctttgttgagaaaaatggagaatgggtgaagctcagcacacaaaaatctctgaggaagccttaaaaacccccaacttgccatgcagaaactaatttctgtctggatggcagtcctagtcttaagatcagaaagaaacaggaaggtgagagggtgaggttttatctgttaccttatatagtctgggagtcagaggcactcagtgtgcctctatctttaatcacgtggtctagcactagtctcttgggctttctgtctcatagtttttttttttagttgaaaaacaggtcaactaacacaaatgtaagaaggcatatgttggtctaaaagtatattaattgtttaagtctgtcaattagtgagttgtcagtcaataaatatttgttgagtgccatttatgtgctaagcactggggacatgtggtaagtaaagattaagttatagataggccatgagcttaaggagcttagagtgttaacaggagagacagagaataaatatggaacttccaaattataaacagtgctatgcaaataaggtagtgttattcatatttatcagatattctactgccagcaggtgtggatattactgtcaacttacttgcctgagttctgtagattcaaagttggattttgtaatttctcccagttgcgtataaatatctaaatcagatacattgatggtgcgtgtggtgagatcaagtgtacaaaaagtagagcttttgagtttctgtaaagtgttacaccccataaaatatgtacttctttttagttccacttcccattttcttgaaatatttttttcttactcagtttcaatagagcatagaaatctgctgaagtgactcaataatctcccttgcattagaatggtagtttattgaaatcgggcaaggcttccggtgacagtaacagagaaacttccctttagaagtcaatggcagaaagtaaagtaagttagtaaggaagctatggggcatgatggcaacgtggataattgggaagtggctggcaataatttagaagtaactcaaagcatataaatgcaatctgcctgatgatggggaacaaaaaattatgggcagtcacagacagtaaagtccttccttcctatgccaccaaccggttgtctcgcctccttttttaaggaagtggtgaggagatggtattcttaaaagcccagtatcagcatgacttgtggcttctttttggatttgtttgccattcctgtccacaccaaagagggtaggtgggaaaaattagggatttgtgccctgatggttggacccactccactgatccattagttactagtaatctcactttttcctttcaatataatatatgtgttttacattaactagctttttaaaaattacctattaagatgaaacagagtatcattgaatggacaatgtatttcccaatcacatctctccactgttctggctttcagttaatttttctctaaggatctacagttaaagctatcagggggcatcaacatatattattttacattttttatgatccatggtgattatgatgataaggataggactatgaagacagtgtatgttccacaacaaaaccatattcgtttgctttaaattcggcgtgcaggagccagtgaattttccccaaaaaatttcaaaaggatttgtcaacaaatagaaaagaacagtgtgtggcaagtatagacatgggggtaaattcatctctataggtttagtatgatcatctccagttccagggcatgaaaatgtacttcatttatgcagccaaataatgattaaaagatttttttaagtacatgacatactgtttttcacacaggaagcttacctgctagctggggagtgcagccttactaactgaaaacttaaataatgatactaaataacatcaaatattgattaaatacctgtcaatgaatatatgcaatagggatttgagggactaactatgataattatacaggtgaggaaactggagactgagtatgttgttcgatgtcacacggctaggtgggaggactgggacccaacataggtatatctgaagacaaaacttgctctgaaatgtgtaattcagtactgctttccaaccctactaattctcattctctgattctttggactccaacctagtttcaccactcctgtaaggactgtatcaatcatctatcgtgtaacaaattaccacaataacttaaaacaacccctgtttattagtttacagttctgtaggtcacaagtccagcacccagttgctgggttctctgctcagagtatcataagactgaaatcaaggtgttttctgggctgaattcccacctggaaactctaagtaaaaaccctcttccaagctcattcttgttggcagaattcagttcattacagatgtagcactagaggtccctgtttccttgctggtgatcatctagggtccactcaaatcctagatgttcctgcattccctgccacatgccctcctccaccttccaaccagcagcagtgcttcaaatctctgacttcctccatctctgacttctaaacccagatttaaagagttcatgtgattgggtttgttggcccagataatctccctattaaagtcaacttgggactttacctctgcaaaatcccttttgccatataatgtaacaaaatcacagagtgatgtctcatcattttcacaggtccaaactcaaggggaggagattatataagtcattgggggtcattctagaattctgtctaccacaaggactctcagaaactatagaggaaattaagttgaaatttaagaagccaaagaaagaaagaagaagaaagaaagaaagaaagagaaagaaagaaaggaagaaagaaagaaagaaaataaataaataaataaataaataaactataaaggaacatggcaattgggaaacaggaaaaagttatttcctcaaaattttaaggaatacaaagtagaaaataattttcagcacttgtaatgaacacaaaagacaaggaggctatataagaaaacaaagatggtcaacttttcaacaacagatcagtaaaatgtattttacaaataaatttttatttcaaaaacattaagtttgaaaatttgtattttacaagtttttatttcaaataggaaaccattgttttgagagtctgagtcattgctcagctccactggtgaacatttaattataaccaatgcattggtgctccaccatattccctaagcactggcacttccaatccatgcgacaactgccctttgcaagcatcattcactctctgcctggggattttctttcagctttctcctggggcaagcctgaaatcccaggggattgatgtcctgagagcatccctcagagcagccctcagccaatcatggatggcagttggtggttgaacacccaagcttcttaacccgttaggtaaaaaccaaagaacgaaacaaacaaagtaaatgaataaaaaaccctttgggataagttctacacagtctcccagagttccctggtgtgatcgagcccaatgatatgatatgatcatggtagctgatataataatgcactcttcattaatttcctkcccagtctcatttttaccctcgttttctatgaccaccttccggatagaatacttacacttaaattcttgtcacaggtttctaggcacttagaataatagtgactatattcctgcatttggtttggtagaaaagggcattaaccttttatagacaaatagacttggatcccagccaatgtgcaattttagctttagttttcttacctgtaaaatgaggacattaagatttaccttgttgcattaaatgagtaatgattatgggtaaactacctagttcacagaaggaattcaataaagcataatttttttatttttcctttttctggaatcctcagtgtcttccttgctactatttctgtaatttcaagaacctgacctcatggtttaaacttcctgccctccctagttatggctaactgagagatagatggtggagtaagcacaattttctgtgcaattatattttctacaaaatcagagtattttattaaaaataagtaagccaaatattaaacacccctatatttaaattgaataaaacatttagaaccaaatattttaagtacataaattttctttggtacttcactctcttgttcttaaagttccctgaatctctgtgacagtgcatttagactatggaacaaagcaaccagagcaagacattggccagttttcaggagagccaagctctaattcaaccataaatcagtttaaatcagtttttttctttctttgagcattggcacgaattgagattcaaactcacattttctaacatatgtaggttcgtcaaatacactaaaatactgagtacaatagtatttttaatgccaaaggaaatcatgtaaagtatgaaatatcagaatgtttatataaactctagtatcagatggcctgagtttaaatcccagctctgcaacttattagctgtgtgacctaaggctaggtaaactctctatccctttgttttctcatctgttatgtagtaataataatggtacctcccttgtaccattattgtaagaattaaagagttaatttgattattacattaaagattaaattaaattaaatattacatcaattacattaaagattaatgtaagaattaaattagtcaatgcatgtaaaacagttgcagaagctcttggtaaatgttagctattgttattttggctattagcatttggtcaatgatctcccctgtgatgttgttcacctacatgggcaggtgtacccttctttctcctctcatagtgtgtatgtcctagaacagtgttgtttgaaaactattcacttgttctagaactgttcacttgtctgtgtccccacttgactatgaggtatgtgatgttaatttctacatcctttgtttaatgagtaaattaatcagaactagaaactatgtagctagatatgttttttgtacaagtttatatttttatacagttaagcaatggattccagaggagactttatgtcaccagtatgagaacagaaaacayaccagttaagccagccatgtcacttactggctgtttgacctgaggaagatgactgcatctctctgaacctcagtttcctcatttatcaaatagatataatgatacagtttgcagggtggtcatgaaaattaaatgagataatatgtatcaaatgtttgacacatagcaagctttcctgttaacaattactattccattctttcccccttaatccaaagtgctgctcaacaagagttcgaagacaactggacaggaatctcacctttcataaaatggtggcatgrakgattgcacttcactctggtaagtttattaaagaaaacttggaaccagggagttccctctattcatagatacctttttatataggagatcaaccagttttatagttagattaagtggtggttggatatgttgtatttttttaatgagttttgctcaaaagtatttaccacactttctgccacttcaatattaggatttattcctttaggttttaaagcatttttatttcaggattttcctataaaaatgaaaatatgccatcagaaaagtcaatcctagtgtcctcaccctttgctattctttctagtgtcaaaaatgttaattcactcatgaaaacttatttattctaaaaaaagttcttggttgcaygtgtgaatttgtggactttttgcagcaaacctacaggagccatagcccataaattgagaatccctcaagacggtcattatcagctaaataccttcattattattattactattgttattgttattgcatgtatccatacaatggatatatatgtgtgtatatagatattatatgttattattaaaattattagggtggtagtgtcagtgcaagaagggctgtatttgggacccttatctaattccactaattcactcaacaaatcattcatgtgccagagaatatataagcacagtgataaagcagacttgtactctgcccttaaaaagtctgttcctagcctgagtaaaataggcttagattacaggcatttaactgagtttctcttctactagtagatctggcaggcttttttagcagtggcaaataaatagttcaaaagaaatatatgataaaatcttgttagaaactggcatagtgtacggattaagagcacatatttgcgtgccagaggtactggatttgattcttaactctgctgcttcctagcttgatgaccttgaacaaggttttaaagcagtctatgtcccagcttcctcacctgtaagatgagctgatattaatagtacctacatcattgagtcaatgtaaggattaagtcattgtgaagtacttataacagtacttggcatctagtaagccctatgtaagtgtttattaataaagaatgcaatttttaagacagagagattcataccttatggccataggtttgtatcaattcaatcaaatttgtcatctctctctggaggtaatttcagagtcaggttaatgggccagcaattaggcattcaytacatgagtgttttcttgtttgagcccaaatatattatggagagagataatgagagcatatctaaacaccttcagaaactaaggctattgtgtagratcttataacttgattgagtctttaggagcatatagctcaacatcttcatcttacaaattaggaaaccaagaccagagagttaagtcattttcccacaattacacaactagagaggatcttacccactagaattgccttgtctccttggttctggagacccagttcttgtctataagtgtcctgggcctccctttgtctccctgtggcttatcatagagtcagaggctgtcccagaaacccagcttacaataaatttgttcatacccttcattctctttgtttctcttctctgcccttttcagcgattcacaccattgcacrtctatttaatgtggaatggtgtgtgaatgccygagtcaataattctgatccttattcagtagcactctctgaacttggagacaggyaaaatgaaagttatctcaattttrctygaaagagaataarkgtaagcctctcattatctgacttagatattctctaggccattacaattgaggactagatttcagtgagtgaagacctytcctttgccaaaaaaaaaaaaagttggctaaccatcagagggacaagtctgtaggttacaataatgggagtatagaaaaaaatgtctcccacactcctcacctcatgtgtggaggtctctagatgytttccaggtctttaagctcatccatgagaatgtgtgcatgtgaagcctggagtaactcaggcttacctgtgactatgcccaccagtcaaagaaagctgggaacacatgtctagtcgaacaaggtttggtttattacttgctacagcaaaagaaatctcacaccttgaggaactctgggcatctcaaggggatgtaaagtggatttagaatttaggattctgttagatggtttgggggaggatttaagaatgcaaggattttctctggatcagttatggtcaggaattgggggtagttctcagataaggtatcttaattattttttctaggaggcagagggaacagaataggactaagtctataataggcaaagaagcagtagtcattgtctaggctcagacatgattttggagtggttttgcttttatctcactccatcacagtcacagagtgacctcctcagaagctggtgttttgtgaaattatttatgtgaagtagggaacatcctggcctaagtattagtgtaaggccagccaccagctgacagttgtgtgatgcctttttcttttcttaccaacaacatctgagggatggcctgtgtctacagattgtcattccttgagaagcacatgtgcactgggagtaactcagcatttctctaggggtagccaggagggtatccagaagtaagaacttcttctatcccagcagttgttgaagcttcctacactcaaagacagaagctccaagtcttcatgcacccaatgacttgggaagatgactaaatcacattaatatgcactgaattctaaaaatgttttcttgtgtttagaaaacatccttagttttggaaaaaataattattatyctcagacttacatgagaaaaacttgcctgatatacttagggagggaattaaacagcatcataaaaaacagattttttctacaatatattgggtaatttttcttttacattattcattgtttgcccaatgatatatgagggtggcaacattaacataactaggtaaatctacactatcatgctctattcagttgttcctggatcacttttactgtatctatgctctcctactcttctaaatgttttcattttcaataacctgtaactgtttcctcctcagaggactgccctggggctactaaagtcccttttctcacaggctcagagatcttggaaggttggtggggggtggctgaatggttacctgttcctgtgcaaaccgttagccaataactggtggatgcagactatgaaacctggcttccttgccttgagacaggataaactctaagttgtaacttaccctccagagttgccttgcaggatcaggctgaagctatcccctgtgagactgcctgatttcacccccttgcttgacttgtttgtcttttctatcctattccctactctcttaccagtttctcttggagcacatgttttctaagtcacttgcccatgaagtctcatctcaggatctgcttctggggagcacagctgatgatgttcagcattcccagaatatatttgcaaactaagcactgtggccctttcaaaatcaaagggagaaagagccttcagacacttttaggacatcctgtagttgattgatttcctttattttctacccccttagaaataactatttaagtacatcagttcacatttcctatgacatcttaaccatgtaagacattttaaaatttagaaacatctatttcaaatctatatctgtctgtgagggatgattaggattattcaaagagggggtgaaaatatctattgttctatacattggacactttataatagtcctgcatttgagaacctataatattgtgcttgcgcacatgtgtgtgtgtgtgtgtgtgtgtgtgtgtgtgtgtgtgtgtgtgtttatattttacagaaccctgaaggaggcctgtacctggctgtgaccctgttggcaggcatcactggagttgtcatcacgctgtgmctcatattaattatcacttcctycaccaaaaccatccggaggtcttactttkaagtcwtttggtacacayrwcatctctttgtgatcttcttcattggccttgccatchrtggagstgwgtgagtgtttaaattctgaagtgaaggatttcatgtccctcaatttctaggcaggatgctccattagaggcacagtgacctccttgcctgtgtgtggttagcctgtctgctaagggaatgtgagaggatagcagaggtcagtttgatagaaaccagtcaacattggcatttttgtttcatgcacccatgtaattgctattcatggtgaagttatatatagcaagcttgaaaaatacaccaaagtctgagtatctttgcaaatgtataaaacatattgagagcactggtaggatctggaacatctgcaatgatatcctctatggtttaatcactagtaaattaaacaaacctccagactagaagagttaatgattaatcagttgaagaggtttgttatagttcaataagttttgatttaagcccacagtcatttatttgttgtctaccatgtatgaggacctatctcaggcactgcaggaaatacaagcaggaaaaatatgtggttgttgccttcaaacattctaatataatgaaagtagcagctaacttctattaagggtctgtgctaagggtttgacatgatatatttcttttaacccccaaaatgtatagatttctcactatcaccatttcttggggatagtaattgcagacaagaaacctggagctaaaatgttaaaatatgcagcctaagccacctctctggtaagtggcccagctgagattggagccaggcagtctaaagcaggctgtgataaatgttctcttagagacacacagttcctggctatgtggttaggagagtttgcctgattggagatcctctttcataccaagtttccttttttgtgcagtttcataccacctgcacacaaaggcaggcctggggaagttccctggtgggtatagggctccaggaaattagggttggaggaagtagaagctcaagactcactctgcccagagcccagttggtggccaagacatgactgtgaaaaaggggaagggtggggaaagctgcattgggcactgcattcttaaactacttgctgactgtgacccctgataaactctttgtaagcatggagaaatcaatggagaccaagaatctgatgactctcttaaagcactcaaatatctttaaatgggacttagtcataatcccgtgtttcaggtaatcctagagaagagaaataatttcttcccctctccaatttagtaattccaccactttctgtttgtatggtttcgcagatactcatcttcctttgaagcagacagaggagatatgtttatctccttctccacttgaagagaatctgctctttacactggttaggtgatttctcacagtctcatggctccgtagcagctgaattgggtttaaaatgcaggtttctggactcctggtcctggcattgagaagagaaggagaaaatcagattattttcctatcatttacttaccatgggaacttaggcattttgaactttaatagttattttttggactcttactttgtgtctggcattttttatacatcatgcaaattgcttattataatgaacctttaatgaggtactattacatctgttttacagctgaaggaactgaggctcagaagaagttaaataatttgcctgagtccaccaaactagtaaggggtagaaatgagatttgaacccaagtctgtctgacacaaaacacaattgttttcaccaaaacattctgctttgagttactaaatcattctgatttacattctcatgtaaaatgggggtaataatacttgcctctcaggcttgtcatgaggattaactgagataatttgtgtaaaatgactttccccaagcctggcacatgataagtgctcaatacatgataattctcttccccaagacctaaggatagaaaggagtggttaatgaacttgaattaaaacattctcagaatacaccaaatgacacaataaattttaggtctccaaaacaaacctttacaatgggttttctgtgtcttttcttcttatatattctgaagatgctgtcatttatgttccttgaagtctactcaacgttgggccttcctctctctatcaccaataattgtcttatgatttggtagttgctcaactagcatttattgaattgaaatgaatgggctctgagcaattcaaggtacacactattagtgttgatgtctgtgagaatgttataatccctatatagttaagtatctcaaactggtttcaaaatttggtttgatttagataatttccaaacccacaaataaggcacttcttgtaagcttcagggctactgtatatgactgtctcagttgtctactatagtgggtgcctggccaaggacaataaagttagcccacactttgatgattgagccctttgcttatatcttcataggaagggtaccattttctaatttgcacaaaggcactgtaggggccagcagtcactctgttagatttgcaatttttctgcttttgtttgtttgtaaatgaaaatgatacttgagacagaagtagaaattctcccttaagagaatttgatccaacacttaccctctataatgttacatgtaaatatccctttggtaattgcacatatattttttctgttgctgagtgttatgcattttctttcctttcatctattcagagggagcaataagctatcgcttttaagtgaaaagtacagggcctacatcagagcacttaaaatatatgcagaatcttttaataaaacaatttaatttcctattactaaatgatctggacttacatttttcacccagaygaattgtacgtgggyagaccgcagagagtttggctgtgcataatataacagttbvtgaayaaaaaatctcagaatrgggaaaaataaaggaatgcccaatccctcagtttgctggaaaccctcctatggtatgtacaattcattgttgttattacagtttcattactgacaatctttaacctgtgtctaagaaacatgtacagatgttatacatctatatagatgtccattacaaatgtcatggarcagctaaaacatgtgtctacttttctctgctatacttattggatagaattgtttcttgaaaactaagctttgcattgttctgttattaacatcctgatataaaacttgggaaaatagtgtttttagaagtgctgttttggttcaagaagttccatctcttttcttcatgacgacgccagctaatgatttttagggggacacttgggattccatcttgagctgagttggatagctcaaataaatcacttataaggagcaaagggcctcttcagataccagcacataatactttctatacagctttccaatttgaaaaggaaattgatgaggtggtacataaggctacctttaggcattaggagttttctgtttatgaggcataaaggaggctggacggcgaggttcataccaacatcccaatggcatcatgtggtgggcagaagtgtggcaagggtgaccaaggaaatacatggtgaaatactttcttccttctattgggagctctgaagggttccattttgtgtattctcataacactgctccatagagtaagatgtgggccttgtaatcttcatatcattttccccattggcagatggtatactttgttggttattgtgctagccattggtataaaactaggcaaaaatcaacatttgtgcagggcttctgaagaggattatttttttttccttaggcacagtataacataaaggcaaattttccattccattttctcctttcttttttcctactctcttagcataggagcactcttactctagacacagcatactatatgaagacgtaggatctttaagcatcttttcccattaatggaagcaaccagacatatcagtgaattggctccactacatgcagacatcaatagaaaggataaaaagggaactgtattgccaatcctcttgtgggcaggggaaggcacatttcctcgatgacagctggagtcagagtactagtaccttagcagaaacctacctcaaagaatttctaggtatactagcagcaatatccaaatctggctccattcagtggggctccatggtagcactcaggaaacagatagatgatttgagactgttttawatatctatcccattaaaacaaaggccaacaacagaacattgtttatatttggggcaaatattcttcaagtttggctgaagatggagagattcaggtgctctcaatttccaacagtaagtttcctataaaagtaatctagtagaaagattatatgtgagactatcggaagcactctcttatcttttcccccttagaatacattccggaaagtcattttttagataatattgctgtctaaaattctttgctagtttaggtattaaactagaagtccaattggctgagtttcaggatggatctgtttgacctcaatgtttttatatggccaataatgctacagagtaattccagtgttcagaaacactgcatgttctgacccaagaaatagctaaagaagtctgaaaagctctaggtttgtctccattcagcaagtgcattgcatactcccagaatttctcagaatattggagaaacagccaaactcttgcataaaatttgtcatcttgcaaatttgtcactgtgactacataactaagagaaagcaatcacagtgttgcattaaaaatattgtgttgctgaaatgttatcctttaaagaaatgttaattctgaaaccaaccttgctttgttatagggttactgcaactgtagttgcaacactgagaggaaatcccattcttgtgaggagttcctcttgggaaagttttatcttgtcagtacagttccccattgtgactaaggagaatgtttacttttactggctcaaaattatcttagtttcagatattttcatatattccattgtagaagaaatttatttatctaatgtcaaatatttaagcaagcctacaaagattaacttggcttctaaaatttttctccctctgaatattttgttatctattaccacttaatgtatctcattttcatttttgctctgattacagacttggaaatrratagtgggtcccatgtttctgtatctctgtgagaggttggtgcggttttggcgatctcaacagaaggtggtcatcaccaaggtactgattggtttagtaattactagtggtcagtgtctaactatatcatggacaagtcttcccaactcctctatatcattgatcagatgttacaacagagagaagacctacaatttatttcaatttacttagctcaataatcaaatgtttgagcctttaactggggaaactacaagttaccatttttgatgttaaaatgaagccaagttctttctggacatcaatctcccccacccattgtgtgtgtgtgtgtgtgtgtgtgtgtgtgtgtgtgtgtgtgtttgtgtctgtgtgtctgtgtgtttgtggaggggaaggcgacagaggcattatttggttagttaagagcagaaaagaaaaagaggtgagttcaaaggggcataaattgagtcttaaaattttcagatgccaaaagaaccagagatctaagggtaggtctcactgaggctgagctagtttttcaggttgtctttaccaccttttctgtgctgtgtatgtaataatctaataggaaagttgaagtgcccaaaatttcaacaagttagtaaataagctgcctctcaaatttgctctcctaattccaagtctagagtggcttttcctgaactctaatctgtttctcatcacaaaataaataaatatccaactaaataaatgtaaatggaactccttgttataatttcaggaaacactaggaaagtctatctttatcaaataaaatttaattcaattcaactcagttcaaaaagtatttgccaaaaccctactgtgggttatttttgcaaaacacacaaattcttcctgtcctccaccctatctttcctcatttgctgtctatggtgggtcatagtaaagttagttcagctggctttggaagtcttgaaatataggaaaccacaacagttctccttttgtgatatttatattgcattataagaacaatcccacagatcagcaaaaacagttgctgcaaaatttcccttactagactagagatgactgagtcagacaagtatttttcttaaacatacttttaaggaaaacttgttttcctttgaagaaaatagatatttgttttcttctcatataaataaatatgagaaacaagatgttatccaaaagtattccaatgagaatgctgtccacttatttagttacatctcatttgtgcctatgatagcaaaattgtaatatggtaaaaattttttccacaacacaaaattgcaacatggtaaacaattttcaacataattttaattttctgttttcaaaatgaagctttacaactccttatttcagaacagaagggaagtttgttatagtttttatcatgtaagatgcatttaaatcacaagttctggaaacgtttgacatttttttaaaaaagaatttttcactcttccacaactccctgttcgagaaaagcccagcaatatcagttaacattaggaagctgctattttatttctattgatttttctttcctttgatgtcccttggtttgtctttaattatacatataaggttcttctagaagtcttaggaatcatcaaagaaacagtatattactttctgtattgctcttcactgtgttctattttttaaaaaaattatccagtcaatagttgatggacatttggattgtttcctgttttttgctattatgaataaagctgttataaacgtgtgtacgtagacagatgaggatggcaatgggtgggtagaaaagatggtgtactccccaggtagggagaaatgtagaaataacgcatggaatcaggcagattcaaggtgtgattcaggacaaagatagaccaacttagttagtcttgttttggggaatgttgctacataactagtcaatgggatctccttcttctggccagctattaggttggtgcaaaagttattgcggtttttgccattaaaatatggcaaaactgcaataatttttgcaccaacctaatactaaggccctctctcatcctcttgggggataggaaggctgagcaggaaacatcagtttttgtaaattttttagcacttttttgacttctgagaggaaaaaaaaatcacaataggctgatttcttatgttggattccctggtaaagactgagaaataactgcatgcagaaggtttctaaggaattctataagagataaacctggaaaggaagtaagaaaggcaggaatggggagagagaaaagctgatcctctttctagttgtaactgtggcctcagctgatactacagggagtgtggaaattgagatggcctcttggagttaacctaagttaaggaaaagggactaggccttagtatcccttaatcagcccatcattagtaatgggctacaactgagggcaattccctgtgacagacacatctgctggaggaactcctgtgttgtccctaaagcagagatctaagtgggccaatttagctcagttttttatccatatggacactaaaaaggcaagtatttaggaaaaatgtcatttccagacatatgttttattctataggtggtcactcaccctttcwaamccatcgagctacagatgaagaagaaggggttcaaaatggaagtggrayaatacwtttttgtcaagtgcccaaaggtgyccaarctgkagtrgyaccmttttamacwgacatycgcccctgaggaagacttctttagtatccrtatccscatcgttrgggactggacagagsggctgttcaatgctygtggctgtgataagcaggagtttcaagatgcgtrgaaactacctaagtgagtaaaaagtacatattaccaacgtatatgagttcaggaaaaatggcactaaatagctcctcttcctccatgttttactaagtctccaacaaaacacacaggttctaagaatataggtagctatttctgtggtcaccgtttcatatgtgtagtgtgtttatgcatattttcataaatcttatgtgaaatatgaaaaccttgaatcaaatattagaaataaatactcccaaattcctttaaatatgtaagggtcaaggccaagttatattaactttcctaacaaatataattgtagtgtatcaaaaatattcttaaattttcattggcataatttatttgaggttaaatgccatatattagcccctttgcctccttttccctgcatgcctaacatgctataaggcacttagtaggtgctaaagaaaggtttgagagtttgttgaataactcaatgaatagataaatgaaaagtggagacattaaatctacaagatgtaatgatgcagcaaatcctcacttcagggtgcaccgtatgcaagaatttcaagagtgggatgtcctggcaagacatagggtgtgtgtggagggggcgttgttgtgtgtgaagaggggtggggagattaaaaaaaaaaaaaacttgttctgagttaccgaatgtttttggttagccaaatatttctctttttacttccaaacccaacgttggcactaagtttggttacttgaaagctatttcatagaaggaagcacccaatagatacattattccaatttgaattaacatgttgcacatccccaataattatgggtgccccatctcactctgaagagcaagacatctctgtaactatctcctccccatttcccttcaggatagcggttgatgvgcyctttggcactgccagtgaagatgtgttcagctatgaggtggtgakgttagtgrragcagggattggggtcacachcttcgcatccattcycaagycagtctggtacaaatattgcaataacgccaccaatctgaagctcwaaaaggtaagtcctttcatttatyggagggccttagagcagtaaccatactctgccatgtgaggcctgagagtgctttcagggctaaggttggcagagaccatgggaagtgaagaaaagcttccggtggttccagagagacaggcttttcttcaaaagaatatttgttaaatctaatgtgcttctagataagtaggcctattagtgaagggaatatattgtatttgtatagtgttgctggaaattcagaagaaagaaagttgggaaagtattcacagccccaacttaatagctgtaatttttgtatattctcttctaatattttccatgtttacatatttttagaaggttgtaaatattaagtatgtataatttcatgtcctgcttttaaaaaaacattatagaaagtgtttttcaatgtcttcacaggctttataatgatgactttaaatgatctcttcatgttctattgagaggatattgaataatttttctttcatcttgtgttagatactgagattgattcaatttccagccgcgccccaccccctccactcacccartactttttttgcaaagggaggagaggagacctgaaactctacttatgaatatctcctcaggatcaattcacaggagattttttggttacctataaatttggttttattgtgtaataaagggcatcctaaataaacctcaggccattctaataactgtaaagataaactctaatagggacattaagcctaccttgacttttcattctccctgtacctcttttccatgtggaggagatgtgcatagaaccttatttttcccctcggaactcatgaatgtctggcagtagcagccagggaagaatttctgtggcaatccctgctagtctagattccatcaggctttctgagaagaggttcgaaggaagccagagattctgggagagtaagagcagactcagagggaaatttggtgggctaatagttttttcttaagttgtgtatttctgaggtcaagttacttatttactgccctgctagagtgaaggccagagcaggttcatgtaaactaccctgtgaaatgtccagagccttctgaaaatctatgtttctaggcattctgagcatcaagaaaaagtttaggtgacagaaagtggaattccacatggtaatgctgatagggcctgccaaatataatctgcttcatgatccaccccattttcagatctamttctactgrctgtgccgggacacacatgcctttkagyrgtttgcagatctgctgcaactgctgkagagccagatgyaggaaaggaacaatgccggcttcctcagctacaacatctacctcactggctgrgatgagtctcaggtaaggacaagactccaaggctcaggtccttcccatagtgtacagggcttacgaacttccccttggttattggtgtgtcttgtgtactattttttctaagtatgtttagtggatttggtgatccggtccattcactctcatttagtatcgccacattatatttagactgctcagattagaatcaaagccaaggagcctgtgagggaataaaagccatcactttgacattattagagcaattctcccaccaggcactctgaaaccaggtgattgagatgatgcacagggttattttggggaaaatttagctttctctttctctctgtctctctctctgtctctctgtctctctctctctgtctctgtgtgtgtgtgtgtgtgtgtgtaaaacagacactccccaacttaataatggttcaacttatgatttttcaactttacaatgaagtgaaagcaatrtgcattcagtagaagccatacttcagtacaagccatacttcagtactgtattcaataaattacatgtggtcttaaaccttttattataaatagggttcatgttagatgattttgtgcaattgtaggctaatataagtgttctgagcacatttaaggtagtctagactaaactaactatgatgtttattaagttagatgtattaaacccattttagacttatggtattttcaatttagtgatggttttatcaggatataacaccattgtaagctgaggagcatctgtttatataacatacataagcatataaaggattctgtatatatatattttaatatgtatttatatatgtatcatatatatttatatgtactatgtatatatgtatttataaaatcatttaatttatatgcttttgtatgttttataatatactcactacatttataattattatgcatatatattgccaggtattattcttatgtatctagtcacatagattgtctaattttatcatgtcaccaaccctatgaagtagctcttattattttccacactttacagatgaaaaaactcagaccaggttaggtcattttcctaagagcacccaacaagtaagtgacagagacagaatgtgccagagcctgtcctttcagcatcttgcagtagttcatgattatcatttataaataaattactatatatctaatgaatgtgatatatatgcatgtatgtgtgtgtgtatgtgtgtgtacaatgagagtgctctttcaaaaatgtttggagaccactataataaagtagccaatagttctcaactgggacaattttgctctgctcctccccaagacacacaccagagacagttggcaatgtaaatatcctacaattaaaaagacagccccccacaacaaagaattatacagtcccaaatatcaacagtgctgaaattgacaaaccctgaaacaaggtaatgattcctggagtggtaacatctttgtaagtaagcaaacgttaatgacttggcctggaagcagcataagctatcaccatgagtgaggagctaaggcaagagtctctgcatatttctgtccagtgtctcagctggtgtcttagtccatttgtgctgctataacaaaacacccaagactgggtagtttgtaaagaacagaaatttattttctcaaagttctggaggctggcaagtccaagatcaagacaccaacaggtttggttgtctagcaaaggctgcatcttctgggtgggagaaatactgtgttttcacatggtggaaagaaaaagggaaggctcgtcaaatactgtgtgatgactcttttccaaagcccttaactcattcataagggatgatccttcatgtcttaatcacctttttaaggctccacttcttaatgctatcacataggcaacatctgaattttggagaggatacattcaaactgtagcaactgggcatacatagacattgactccacaaccctgggaatcttccatgtgcaccctgtcactgtgaagactgaattcccatttgggtttcaacatattgtttatcacagattctccaagtcttaaaggaatcttgtagcaaatatagattagggaaacataacgataagaattgttgctccataaaaagtggtttcaaaatgccagttctgcaatttaaaaacaaaacaaaaatgctttgataaaaataaaactcaggaaaaaaatctatagtatataaattgctttactgttctgttattttaaaagccatgcacaggtttcttttttaaatcagttatttatttgtattgaaaaagtaattattttgctttgcaaaactgatatctatagaattattaaattggagtgcccacctttcttaacctcctctatgaccatcatccatctagtgaatttcaaatctgatttgctttttaaaaataaatttaattaaccacttttatgaaaaatacctgttgctcaaactgaagcctcctagaatggtagcagaaaaacagtatgtgactatatacacatatgtgcgtgcacacacacacatacacacacactagctttaggcttgatttgatgtcttatgctaccaaagtattgctgcattttagtctaaaattgttacatctcttagtaattctcccaaaggagtggaagtatattagggtggagagaaaaagtcaaacatagagcagagagaaaaacagtgagacactattcatccatcaatgcctgactcaaatactgcggccctaacccttcccctattcttccacttcaccttccttctttgttctcattaggacgcttgtgcctccttcatgacacacatcataccctgttcgacatatgggattatttatatttatacttcgaagtctccctttctagactgtaaattgcttgagagagatccagtttatttatctttgtttacctttcagcatccagcagggtgccttggttagaatagcttgtgaaggatgtaaatacattgtatgtgcttttacagaatgtctcttttttttctgaattcatgtcctttcctgtaggccaatcactttgctgtgcaccatgatgaggagaaagatgtgatcacaggcckgaaayaaaagactttgtatggacggcccaactgggataatgaattcaagacaattgcaagtcaacaccctaagtaaggagtctgtcaccaagatgtttttgaggcttgcatctgcctaaagcggcagcccctatacatatctaaacttatatattttagaaactcaaatatgtatattactatataaagattgaattcatgcccaacagaagattccagatatcttcaactttaagaaggatctttaaattataccaaattacctggagattaattaaaaacaagtatttccaggtccccatctcagattttctcaacctgcctgtcccaagtagggccacagcttagttcttttctttagtcacctaaatttcattagtgtatctacttcttttaaagattcaatataatttatacatattgttaagaagacactgtccccactttcagttctaaaagcttctgggtctaaaatcttaagttgacagatgtctcaaggtgctttctgctctcactaaaactttagtcattataaaaccttgagggggatcccttatcttgctagaacacctaagaaactcaagagatcaccatacgtgtacccttcagactattgctttttgcactgtaaggagcatacaaagtgcctggggatctctttaaaatgcagataccaatttagaagatttgaggtagggccaggtaatctgcattttttaaaaagctgacgccaaggctactgatcagaaaccacactttgaacagggcttcagactctaaaatttagagaaatgaagccacactgagtggttggcatagttagcttgttcctaatttcaagatgccagggggcacagagccctgaaggaaagtagcccacggactcatgaattcaccaccattttctctgtgatagaagtttccaaaaaccttggttggattttacttttgccagggaagtcaactaccttttgaactatccagatgctcacacaaacaggctgaaccacactccctctgagcaatatgatccctttgctatttgtggaaaagaaaaaggagcagaggggactctgccctggggcctcaaattaacgggaaattcacctacctgctttgtagacatctcatcccaaagcttgaaattgtctttttttttctttcccaaaagtaccagaataggagwtttcctctgtggacctgaagccttggctgaaacccygagtaaayaaagcatctccaactctgagtctggccctcggggagtgcatttcattttcaacaagraaaacttctaacttgtctcttccatgaggaaataaatgtgggttgtgctgccaaatgctcaaataatgctaattgataatataaataccccctgcttaaaaatggacaaaaagaaactataatgtaatggttttcccttaaaggaatgtcaaagattgtttgatagtgataagttacatttatgtggagctctatggttttgagagcacttttacaaacattatttcatttttttcctctcagtaatgtcagtggaagttagggaaaagattcttggactcaattttagaatcaaaagggaaaggatcaaaaggttcagtaacttccctaagattatgaaactgtgaccagatctagcccatcttactccaggtttgatactctttccacaatactgagctgcctcagaatcctcaaaatcagtttttatattccccaaaagaagaaggaaaccaaggagtagctatatatttctactttgtgtcatttttgccatcattattatcatactgaaggaaattttccagatcattaggacataatacatgttgagagtgtctcaacacttattagtgacagtattgacatctgagcatactccagtttactaatacagcagggtaactgggccagatgttctttctacagaagaatattggattgattggagttaatgtaatactcatcatttaccactgtgcttggcagagagcggatactcaagtaagttttgttaaatgaatgaatgaatttagaaccacacaatgccaagatagaattaatttaaagccttaaacaaaatttatctaaagaaataacttctattactgtcatagaccaaaggaatctgattctccctagggtcaagaacaggctaaggatactaaccaataggattgcctgaagggttctgcacattcttatttgaagcatgaaaaaagagggttggaggtggagaattaacctcctgccatgactctggctcatctagtcctgctccttgtgctataaaataaatgcagactaatttcctgcccaaagtggtcttctccagctagcccttatgaatattgaacttaggaattgtgacaaatatgtatctgatatggtcatttgttttaaataacacccaccccttattttccgtaaatacacacacaaaatggatcgcatctgtgtgactaatggtttatttgtattatatcatcatcatcatcctaaaattaacaacccagaaacaaaaatctctatacagagatcaaattcacactcaatagtatgttctgaatatatgttcaagagagagtctctaaatcactgttagtgtggccaagagcagggttttctttttgttcttagaactgctcccatttctgggaactaaaaccagttttatttgccccaccccttggagccacaaatgtttagaactcttcaacttcggtaatgaggaagaaggagaaagagctgggggaagggcagaagactggtttaggaggaaaaggaaataaggagaaaagagaatgggagagtgagagaaaataaaaaaggcaaaagggagagagaggggaagggggtctcatattggtcattccctgccccagatttcttaaagtttgatatgtatagaatataattgaaggaggtatacacatattgatgttgttttgattatctatggtattgaatcttttaaaatctggtcacaaattttgatgctgagggggattattcaagggactaggatgaactaaataagaactcagttgttctttgtcatactactattcctttcgtctcccagaatcctcagggcactgagggtaggtctgacaaataaggcctgctgtgcgaatatagcctttctgaaatgtaccaggatggtttctgcttagagacacttaggtccagcctgttcacactgcacctcaggtatcaattcatctattcaacagatatttattgtgttattactatgagtcaggctctgtttattgtttcaattctttacaccaaagtatgaactggagagggtacctcagttataaggagtctgagaatattggccctttctaacctatgtgcataattaaaaccagcttcatttgttgctccgagagtgtttctccaaggttttctatcttcaaaaccaactaagttatgaaagtagagagatctgccctgtgttatccagttatgagataaaaaatgaatataagagtgcttgtcattataaaagtttccttttttattctctcaagccaccagctgccagccaccagcagccagctgccagcctagctttttttttttttttttttttttagcacttagtatttagcatttattaacaggtactctaagaatgatgaagcattgtttttaatcttaagactatgaaggtttttcttagttcttctgcttttgcaattgtgtttgtgaaatttgaatacttgcaggctttgtatgtgaataattctagcgggggacctgggagataattcctacggggaattcttaaaactgtgctcaactattaaaatgaatgagctttctttgtgtctgtgttactgatctttgtattaaagggtaaattcagctagtaacaattttctctaccccggtggggttgagacactctgtgtttctgtatatgatatgccaaacacttcatggtttatggattgggaagtgaaagctgaagactaagttctgtgctgaatactgttgatcctcacaacactaatataagggacagggagggcaacttaatgtcatagacagaatttcagaaacgaagaagccccagtgtgacatctttgttccacgtctactgaactttcatgttctaacttcacaattgagtatcatcaattgtgggcaatatgggcaattgtgggcaattgtgagcaattgtgggcatatatgctcatgcttctgtgatagcccttgttctaaatgagtcaaccggttacgatctccactatttaggaaatgcataggggtgtgggcatgacatgttcctgtgggagtcaacaggtgctgccatggagggaaaggacattacctaaaataaatggcagtaatagaaatagccaacatttggtaaacacctcctactatgccgaacattttacatacactttatttaatccctcagcaacactacaaggtagccgttttatcctaattttgttgataagaaaacagtctgaacgaagatgaatgagaaggaaaagtacccataactattgggtgactatgtcaacattcaatccacatctttctggggacaaactccatgtcctttatactacactagcagattacactaggtataaaaaattaaggatattttctttctctctctctctctctcctttttgtttgagacggagttttgctcttgttgcccaggctggagtgcaatggcacgacctcagctcaccgcaacctctgccacccgggttcaagcgattatcctgcctcagcctcctgagtagttgggattacaggcatgcgctaccgcgcctggctaattttgtatttttagtagagacggggtttctccatgttggtcaggctggtctcaaactcccaacctcaggtgatccaccggcctcagcctcccaaagtgctgcgattacaggcatgagtcaccgcacccggccaaaaactaaggatattttcaaagcaattatgctaggtacaaattatgtaccaagaatagctgggtaacagtggtaacataaatctctagtttataccatttaagtagcttggtatcttagtttagaaacactggttaatctgattcatgctcatttttacttttaaattatgataaaatagaacctatcaaaaaatggaattattttgcttggagaaaagaaggctgtagggtgactcaataatatttattaagtctactttttcatttatatttattttatttataaacaatttctgtctttcagagaatggccagctgttgtctatagttttgtgtgtgtgtgtgtgtgtgtgtgtgtgtgtgtgtgtgtctgtgtgtaataagattgcatgaggaaggagctaaatttctcaaccataaattcagttgggcaaaaaacaaagtgttgacagaggctaggaaatctgaccactagagatttttaaaacctggaaaaatgatcaaccaagtggcctgagattcatttaaacttgtagcctttattatcttgttgtagtggttggggaatgaggtagtctaagtaattggatattccagttaatacttattgctaatagattcataattttcaaggaagtgggatgctataaattataagaagaaactaaatcctgaaatacacttcttcttggatttaaaaaatactaggaaatgttgtacatgagcagaggccactgtgagcttattttctagattttactctgaagaactaatgacatgaagactgtgcttatctgacttttgaaaatagcccgaagtattttcttcctacttcatagaggactgctccaaagacagcaaacttgatttatataagaaataaagtccaaaagatcttcataaatcttaaaattacattcgattataaagaaatcaccaagtttagcattatgttagatcccttgattgctaaatatcacttcctcttttcagtaataataaaatcactaacctacttatgctcatagaaaacactaaacatcactttttctgatcagatgagggcaagtcagggcataaggaatgaaaacgacttcgttatttccaagagattctagggcaattcttagaaatctttatgtcgattgataagaaaaaaaaattatgctacctaaacatctcttgggaatagcaaatgtgcttgcattggctgaaaaccatcagggaacactattaacatgggagttattccagaccaagctattggagatcagcacagctatctgattatcctgttttccaggtgggggctctgcataactcgcggctaaaatatcacactcacatctatgttatcaacttcctgctgcattccttacccagtgcttattccgctgggacaaacatgcctatggctttactgagatcgaaggcaacagcaagcttgaccatgcccaactcacaaagaaagtcagatgcaaaacagcctttaagaacatgagtttttgcccttcctttatagaaaataatcacaaaactttcctttccttttggtaaatataaaaatgcattttgagaaattcatttcctctttgagatattgtttatcaaatggtgaggggatgggaatcgggggaaaatgtaaaacaaatgaatggtaaccatattaatagaaaaaacaagataaggaatataatgaatagtgtgttttttattgtttttttttaaacagtaatgcttgaattgattgcaaattggctcagatttccgacttctccctggatccacatcctctgcagtgtgactttgtaattccttccatcatgaggagtccttttgctcatcccttgaatctgggctattctcataacgaactgaccaatagaatgtggcaaaagtgacgtgtgagttccagagtctaggtctcaggaaacctagtgtgcttctcttctctcttttgcttctctaccttttccatacagaatgctcaggctagcccgctcaagggtgcaacctatggggcagagcagagtcagcctacttagtcccagccctaagaccccagatatgtgagagagagcccaagactaacaaaactgcccaggccatccacagatgactgtagatacatgtgtaagttcagttcacatcctcagaaccacccagatgtcctgtagatgcatgagaaatgttaaatgcttgttgttttaagccactaacttcagagtagtttgttatataacaaaaccgctgatgcaaatggcatcaaaaattgttgaaagagagatgggggttcagggtgagagctgtaggtgattgtatctgtgctaataccacatagcccttttttggggattgccatgaataatatattagctttgctatgagtaaaatactatatcctctgaattgtcatgaattacgtggagtcatacgtgttttggaagtgtgaaagtccctgggctcagataaaaggtgttgccatctggaaagtacaggtagtttatttcaattctgctccaataactagcacgtcattccattcatgtagaaataagctactggctatctcactatctgaaatagaagtatgaactgtgggtaagtgggtgaggacaatgtctgagcaaccaaaaaggagctcaaatccacaaacggtacattaaacagtggcgaagtcagtcagaaattcactcagagttgttgtgtacttgccataaccagcttagtcatgttggtcccaaagtcatagttgatgagaagtagcaagttaagagagaaagacttctagagataggtacatacacaatgataacaagtgacatcagagaacctaaggaagggcaaagaaagaaacactgcaaagcagactcaaacacttaaaagcatagcagcttggggccagttagtgtaagagaaaaggagctccatatgcctcaatagaacctaagagcatcattgtactgcatttattcattcattcacttcacatgtttattcaacaaatgctatgtatactgagatttttctctggtcattgtactggctagaacctaaaggagtgagactattaattagagtttacaatctggcaatgatattaacagtctattcacaaaagggttaactcaagttaagccggcctaaatgtttatgcaaaataggatttttgcctaagtctaaagggtatcagaaaagtgtagccattgagaatgactcatttcatggtgttctcggatggcttaagtattattaatatgtctccatttctagtgcaggaacctccacgttttagaggaaaggaggaaagaatttgtgaagactgtgcctaaaaaaggtagaaatttgtttacaatttatttaaagataaaagtaaagaactaggttgctttaaaaaagggagggaaagaaaatcaaaatacatcttatttgaggcattaaaacttttttaagaaaataaaatttaaaataaagttgtattcttctaaaaataattttttaaaccagctgaaaatgaaaaatgcagattatactaagaagcaactgttttacattctgctttctgaatggtatttaaaaactcagttattttcagaaatgaggaagtcttgatctgctagatgaaggtcggctgcaggtggtgtttattgctttatgatggcaacaaaccgtaaacccatcactcagtaaatattaaactggctgaatgaatccaaagcatgtctaacatacaggaaaaacacagccctgttaagcagtcttgaaacccacaagctacatggaaaacacagattcaactacatcataaaaattcagacaattctggttcaggatgaagaattgatcctaagcaattttctttctctctctctctctgaagactcttaaatggcattttaaaaataataatggggccaggcgcagtggctcacgcctgtaatcccaacactttgggaggccgaggtgggatcacgaggtcaggagttgaagaccagcctgaccaacatggtgaaactccgtctctacccaaaatacaaaaattcccgggcatgtggctcacgcctgtaatcccagctactcaggaggctggggcaggagaatcgcttgaacccgggaggtggaggttgcagtgagccgatatcgcaccactgcactccagcctgggtgacagagtgagactccgtctcaaataataataataataataataataataattagcatgtcttttaattagcatgttattattattatggttgccaggtgcagtggctcacacctgcaatcccagcactttgggagactgagacaggtgtatcacctgaggccaggagttcaagaccaacctggccaacatggtgaaacaccatctctactaaaaatacaaaaattaggtgggcatggtggtgggcaaatgtaatctcagctactcaggaggctcaggcaggagtaatctcttgaacccgggaggcggaggttgcagtgagccgagatcgtgccactgcactccagcctgggtgacggagtgagactcggtctcaaaaaataaaaaataaaataaaaataataatgatataacctgtgtaaagagaacagaagaggactatcgagaaataaaaatttttaccatgttcctagaagctggataattgatagagaagtggtaaattatgaattaatttgaaagaaataaaacttagaagtatttgaggaagggacaaggctcaggaagatgcctatctccctgaagaattccagagaaattagaggcatggaaataccagatacaaagaaggggaagagtgaaacatggaaatgaagagtcaagtctgtcatccaactgacggaagtttcagaaagagagtatagaaatagcacgtg

SEQ ID NO: 94098 - DNA, 41614 bp, Homo sapiens
gcctgtaatcccagcactttgggaggccgaggtgagtggatcacgaggttaggagattgagaccagcctggccaacatagtgaaaccccgtctctactaaaaatacaaaaattagccgggtgtggtggcaggtgcctgtagtcccaactactcaggaggctaaggcaggagaattgcttgaacccaggaggcagaggttgcagtgagccaagagcatgccattgcactccagcctgggtgacagagtaagaatctgtctcaaaaaaagaaggcagtgtagcaatactattttgctagaagtagtactaacttctaacaatacagaccaacatacctattgccttttctgcttgggaaaggccatgattttgaggggggtctctctcaagcaagccatcctctgagggtagacaaatgtgacttttcatccattccttcatgcattcattcaacaaacaggtatcgtgttagtctgtttttgcgctgctgataaagacatacctgagattgggcaatttccaaaagaaagaggtttactggacttataattccaagtggccggggaggcatcccaatcatggcaggtgaaaggcacgtctcacatggcagcagacaagagaagagagcttatgaaggaagtctcccctttttaaaaccatcagatctcatgagactcattcactatcatgagaacagtgcaggaaagaccttgtccccatgattcaatcacctcccaccgggttcctcccacaacacatgggaattgtgggagttacaattcaagatgaaatttgggtggggacacagccaaaccatatcaggtattaaatgcctgctgtgtaccagacatcacgttaacacctctcaggccatggggcttacagtttagagggaaagtccgaggctaaacaaaattcacacaaccaaataattacccttctgtgaagggatatggggagaaaggacaagatattagtgcaggaagcctaaccccagctggaggtcagggaattttttactgagaacattgtattatttcatcgctgtacacaaattcagttgtatcttcacttttaggctttctgagctggaagccacgctgcttggcgatgggaatctaagcaggaccatgtgtggctgctaccatatgaagcaacatgtcagtcccttgggagggctgggagttcagaggaagtgacgctgagcagcctgtgtggaggggtggccgggtcatgcaggaaaggccgcatgtgagagaaggtgccaggcacagtgagtcagtttgttttggtggagcctgggaaagagatgtggttagaaagaggggttccttcatccaacacttgttgagcctcaactgtatccaggcatttgggtgctagggagagagaagtgaatgtggcaaatagcccctggccttcggggagcttattgatggagaagacggccaccttaaccagctaagtctgcaacaaaatggcatcaaatgacaaaaagtgttatgcagaaattaaacagcatggcactggtgagagctcagtgggcagagggaggctgctgcagagaggggctttgacttgtcaatgtggaaaggcaatcgccaggcactgaggaggtggcgtgggggcaagagacctgagggtgcagggagtccagtcacagaagacaggaagggaacaagcacagggcaccacacacaagggcctgagaaggggaatgctgggagggtatctagaatcatccctaatggctagaatctaggcgagcagagggcagagtggtatgggttgagattgcatctttcctgaaggcccttgcaagccaaggcaaagagctggaatttgactgtatgtgaagggaagcccctgaaggaagttaagcaaaggagtgacacgattcaattctagctgctggatgaaggatggatgggaaggacttaagagtggaaacaacattcaggaggctactgtagcagacaggaagagaaggatatggcagcagtggagagatatcagtcagtgggagctgtggctcagagatggcaatgattggacttgctgatggggagatcgagtaggaggcggggatcaaggcactgcaataaagaaaaagggtaacaaagtttacaactcagaggtcgggggtggtggctcacacctgtaatcccagcactctgggagcctgaggcaggcagatcacttgaggccaggagtctgagacaaagtttgcaactcaggtttctggtttgtgcaacagcgaggaagaactatttactgaggaggggaaatcggaggacaagcagattgctgcagggaagcacaaggtcagcttcagcacacctgcaggacaaacaagaggaggcatcctgtagatagtgagagctcagagagaggcctcggctgcaaatgtacactttggcagcagcatatagatggtgttaaagccatggctatggatgagatcacctagggagtgatgcagagaaacaaaagtgggttggaggctgagcgctgaaaactgacatcaaaggttgggttgaagagactgaggagtgacgtggggatggyaggaggtagatcagagaagcagaaaggacggtggatgcagatggggccaatggcagttgtaccaacgctgctgagaagcccaggaagatgaggaacataaagtgttcatttgacttgtcaatgtggacatcttcagtgactttgagaagacttggtgtgtggcaggtttgagagtcagagtggcatgagctgaaggatgaatggaaagtgaaatacagataattttttttttttttttgcttatacactgatgaaaatggtccagtaggaaggagtgatgagtaacttgtgcaggagagaaagagaggagctgaagaacaaagcctttgagcagggagcagggagggcatatgagattcctagggctgctgtaacaccacactcttggtggcataaaaccacgtacgtttattctcttacagttttggaggtcagaagtccaaaaccagttgcactggactataaattgtccacaggactgcaggtccctccagaggctctgagggggagtctatttccttgctttttccagcatctagagctgcttttcctggctcttggccccttcatcttccaaaccagcagtttaacatcttcaaatctctttctgcttttgttacgtcgcctccggctgtgtagtcaaatttcctactgcccctctgttatgaggacacttgtgatcacatttaggacccaccgagataatccagggtaatctctccagctcacgacccttaatttaatcacacctgcaaagccttctgccatataaagaaacaatcagatgtttcaggaattaggacctggttatccgtgaggggcattattctggaggactgggctttgctaggcagggatatactgacttgctcctttgtgggcagagggaaaggcgcctgtgcaggggtgtgtagatttggcgggggagggataagggagttcatgcttttggcttcatttttctcagaaacatgagataaagctggcagctgagaggatggcgactgacagggtggggtggggagaggagaggaggagcagtgtcagtggaagtatggaagcatctcagagagtggggcagcacactgcctaggcagaggtagtcagttttagggcaggggtgaggaggaatttaaggcttatttttaccagtgtgaaggagacatgcggcttgactgtgcgatttttctccagcagagtctggctacctggttgaaggcacagggaacccagagagacaaagctcaccagcatctgtggggagaatgtggcagggcaggaagtgaagggtgagactccatgggctgtaacttggccaagaggcaagagaagacatagcagtctgttgggctgcgaggggattgtagaagatggtggggtgggtagctcagaggtcatgatgagaaagaagcattgcagaaatgggtttcttgagcaaacagtcgaggaggtgctgggcagagtggatgccttcagattttggagatggtgcagatgctggtgatgacaagtgctagggtctcccttttgggtgtgagttactgagggaaaggtagatggagcatccacctggatgctgaagatgccaggaatgaaagacaggaaaggggtggccaggaacactgtgagccaggaaccaaagtcttcactgaaccaggaagagtgatgtggaagaatgacaggaactggcagggcagagggtgccatgcccagtggcatcaatttaaggagtactgaaggttttgtaggatttggaaggagcaatggggaaccaggaaggcatcagctttacttcctggctctgagggactccaggtgtgaaagaatgagcagccaacacttgagagagctcctagaactgtgtttcagttaaaaacgaaagacactgatgctgtaagagtgtatggcgatgcttgtgggaatttcccaacagcaccgtggaagggtttgggaggtttgaggtgttggagaacacagggattagagtttggcaataacagttattggagagaatccctggatttctagtgttgagtgagtttcacagggacacaaagcatgatgcaaccacatcacggaaggccttgaatggctgccccaggcattactatttcaccccatcggccaaggccatggggacagtggtggcgttttggtccaagtttaagcagcaaactgtcttggtcaaaggcaggctttaggaaaattaattttccagccatgtgaatgaaagagactcttagaaagctactgcaataggccaggcttagtctccgttcagggtatgaacactgagaatgctggaaggaaatcatggttacaggaaatgcggttgaattttgagacacacgggaaaagagcgagcaatacaagatgcctcccatgtttcaagcttaagtggctggaagaacagactttggagggagattgatggttttggtgtttggcaacccatggttaaaggttcataagtggctgggcctaaggcgggagcagaataatgacaggtgagacagtgggcgcgtcccctgttgccaagccaggagttaactacctggggcttcctggattgaggataatcaaagagcaggcaggatcccggagagcaacccggtgattctaatttagcttcagatccccggggtagggctggagctttcgattaccatctgctgtaaggtgtgtgtgcaggtgcgagttatgagtcgctgggcagggatgccttcgggccattccacaggctgagttcagccatagcaggcgtgctgtcattcattttagtaaccggcataaatgagggcacagtaggaccccagtcagtcctgctaggtgccttcttgtctagaagaggccgctttgactttctttcctcttcatccctgagttgaggccgggcaggggtaaccagcaaggggttcacttgggaagcgggtttcatcacccctctgagcccaggtcgagaatcacagttgagctctggccaagaatctaactaattcaggtgcaaaccccaccgtcttttgcccgatttcctatattctgctgacagcagctctctccttcctttggcctgaaatcgcggggtgcttgtgtgagctgagattagccgaggctgacctgcccctccgtggcttcccgctggcctcatcgttacttcgtgtgttcaccgccgctctgagcagagcgggcccctggggaaaggggtgcgggcctgggttgcggaggcgcaggagcctcgcgggattggggcgagccgtcccatggcgggaaggcaggaggccggactcggaaggctctcccagactcggtccctcgctccagcccttccctgccggtgcgcggagccggggctcgggcgggtagcggtcgcgcgccggcgcgggcgggcggggagaggaaggggcgcggcctctccggggcggggcgcggggcgggcgctgcgaggggaccggaggccgcggcgagagcgcgcccagccccgccgcgatgcccgcgcgcccaggacgcctcctcccgctgctggcccggccggcggccctgactgcgctgctgctgctgctgctgggccatggcggcggcgggcgctggggcgcccgggcccaggaggcggcggcggcggcggcggacgggccccccgcggcagacggcgaggacggacaggacccgcacagcaagcacctgtacacggccgacatgttcacgcacgggatccagagcgccgcgcacttcgtcatgttcttcgcgccctggtaacgccgcgcaggccggcgccctgccccgcacttggcgcttcscggggcgtggggcgcttgggcgccgcgggcggggggtcccggggccacgtggacgccgacggctctggtctgcggcgtgcgtgctacgggcgcggggctcggggctcaggggtgcggggtgtaatactgggggcgcggggccgggagcgcggggacyctgcgggttcggggctccggctggcggggagcggggggcgcgggcgccgcggctcggggccgggagccggggactgcaggggaccgagggcttggggctccgggtcgggrggcgtgagctcagcgggccgggcactggcggctgacgtggcgctcggcggccggggcggtgcgggaggagggggcggacccckaggggacagccgggaaaagcccgccctgcgccgcgctcctgaattcaaccgcctcttgcacctcggcaccgagggaggggaaggtggggtcgtcgccctttcgggcagccgggagtccaaatgtcaccccgcggtccctgcccagcgccccaaacttcctgtgccggccggacgcgcggcctgcccgtgggccacgtgcactcaccagagcggccttgctgctgccgcggccaccggggtcggctgggacagactgcgggcacgtccccttccagaggctttaactgaaaaatagaacccaggaaggtgtggtttcccactttgtgcgtcttttgtgggataggaaggagtggtccgggcagaggagggttgctgagctaccccrggaagaccaaggtagtgcgaattctggaacccctccgcccccctgcagctcagggtggatgtaatctctgaacggagcccactggtcctcaactccaggctgtcctgtcacctccctgctgctctctcgggtccaggtcacttgttatgtgtgagatcggaaaagcccctccgttgagcagatggtccctcttgctttggttctctgggcgaggctttggtgtgggcctcgctgctgacctgagagaccctaccctggcactcatcccacggaagagcttcctgtcattcacacaagcatgtgcacagctttcctgccagtgccgggatgccccgaggaagggaagtgaccacaggccagagcagaaagccataattttaggacacaagacctttgagaggttggaatagcctgcaggttcttgttgcagaacttggtattcttccccagagctcagtagaggctcacttgggaaagggatgtagggaggcatagagaaaaggtaccctaagaaaaatggccagttcagaaattgtacctttcaaactgggagaaacgtttttctcttaaccttgtattcaggctattactgcgtttcagttcatttggagttaaatcaacttttwgggccastgtgggtttattaacaatgtgtatatgaagtacattatgtttcacattcctaagaaccaactgactcgaatttttacaactccaatggtttagaaattactttgtaacataaaacaatcaggcagtattaacagtttctctttgttcgggagtattctcagcaactatttcaattaagtgtactacttaattggagcctatttcagtggaatacatctgtcgatgggttttcttttttctttcttcattatttatttattttagagatgggatcttgctctgttacccagcctgaaaccagtggtacgcagccgcagctcactgtagcctctaactcctgggctcaagtgattctcctgcctcagcctctgaagtagctgtgactacaggcgcaggtcatcacacccagcttattttgttgttgttgtttttgttgtagttggtagaaacagggtctcgctatgttgccggggctggtctcaaactcctggcctcaatcagtacttctgccctggcctcccaaagtactgagattacaggcatgagccatcgcatcccattctttactttttttttttttttaaagaaaaactgacatgcagatgtaataagtccccacagtgccaaaggaattttaagtttagaatctttgcaataaataccagctagtcctgggctgagtgagagaaaactggcacatctgggcacttggtattaagtaaattccttttccattatatgtggcttgtagacatttagctggatgcttccagaataattagctttatgttgttactttttttttttttttttttttttgagatggagtcttgctctgttgccaggctggagtgcagtagcgcratcttgatttactgcaacctccacctcctgggtttaagcgattctcctgcctcagcctcctgagaagctgggactacaggtgcgtgccaccacgcccagctaatttttgtatttttagtagagatggggtttcaccatgttggccaggattgtctcgatctcttgacctcgtgttctgcccgcctcttcctcccaaagtgctgggattacaggcgtaagccaccgcacctggcatatttgttgacttcttgatagtctactacaaatacttaaacagagatatgtgggtttctatgatggtgtttaagttggacttttaagagggccctttcagaaaactgcagatactgcagtagggctcasgaataggctgccaggaaaggaggctgagtgggcggcgagtcaaatgggaggtcagcaggggcaagatcaagtaggaccaacaatacctggcacaacactttggtaagttgtaaggctgagagcaaggtggtgactctggaggggtctatgcaggagagggaaggaggtcctggagtggtgagctgagcgtttggagctcagatagaagactcagtggactccccctcaacacacacatacctttttccagtttcagctgccgtggagtggtgaaagcccacgtgtgattaaggggctggggcccctgtaacaaaaacatcaatctgtgtatttttgccctgcacttggcttctgcagggttatcctgctgctgtagattttttgccaacatcaggtcacaacttctgtatggccagtttgtgagtcaccctgaacctggtgacagtgaggtcaagatttggaccaggtagctttgctctacttcttggccacaggctaccttctgagtgcagctgcctgtctcagagttgggtgctgtagccgcagggccgactagatagcacctgtggccccatcacagccaggagcaagggcacgcccaacttggtgatggcccagaatggtcagttttgatttagcgcaccacaaacttatttattgtttattctcattcttaatctaatcttgtgttttctcaaaaaaaaaaaagggaaaaaaaaagcagtagcaaaacaaaaccttgtcaagattgcagaggagttctaaagttccagaatgagcatatctgatcaaagtcccctgaaggtcagaactgcccttgacagtcccttaggaaggtgccttgttggacaccgccccagtcagtcagtcagtccccactgccagcgtttcctccagcattagaactatcatggcttctttggttaaacaccaaatggactagttctcaaacctgtgcctttagacarcagggtcacacttaatgtagtcggagagatgctcatgccatgagaagcatgtaggaaccaaggcctgctgaggaacaaaaacctcacatctcccagcttgcacacacttcagggttctgtgggaattgcctttttttttttcttgtttccttctcccccgccacataaactcactttgttgaatctacagaagttaaatctgcatgtatagtttcattgtgcttttttttttgtatctgagtatctcataaagcagggattctcttagctggccaagaaagtgctgtttagggaagacacattaacttgaagcagactttttcagtgctacctttaagtctggtttttttttttttttttttttttttttgagatggagtcttgctctatcgcccaggctggagtgcaatagcatggtctcggctcactgcaacctccgcctcccgggttcaagcgattctcctgcctcagcctcctgagtagctgagattacaggcgtgtgccaccatgcccagctaatttttgtatttttagtagagatggggcttcaccttgttggtcaggctggtctcgaactcctgaccttgtgatccgcttgcttcggcttcccaaagtgctgggattataggtgtgagccaccacacccggcttaaatcctttttttcttaagagacaaaatctctgtcacccaggctggagtgcagtggtgtgatcatagctcgctgcagcctcaaacttctggcctcaagtgatccctctgcctcagcctcccaggtagctaggactgcaggtgtgtgccaccacaccaggctaattttttaaaattttttgtagatgggggtctcactgtgttgcccaggccagtcttgaacccctgggctcaagcagctctcctgccttggcctcccaaagtgctgggattacaggcatgagccactgctaccgacttaaatgcttatttttgaggtaatctgtcagaaaataaaaggagatttaacagattattaaattattttgaggaagaagtcacaattctaagcgttgagtgttcatataagcaagtgtgtttaaaaaaaaagcattttaaaaagcgatacagcaaagtggttacattgtaggcatcagtgtgttcctgccatattaaatagcaaacaaacccatgtgtcataatgctatgggattgtagttgaaacctgggataaagtttctagggttgtctcattcaaaattcgagtatggcactgtagacatactgtccagagaacacagcaagagctgtggtcagctgtatgacttaaggtctagtgttgggaaagatgctgatatcctcatgaaatgtgaagcatggcaagaagcctagttaagatactattttaaatgatgggtgattttaaaatatttatacataactgaattcatacaatgaatactaagaatagacatttgcttacttcaaccctagaagtataggtggccacaaactttttttttccccttctcattggagaaaattgcaggtgattaaattttgagattgccttatgtttgtagccatttggttatatagtggaggagacttgacgaataaaagtagcagatacagcaggaagtgctaagctactgtccaagggaggagtagagaggctttccagaagggcaggagaagagaatgggtgctgaacagcccggggagtcagggccaacttgctagaggaagtgacacccaaactaaacctgaagggcagatagatttagctaggtggagtttagggacgaagtgtcagagagaatgtgtcccagggccaagccaagctatagtcctttgggaacactgcagatgctgcagtagggctcaggagtaggccacaagggaaggagggtggactctgggatagaagtcaagcgggaggtcagcagggccagaacaactaggatccagaacaacactttgctaagtttaatactggaacaaggccaagatttcatgctgagaacagggcagtgactctggagggatgggagcaggggagagaggtcctggagtactggtccaggagctgccatctgcaatggtgtaaagaaaggactgagagccccattgtcccctggacagagctgaagttgtgggccagctgccctgtgacctgatactcaatgtgcttgtactcttgccttgttccaggtgtggacactgccagcggctgcagccgacttggaatgacctgggagacaaatacaacagcatggaagatgccaaagtctatgtggctaaagtggactgcacggcccactccgacgtgtgctccgcccagggggtgcgaggataccccacgtaagttggaaggaagggggcacacttcctaggtggctcctggctacaaagaaagtcctagttaaacttttggtaaaggtgtgaagagatactaaatttaagcaggcagtccctgtcattagggagaaactgcatttaatgctgtgtctgttttagatggcttttatacttggataacctttaattcatcagtgttgggttttcctgtttataagagaatgtgtttgcaagagaaaaatgacggtcccgccatgctagatgttcaccggtacattttacacagtgtgcatggactgtcatcagttttggcttgcttttgctggtgacttattcgcaaacacccttcctatagttccttcccgtgtgactcccacagggctgttcctgttggaaagaaagtatagagtctgacagacgatgatacttacttccttgacagttaagaatttttttggttataagaaatagaaattgaaatgttctcaattctagaaatagaattgttctcttattaaacagaaagaaaggactatttaaaaggctgtggaggaacctctgagagccagctccaggggcctggggtctgtttctcctgcacctcccttgagatgacggctttccaggcctgtatctctgtttgcacagaagggcccaccactgactggccctgcttggctggaatgttcgttccaggaatagtcactgtggccagggaaacaggagcttatagcaagacacatgcccattcacaccatgtgccaagtgttggagggaaaagcagttcttcaaaaaagagaagaagctgtttctgaaggaggtggagggattgccacggtcacttccttgctgtttgtttcaattgaggaatgaagtcaattctatacaatttattgcttaattgaataatataggggtccatcaataaagcaaaaaattggagcttatattcaaacctgggaggcagaaaagtggagggatctccaggcttgaacctagaagtcgtagtcaaatcccagctctaccatttacttaccacccagctctgacctcatcacttaacctgtaagtaaggtgatcccccaaacattgttacaggacttacatggaatgtgtgcagacaccaatctgagcacacccaatacatgttagggttttccctaccatttggaaatgtgggygtttccacaaaggaccctggaattcttggtctttggtgactgcttgctaatgtaagtgccataatttgggtttactttaaatcagatcaatggagataaaattgcttactatctgtatctaygtaaaagcattaactattctatgctttatagtattgcattgaaagtatggatcaagagcatcccaaagaagcaggtagtgagcagagatgagggcgaggaggtgaatgcttacctgttgagaractgttgctttcaaagttcaggggcagcaggggtgagctggctgtggtgtctttcctcttaacctgctgaccatctgtggcctgagactatgtgcatcacacaccatgccacagggaaggtgacacaggacctgtaatggagctgagagtggtatgtgttatggggcttcagagaaggaagtgaaggcttccacctcagcctggccataacagctgtcagctgcaatatcagctactccatagttggtattcaccaaaaaccatcacaratttaaaaartcacaaatgtaaaaagtcacaaatttaaaaaggcccatgttggatcatgtgtttagatktttaatgagaagagctggtctccccaagtaaaccatggctggttttgtgttattaaaaagaacaaaaatgaacgtacaccacactgaacacagtttgggaaggaacctctgtgaccatcactgccctgcagaagctccaagaacagattattttccccccgagaatgcaggaggtggaatgtgctgtgtgcaatgtggtcgcactggggcatctgtagattgacttgagcgagctttgactcctctaagacaagtgcccatcccatagagtggttgtgaggcccgaggcaggtgacgactgtacctgcctgagtccaggcatgtgtcaggacatgagctttcacgttattctttcctggcaagtgtaactggagtaaaggattggaggggcagggagtttgggctcccacgctccctagagatggctggctgtgctcaggaaaatgttttgaggtcttcctgttgggccagtcatgaatcattacagcagggcaggactgacggggggaactacytgtgttagtttcctaggctgctgtaacaaagttccacaaaccgggtggccagaaacaatagaaatgtattctctgcagtcctggaggccagaggtcctaaatcaaggagccagcagggtcatgctccctctgaaacctgtaggggaatcctcccttgcctcgtcctggctcctgttggtttcctggtcatctttggcgttccttggcttgtagatgcatcactgccgtcctctgtcctcacatgcccttctctctctgtgtgtgtgtgtctctctgtgtccaaacccttcttacaaggacaccagtcatgctagattggggcccatcctagtgacctcattttaacttgaatatmtctgtaaagaccttattctaaataaggtcaccttctgagattgatggttatgacttacacagatctgtcttgcaggacacagttcaactgataacactgtctacggtagtagaactttcatcatgctgtttgccaaggcagtacctacatggggattttctccctgcagtctccttgaaaaaggagactcaaatgcccatgtggaggcttggtaatagcggaaatctggggcaatactttgtttgggcttgtaccctgtggcccagtctccatcacctccctcacccctgtcgacagtgagaattgaagtcagatgtcccaaactcactgcaaggtctggaccagaagtgtccgctctgtccctgggctctgtgaacttaccgaggaagaatctcagacttcctgggcaggttagaacgattatcagtccaacaacaagaagatggttttttttaaattatttgttttgcaaatgaatagcaaattacaaaaaaatcataggctaggtcttwctgtatttyacttttagcaaagacacaagtgtgaccgtccctggtcctttctgatgtcttgaggatccacccatttcccttcctgaagagcgttagcgggaggcagagccgtgcaggaagcagtttctgtttccaggtgcggaacacaccttgtgggagcctggggaggtgccaggctaggtgagggcaatcatctttgatacygcagatgttgcagttgcttatcatgttgaacttcgtgacgtagccggtgtactggccaaatctagttaagttttggctgttttttgtggttatgagagtctgagctgctgaggaagctgggtgtatattctgcactggagacacattagggaccctacctatgccccatcataccatcttaggttctgggtaaggccagtatgctgatactaatttcaaagcctaatctagccatgtgacttcattttaaggagaattagccatttttttttggactgaatgtgtgtgtaccccagcattcataggggaaatcctaatccccaatgctggcaataggaggtggggcctttgagagggagcaggttattagggtggagctctcatgaatagggttgcataccttatgaaagaggccccagagagttctgtttccccttttgccatgtgagggcacagcaagaagacaccatctgtgaaccagaaagccctcaccagacactgactctgctggcaccttgatctcagacttcccagtctctagagctaggcgaaatagattctgttgtttctaagacacccaatctgtggtcttctgttacagccgttgaactaagacactattcaaaccttcatgtcagattttacatatgttgccgtcttacaattctgataccgtacattgggcatttactcacaaaatccacatacgcgctgtagaagtggcaggggtgtttagatgagcaggcttgcyaacaaatggtactctgtatttcttttttcttctattggtagtcacatttttgcctatccttgacaccttctatgaatttttatctagagtattagagcacgttttcccgtgactgctggagggatacaggaactgagtgttaatttcatcctctggtgatgtcttttgcttatggttaaaggacctactcccgtatcctctctgcagattccttcagaggccarcatttgtaggaaaaagaaaagattccttctctatgggaaggtgaatggacagcatcagtcaatgtcaaggatgttcttatagctggaaacttgaattctcacagtaactggatattcaggccttgtaagagttgaatacctgccaggtggcctggaagaataccttaattgcaaaacaacaccgtgtctgctccagtcctaatttgaacacagacacaacaactgctgaagccgggaaagcataacagtagcttgcagggaaggcccgaggctgctgcagaggagcactgagtactgtagcttttgaggcctcagtcacagcagcgggctggaagttttcacctcattttagttttccttgaataaaaccagaaacttctgaaagtttaggattaactgaatgtattatctcctggaacgttatgtttgtttcctttttatcagagaggagcagatacrtgcctggctgcagccccttgacagctcattttctgattgtttcactaaatgagtttgctctctgataagacaactttctttttgctctgtctaatcctttgttattctttcagcttaaagcttttcaagccaggccaagaagctgtgaagtaccagggtcctcgggacttccagacactggaaaactggatgctgcagacactgaacgaggagccagtggtgagtgtctacctccttccctccctccctccctccctccctctctccctgcctacatctttggggtaatatgtaacggggcagaggccagttgaggttaatgattaaggctgccattttaaagcaactctactttttttggagcttattgrtattayaggtaaagatgaacttttacagaaactttttggtgtggaaatacctaaatgtgcacaaaagtcaagagaaggctaaamcctsagtttcagcagttaccaccattttggtgtttgtcttccccrccaccctgcgccttgtttggctgtagtcagtcttcagggaagtcacttgtgtggcctcacagataagcacttactctttgttaacactgccaccctgccactgtcacaggtaatacagttcacaactgtacccyagcatcagagactgactctggaccacctggggtcagggctgggcccagcctagaatctcctatccaagccagcactggagcctcctcccatccccccgacctttgccctccaccacctgcagccctctggctcgggcctagcccgacagctgtacccgtagggtggatccttccttttcttctcggtgctcagtccccgagtctctaatgggctttgcttataacatcattttgtaccattaatactctgtgtcttaatgcacttcccttactaaggctaatatcaggagattgtagactcttagaatattatgtactaaaaaggatttataatcctccccctccccagttgatgttggaagtcttcacttttttataaatcatcatgatcataaaccactggttaagtgttcctttgtgggtggtgccttctgattaatgccgagtgctcaggtccctggatgccgggtagacctggtgggtcatgctgctgtgttggagagggactggaaaaacacycgtgttcctacactgtaggatcctgatgagctaggaagagcatctgaagtctttgtaatttcaatttcaacaaatacctaagactaccttcttgtatcagctaagcgcccactgatttgaaggtggtctgtggtggtccttttggagctttgccgcttactgttgccagtttccagtgtgtctgtgcggctcttccgctctgccccatcttctctgatgacctaatcagaaacttggctgctgattcagtgcttccatccctcacctgcaaagactctctcaactcggctgggtgtggtggctcatgcctgtaatcctagcactttgggaggctgaggcgggtggwtcacccaaggtcaagagttcaagaccagcctggccaacatggtgaaacgtcgtctctgctaaaaatacaaaaattagccaggtggtaggtgcctgtaatcccagctacttgggaggctgaggcaggagaatcacttgaacccaggaggcagaggttgcagtgaggcgagatcatgccactgcactccagcctatgcaacagagcaaaaactatcgtggaaaaaaaaaaaaaactctctgaactgtatggtggagactgttggtgtgtgatgttatgtcgttgaaccagagacttacctaactttagctaaaagaaccacagacctctcaggaaatttgcatctttgtcctggcaagaaagctgaatgagcaggtgtgactttcatagttttcaattggacattgtttcctttgtgaaaatattctctttgtggggacacatatattggatggtagcaaaccaattttaaggaggagttaatagcctcaaataaatttcaccaaaaaagccagtcttctatgatggctttattcaagaaaccagcagccagtatcaggacggcagaaagacctcatctcatggcccatttcccttagtggaggtggcggcctcacctgcaggttggaaagggctgagaggctgcgtccaggctctgcaagggwctttctgtctcctcagtgtgggagcaggatggccgcgtgtaatccccccatgccaccccagaaccacagtcaccaacttgccatattttagtgtctccagcaatagcaggccccagataattgccagaaacaatgacaatgcgccttattgtggaaaagtttaagtatatacactttatactgcaaaccagaattctcttagctttttaagtgaaaactttaaaaaaagttctttatctgtatacctaagtaacttagtacatacattttttaatattcacgtgggataaatttagatttttttaagtgttgtggcaatattcaagaaactcaaaagacaatttgtcactttgtacattctactgcaatttttgtatttccatgtttgcttctgtattttttcttgaacagttatacaaacatgtttcatctcattaatgattttatatatttatgtggtctttatrttgatcatgtcttatattattttatcatgtggatttgccataattcaactctaattctgtcagtggatatttaggttatttataccttttccatcatcagtaatgatgtagggaacaagtttatctttgtaaaggactttccacccccccttcttttgagtgatatttttagaatatagtattcccagacataaaattataaggccaagaataaaaaaaaagatcatttttatggctcttgatgaatatagccaggtttcttaagcaccatatcagcttatgctgccactgtagggcaagacgtgacctgtttctgggatgcactgtggtgttcccrtgcygggggactgctctggagtctgccaggaacccaggaagcaactagaggccccgcatgtgccataaatgaacacttcatactgaaaggcccttgaacatctcatggagagtggcacacggtattttatttcaccttatgtgcacccattgactgttcacttagccattcttcccttgggcattgttttgtgtgggtatttagcactttgaaagtcttgacgcgctggcagcagaagggaaactttgtggttctttatgattccagccctgcacagctttgaactgtcagcacctttaaagcctttaacaacttagcttggatattctttttaataggaatatgaacccccagataaaagctgagtaatatacacttaatgtgtctgcagcagaacactgattccattatctttccctcatttctggttactttggttggaagccacagctgtacctggtctgaaaagttgagaaatgtaggattgtgactagacagctgcacacattgctgtctgcttgggtcctggcagaagcatcttttgaaaagcccctttccccctctttctgtaygagacttagtcatatgaattacattctttcttgaaggtgcagcttatgttcatgccatggttttctctctgttgcctttcattcacctgcattttccttctcatcacctccttttctctctgatcagtcttccacagttgtgtcttcctcacagttttccctgtcatttgtgtaaagtaaggataaccaggccttcctggtccctgagtttctcattctcagctttgtccattttgctaccctcgtgtctgtttgtgtgttttttgaggaagagtctcactctgttgcccaggcaggagtgcagtggcatgttctcagctcactgcagcctccaccccctgggatcaagtgatcctcccacctcagcctcccaagtagctgggaccacaggcgcacgtcaccatgctcaggtaaataaaattttttttttgtagcgatggggtctcactctgttgcctaggctggtcttgaactgctgggctcaagcagtcctcttgcctcagcctcccaaaatgctaggctgtcacctaggctggtcttgaactgctgggctcaagcagtcctcttgcctcagcctcccaaaatgctagggttacaggcacgagccactgcgctgggcactctggtgtctgcaagtgctgaccccttcagaatacgtccattgggcgttgtattttgtattctttgtgaagtatccaagtacgtttcaaagaagaggacagggtatagggtaagactgtcctttgcattgtctgctttgtttggttgggttttggggtagggacagctatcacttggctgccctggagactcagacctagagctttcactgagggtgaggctgacgagggggctttttgctgaagcttccagagggcttgacgagatcagttcctgacctggcctcactcagcacagcagcatcgtacaagggttccaggttgttgggtgagggaggcatctgcaggcggttccccacagacacagtcacctcctggatggtttccctgtgtctccactgacacacccatgactgttttatttcctcctgttagacaccagagccggaagtggaaccgcccagtgcccccgagctcaagcaagggctgtatgagctctcagcaagcaactttgagctgcacgttgcacaaggtaagggggacgtcctgatgccagcttcagagaatcactattattccttggcgtgctgggcttttccttcctgctactcaagggctcttagatagcagcatcagtggcactgacaaagggtcactctagaggagctgttgggaccgttgttcagtgcacctcctctaaaacatgagttctccttttgtctgtgcccttatagaaacgccgagtctaatgctaagcacacgtgacccgcacactagctggacagtgcatccttggctaagagtgtttattgacagactcacctcgcttgattgctctttactttattgcactttggagatactgcatttttttacggattgaggattttggcagcccagcatctggcaggtctagcggtttttccagcagcttgtgcttactttgtatccctctgtcagcatctttttagcaataaaatattttttaattaaggtacattgtttttaaagaagtaatgctgtagcacatttcatagactatagtgtaaacataactttgatattcactagggaacmaaaaaatttgtgtgacttgttttattgtgatattatctttattgcagtggtctggaaccaaacccacagtatctcggaagtatgcctgtgtattaatgrtaatcatatgcttaatgacctcaggcagaaacaaaagcttctctctgtctaaacagaatttagattgggcacagtggctcatgcctatcatcccagcacttggggagaacaaggtgggatgactacttgagcccaggagttcgagatcagcctaagcaagaccttgtctctacagaagattaaaaaaaaaaaaaaggctgggtatggtaagcgcactcctgaagctgaggtgggaagatcacttgagcctggaaggtcaaggctgcagtgagctgtgatcatgccactgtactccagcctgggtgacagagtgagatcctgtctcagaaaacaaccaaacaaaacccagaatttaatgacaccgttataacatgaatcaaattagttactctttacacttaaaagatctttctataccacatcccattttttgcaaatggtctcctaatatcagaatgatccccataaaatttccagtgtgaatacataagtctccctttattcacacatagatgtgtttcagaaaacttggcccaacaccgaatgacttgaaagcaattttggcttcctggccggctcccattaccaaatgctaccatggagagaaatccccttagaagactgggttggaaacgtgagaaatggcttggattgcctctggccttgtgacttgtgcctgctgggagtcagagcccctcccccaccacacttactgtccacagtaacttatcgtgaggccttcagccttttcccacttttgctaaaagttatttcatccataccagcgccctgacggcagaactctagcatgctttccgctacgggaatgcattttcagctgggattgtcttgggctctgagcagggtgtgtttcccaaatcacctgttacggaccgactccggcaggacagaccgactccggcaggcctagccagcgcctccctaagtgggtcactgccacacagctgtgtcgtgtaggtaccatggtggcttcctgcccttgctggcttcccatcagtactctgattaggttcccagagagcctgtctccaccttacagtgcaggatctactgtgcacctgcacatggtttcagctttgcacattttttaatggaagttgttaacttttaaaggaagtttttcaccattttcttcaagtgcattgttgctgtgctgatgagacagtagctgtgagccttagtgtggcagagtcctgctcagacgccaggccacatgccactggttagttctctccccggccacagcctgctttcagtttggtatcagcccaatgtcagggtagaacagctaaacaccttctgtgtccaaataatgatgctgtgagggtttgtttgtttttttccccgtagccaagggggtgatgtttcattttttaaactttttttyatgataaaatataatacagatcgagaaaacaaatgtagggcttaatgaatttttatagcgtggtcacactgtaactactgtccagttcaagaaataaaactgccagcttccygtgtcccatgcagggcacagcccgccctcccttctccaagaaggcacttgcctgacatttgtggaaaccacttgtattagtccgttttcactgctgatgaatacacacccgagactgggcaatttacaaaggaaagaggtttaatggagaactcacagttccacgtggctggcgaagcctcacaatcatggtggaaggcaaggaggagcaagtcacatcttatatggatatcagcaggcaaaaagagcttgtgtagggaaactcccgtttttaaaaccatcagatctcatgagacttattcactatcacgagaccagcatgggaaagacctgtccccgtgactcagttacctcctacctggtccctcccacgacatgtgggaattcaagatgagatttgggtggggacacagccaaaccatatcaactcctttatgtgcactgaagtgcacattcctgagcactatagttctatatgtgtatgtgtttatatatcttttaaggctcttttaacctgcatgttctccagacatctctttatctttcttgctgaagacataggtggtttgacctgtagagctccccgtggtccagactttgctaattgtgtccccgtagtgtggtctacatgtttccctgatttctctgtttcctggaaattggtagttgggtctggggacaaaatcagtttcagtgtgatgttttttgggggcacaagaagacctcatagctggtgggggcacagaacgtccagttgtctctctttgggatgtggtcgaccatgacaggcagagcctgggtccgtccattccttagggctgccaagtgccgaggctcattcaagcgtcccttcattttttaaccaagagaaactcaccctcatttatcacctggttattcagcggtacagtgcatataggagaggtgggagaaatgcctgattctttccttttattacagttttccaaataatgagttgattgctgattgtccatcaaagatgacaaatttggttttgagtattgttatgaastcatgaacagaaacacatttgatggagtccctttgtaccaattaaagtgctcatgccgaactaagatttgctaagcaggacaaagatctgattcttcaattaactctctagtgaggtctgacataaattacagttcctctttcccccgtctctgccttggctctccactccaggcgaccactttatcaagttcttcgctccgtggtgtggtcactgcaaagccctggctccaacctgggagcagctggctctgggccttgaacattccgaaactgtcaagattggcaaggtgagtgaaagcccttattaaactggaaatggactgctttgggctggattaattagcagagtggcccattattcattcygtgtgcaaagtcgcaaacttgatttattaattccatttagtgtgccacttgataattcatttcaccttcacagatggcagtctgattttgagttttgctggmttttccacagcctagagataaattatggcctcggctgctttgtttattttgaagagatggccaaatctgaattggcagccccagagcccgttctgcaaagagatggggtagagccttgtagaatgttcactggacgaacttggagaccgtccacgttcracctcacccaagagctctctctaaaaggaccctggctctgtgctcccccaagcacgcagaagaccctccctcagtttgcactgtgcctgggattctttccagcatttcctactttatacagagaagccargagtggtgtctgacaacttctgtgtaactggattttctggaaatatccagtgtagctccagggacatcacttttattcttctacactttccagcacccaccagacaccatgcatagatttcctttcttaaaaatctcatttttctaccttgccatggggctgatttgtatccaaaagtaatgctgcgtgtctaggactgaatgatggttaacaggatgatctamttgggatggtgagatggtcaaaagcataaacttgggggttgggtagacctggctggctgaccttgggaaaaacctctcyaygcctcggtctccccctttgcaaaactgagctaagatctactgtgtggtgtctgggcagatgaaagtacactgcttagtgtgatgcttagcatggggcagatgcttggtaaattgtaatcacttttgttgtcagttaaatggatatttcactgttgcctcttaaacgcttacgataatatatactaattatacatgttattatcagtttatatttattgaacatttcggggaagtaattataaaataatcttgtctactgtcttaccccattccttgtatccttacttaattattgtatgaaawtttatgggagattcttttaggtttatatccatagwggatcctagcagacctaggcgtgagcagacacaagcccaggtgaccacgctgaagcccttcatccctggcacatgtggctgggttacactggacccttaaaaatgcttgtcctctcccgaccttgggctgaggcctcttgtacttcagttccgcaccttagctgctctctgacgggtcttaggtgttgaaatagtatttttacccccgtttgctgacatagtgaataacaacttagtcctgcctattttagtgctggtagaaaataaaaaagaaagcaatgacttagaacaagatgtttcatgaaaatgttgggcaagcagcagctttatgagatttaaatgaaagaaaaagcttgaagagctgtgcttgttggtaaattaagtttataaaattaaggacggattataatcttgacatytttgcagtcttacctttattatataccaactactcctgtttaaaattcayttcttgctccctgttgattttaaaaccctctaagcttcagcatgagagtaaattctaagctggcatgtgaactggtctgggtcccagtcaccgacagccaggctaacccccctcccaccaccaccaaatgtcaagccagggccctgactcmagctaccaggtgctgactttacttgctcgagttaaaatgttgcttcctaaaaaccggcatgtttaactgagctattaatacaataaatcttgcctctaaagtctttcctttactccttttagctcaggtatgttttagcatagctttcaggaacattctcttcaaaaactgcaccttgctggcagagttgctacagaatgtggattttgaaaagaatatttgtaacrtacaaagtgtccagtagccccattagcaagaaggttcatgaagaaactgactgggaagttgatctgcttttattctcaggttgattgtacacagcactatgaactctgctccggaaaccaggttcgtggctatcccactcttctctggttccgagatgggaaaaaggtacgtctgcacttcttagtactgagaattcttcatctcttaaccccatcaggctgagctactgagtggtttaatgggcacagtgaattgccaatcttgattgttagggcactggtttggagaaatgtgtataatgaaacaaacgtctttctcttaattgataagatttgggttgtggagatgaaccttgaaacatttcagtggcccaggttatcactagaataacccacatcttacagtcacagggtaactgtgctctggtygtaaacacaaaccttcaggcctttgaacagagctaaggcttgcacttggtccggttctgcctgcctccctccctccttccctggccgatggtcagcagctcagagttccccatcagcacaacggcttgctggcaggcctctgccccagacttctrtgatgtgtaaccccgtggagggaagaggggcctgtacagttctctcaccaaagccraggcattcagttatcctctctacattcccgtctaaatatgaacatgcagactttgcaccaccgctaagacatctgggagctctgacccgggcaagcaggggttgcaggaaggcttaagtgattcagaacacctcagtggactcactcagccgcgtgcccgtgtctyggccaggtggatcagtacaagggaaagcgggatttggagtcactgagggagtacgtggagtcgcagctgcagcgcacagagactggagcgacggagaccgtcacgccctcagaggccccggtgctggcagctgagcccgaggctgacaaggtgggtgcctgctggagtcgggatccccrtaagtggcccgtggcccccggccccccacctccccaccctcagaggcctcctcaaatgctttggacaaaatgacagtttggggacacagtcatctgatggttggctccagttgcgttttcaacacgtatttttcatcgactttcacatgctttcaggggcgaatgcaaacaaaagctttccttttgaaaacatgaaatggatgtgagacaaatcccaagacaatatttggtgtcaaaaatctctagagaatccttcctttccgcttcattcattttaaagaatgactctgctgggcatgtttctgctatgaaatctcgactgctggccccggggccctgattctattcctgaccttgctccgggcattttcctttacccgttgtaaaggcccctagaagacctgtagccaagagggcatccgcagcgatcaggccagtgactgtagctgtaacctgcctaggcagtcctgatgcactgaggggcttccttccttcactcaggtagcaggaggtttcagattcatttgttctgctttatgaagcccttgttatgtcacaggcactgttctaggccaccaggraataaaaataagaccggtttcctgcctctgaagcatacaggtctctgaggcaaatggtgagaagacacacaagccartggcagggggctggggcagaaatgtgtgcagggcttggctgctagagagaagtgggggcaaatgggcaagaagtgtccctaargagctgattgacgggatctgtgctggacagatargctgggcagggctgccactgaggggctgcaccaggagaggcacaacccgagaatcagccggcatttcygcagggccagagctggggctgggggaacacagtgggagacaggtcagggtgtggtgtaggatccctgagagtgagagaggagctggagttgagagtctgtgggcagctggccaaggrttakgaactgtatcccatattgacagggagcccayggaggctctgtgcagattggagttgtaggaaaatgaccggcatgcacgtgtgctggaggtgggaagctgctctattaggcctttaaagatgatgmgttccctcatgctgcagccgtgactgtgcgatggcgaggaggagaaagccagcataaggagtccagccgctgtgcagcgcggaggagagggagggagggtccgaggcgagtctgattcccgcatatctggtggaggatggtacccagcacaggggcggggccagagctcgaggaaagggatgagcttggttttcaaggtgttgatcttcaaggctttcggctgtgtaggtggcagtgtccagtggcagttccaaccatgagcctggggctgcggcaggaggtctgcactggacgagagtgcccgtgtcatcctcttcaggtagaagtcatgcctgaaggccaggagtttggatttggaaaaaccagtggggccaccaacccctcctccctggtggggccacaccaggcctcctcacccctacaaccctgtccctagttgggctcttgtaggtcggggatggcctgagtgttgtttaaaagttgacgttttggttgaagaagtaaacagctgattttgtagttgtcaggaccacttatgttagaggagtgtatgtgtcatggtggttacaaaggtcatcccaaattgagtataattatayaccacggatgttttcatcgcagcaccatttctatttataatgcagttttccaccatgaagtgggtcttttcagtgcgtgtggcgtcatgttyctggacataaagatggtagtgttccacagtggcccccttggcctccgtcactgacatgttactcgatgccagactcaaatggagcagccctggtacacttagccacgtgataaatcatcccattcctgctctcaggagagaatcgcagatccatttttggagaaacacatagacgtcattctgtaaagaactgtcaagggagaatggctttaaagcagactaccaygtagcacctttcccttaaattctccagccagagcttccatcagcgtttttcacattgacttagaacaggctgctttccatttttatgttcaatgtaaaacaggtatcattgcctttgctattgtaactaggttctttctgttgcatagagaggatgtcacaaagggtgctaggagaatagggtggccagtgagaaaagcggctgaggatgagacttcagtgggtatcctggagactccaggcttagaggtgcagactcaagtgtcrgacacccagggctgcctggtccacaccacagcgccctggagagttttcaacctgcctcatccccaaaagacagtccccctccccaccttcatcccctgtacagtrtccagccacctcctcaccacatctsccaggcttgggacccagggacttgcattgatctctctgcccttcagaggctgccagcctccctttgtgtgtagcctatgaaatgcagattgtgtaggtatttctgtgtgaccttggagcctacgtaactgcatttttaaaaaattactgattcgtgtatctgcaatcccaaagcatggccctgctcaactttaagggatgtacttgaactgtggctttttcctcccttgaagggcactgtgttggcactcactgaaaataacttcgatgacaccattgcagaaggaataaccttcatcaagttttatgctccatggtaagtggctgtttaattagaaactactttgtccatgtgtactaagtcacatcatgtttttcagctcatctgccacccctccagactcaatgttgggcacatgttacatttatatgtaggtcatgttgtaggaaataaggaaccgttatcatgctcctatattcaaatattttaaacttcaatggccttaattatatatggagaatgaggctacagttatatcaactttgattatatatggagaatgaggctaaagttatatcaactttggagaaaacataaaaatggaggcaaattatgatggccatattcagttttgtggtatctgcacttttccaaatagatggcttttctttttggctaaacaatgagtgtcatgatgtagctttgctcctckgttcttttaagtactcggatttcttttgtagagaaatccagtagagtctgttagagccattcagtatgctacgcagtttcctgaacctgcatgccacgtggtcttggagaccagagcagaaatggattgcaggtagtgtgagatccagacaaccttggttctaagacttaccgtgaatgactgtatagtaaacttggatgtcctttaattcctttgaaccccagttccctcagctgaaaaatgggagtaactttttgtcttcacaaataaaacaatccatttggaaaagcagagtgttaggacaacagtagattgtttatctaaacatgataaaggcgtcacttttcttgtttgttacactccacatgttcctgagaaactaaccataggggtaaaaagttaataagcacaggacttgaacgaaccatagcartgcctttcaaatcatttgcaacatttaaaaacctaaagctccacagatcaagtatcaaaaargaggatcccctttggctgaaggggagccatccatacggcaggagggggtcagaagagacaagggaacagagtcgggtagaagggagggtttgaaccaaacttaatcatggccttgatkctcaccccacatcgctgaagtaccaaggaggccttaaaatggttttgaaattgtgagaccataagcaatcaaatctaaaatgtctttggcattcaagtgaccttttagaaattgtgtggcatctgccctgttccctgttcctctgctcctgtgctttcataaaccagttagcacagttcaccatggcatggaaatggtctcagaatctcaacttgttttgagactggcttgcttctgtcacattatctgaaagtctaccttggatcaacttttgggttcttcatttgggataggaggaggaagagttaatgtgcacccagtgggagaatttggtattttacaaatttctaggcaattgttgactgtcccatacagaagaaacagagcttgtcttggcagcagagtgtaggtgaatgatctcgacccaggatttcaacgaagctgccatttttctcgtcttaggtgtggtcattgtaagactctggctcctacttgggaggaactctctaaaaaggaaytccctggtctggcrggggtcaagatcgccgaagtagactgcactgctgaacggaatatctgcagcaagtattcggtgggtacttggatggatgcttatgggagctctcagtatgggggcagatcccaagggaactgtgcctcaaccacgataactcactctgctctcatcttctcaacaatgtggtttttatgtccctttgagttgtttgtttggagaagcaaaagagatcctctctcaaagggaaggcattcttcttcgcccgctttgtagttagtatccatgtttcagtgcaggttttcaggccttgctgtctgagtaacaaggccgtgaagtaacagaccccacgccatagactgtggggcttcccacaccrcgactcttgatgattgaccagtggtctgtagcctttgccataaatacccgagtcgctcatttttcacacataagccagcattataaaatgcagtggctgaatctaagaatcatttcaacataacctcctttctgaaagggccatgccagcaagtcggtcctgtgcttgggttaactactgccttcattccaagctgttagcacagtctgatggcctggaagatttgtcattttttttcttctttgttattcagacacttttggagccctttagatggagaatagacgtaacccagacatagtttccttatcattaaaagataccagttgttttttgtgccctaaaattcttagaaacgagttgccactgaaacatgtatcctcaagaggatcttgctctcatggtctggtctgcagaccaccaggrcatcgccagggaggtcattggaaatgcagactcccaggcctgctcaatccaaatctgcaccttcagcagatccgcaggtgatcgtgtgcacagtaaagactgaaagcgtctgctttagggtaaagtcgttcctttgaggctgatctttaatgatgtcattttgaattcagaagtgaacacacagccccacggctgtgctttctaaacagtagtctgctcctgttttaatggaatatacacctttaaaaattagccacagaatttttccagccacaacggtaggagtgtatctggttttatttaggaagcaatttgcatgtgatctggaccgctggtttgcaaactyttttcttttttgttttaaggtacgaggctaccccacgttattgcttttccgaggagggaagaaagtcagtgagcacagtggaggcagagaccttgactcgttacaccgctttgtcctgagccaagcgaaagaygaactttaggaacacagttggaggtcacctctcctgcccagctcccgcaccctgcgtttaggagttcagtcccacagaggccactgggttcccagtggtggctgttcagaaagcagaacatactaagcgtgaggtatcttctttgtgtgtgtgttttccaagccaacacactctacagattctttattaagttaagtttctctaagtaaatgtgtaactcatggtcactgtgtaaacattttcagtggcgatatatcccctttgaccttctcttgatgaaatttacatggtttcctttgagactaaaatagcrttgagggaaatgaaattgctggactatttgtggctcctgagttgagtgattttggtgaaagaaagcacatccaaagcatagtttacctgcccacgagttctggaaaggtggccttgtggcagtattgacgttcctctgatcttaaggtcacagttgactcaatactgtgttggtccgtagcatggagcagattgaaatgcaaaaacccacacctctggaagataccttcacggccgctgctggagcttctgttgctgtgaatacttctctcagtgtgagaggttagccgtgatgaaagcagcgttacttctgaccgtgcctgagtaagagaatgctgatgccataactttatgtgtcgatacttgtcaaatcagttactgttcaggggatccttctgtttctcacggggtgaaacatgtctttagttcctcatgttaacacgaagccagagcccacatgaactgttggatgtcttccttagaaagggtaggcatggaaaattccacgaggctcattctcagtatctcattaactcattgaaagattccagttgtatttgtcacctggggtgacargaccagacaggctttcccaggcctgggtatccagggaggctctgcagccctgctgaagggccctaactagagttctagagtttctgattctgtttctcagtagtccttttagaggcttgctatacttggtctgcttcaaggaggtcgaccttctaatgtatgaagaatgggatgcatttgatctcaagaccaaagacagatgtcagtgggctgctctggccctggtgtgcacggctgtggcagctgttgatgccagtgtcctctaactcatgctgtccttgtgattaaacacytctatctcccttgggaataagcacatacaggcttaagctctaagatagataggtgtttgtccttttaccatcgagctacttcccataataaccactttgcatccaacactcttcacccacctcccatacgcaaggggatgtggatacttggcccaaagtaactggtggtaggaatcttagaaacaagaccacttatactgtctgtctgaggcagaagataacagcagcatctcgaccagcctctgccttaaaggaaatctttattaatcacgtrtggttcacagataattctttttttaaaaaaacccaacctcctagagaagcacaactgtcaagagtcttgtrcacacaacttcagctttgcatcacgagtcttgtattccaagaaaatcaaagtggtacaatttgtttgtttacactatgatactttctaaataaactctttttttttaaaagtctggtctttccttcaatgttacagcaaaacagatataaaatagacaataaattatagtttatatttacaaaaaaagctgtaagtgcaaacagttgtagattataaatgtattatttaatcagtttagtatgaaattgccttcccagtacatgattgtgaaaaagacatttagaaaatattctaaaatttaatctgagcctcactttctacaagggaaatcatgatttccgttcataaacagcatgctcatccccctaacaccattcttataagctgggcaccctcattttattttcttcgttggttctaaccctgtggcgtggtatgctgtatagtaaaaaggcagagaaccactttactgaaaaggtactagagccggcagtccagaagttaatgtgctggtcaaagaaccgttctggtaaagaagaggtgagcattgccttcacgtgttacacggttacacaccccttgtagcctcacctcagtgtaatcagtctacttttggtactagcaaagagtacagcaaatggaggattgaggtgtagaaatggtatgttttggctgaaataagtgtattttcacaccaacaaaactccagcacgaacatacaacagcaatgactgagacaagggcgccccgtggagccctggctgtggcctgggctgtgcgtcctgtggacttctgggaatgaactgaacagaggcgttccccccacttccccgatttctgttctctgtaaaatctacctttgatagacagtactgaaccagctgatcctttagccaagaatacatttaactcctttgagattattttccctatttactaacaaacaccccaaatagcttgatctacagctaaaactaattttggtgggtttttgggggaggagggtaggaagagcttcacggttatgtttctgcagttaccagaccttatgctacagacatccaaactcagcttgctacagaccaacaactactcacgtcatttaccaagtgagcaaattattaatgaggtcctttaaaatcttcctgggtaataaggcactggcatgagatagtttcaaagtctcatcgtcccacctccaactgtgcttccgtgtttttttaaggcagatgtaatctaggaatccaaggcagaatgtgtgtccccagcatctggtttcgagttagtggcatccacaagctcttacaaccatattcctgtattttttcagaatgacattggagttgtcatcaaagtaaagaaccgagatggcatttagcttagttggcgcacagcacggtttggggacatactcggggttcataaggtgaacctgttccaaaacagaaggggagaargtaccttagaaatgacacctggtcttggcttactcccacttacaaaacaaagtctccgagagctcaccaaggtctgcacaatcgcgtggttggttgcattcatgtgtgcgttgagtgggaaggagcattctccatcacagtaattggcagcatagcccttgggtgcaatgatccagtccttaatttcatgcaaaggaagcaacaaaagatgagcatgcacttctcacactatttgtgcttttcaggaatgctgtgaaaaggtatttttcacattgcacaggcaaggatacagacgcaggaaggcttaggaatttgtccaagttcacattcaagtggcaatgctgggaagtgaacctggtccatctgaccccagaaccctcgctccttgcagaggcccacagggcctcagctgctacctggaagcacgtaggttgccagcaatatgtgcttggacccaagcaagcctctccaggagcccacggtgctcctgcggaagtagtgccacctgcatatggaagctaccttttatcgctcaccacctgtgattaaagttgctgcctttcttacaaactagtgatggttctcaggtacgaggcaaacgtgtgctcttctgcatcgtttggtgagctggtttgcagccattggagatgttaaccattaggtaatttttttccaaccctgtctcaattaaaatttgtttaaatgcccaaataaatgtatgtcctatgggctttgaaaggatgaggtgagaatattgggaaatgtggctattgatttttgagggatcacagagctcaggcaccctaggaaggtgttggagcgcctggtgccccacagactaagcttcctctgccttactccaggagcctgagcatttgggagggctcctcaggacttccacagaaggaagcagctcagccttcaatcaagctctgggtgtttggtaatggctgccaccattcagatgagagtaaactgctgagaaaggacctttrtcccccgtgtccagagaactcacctgccatcccaggtcttggaaactcacatacagctcatgcttcctgcaggctgttttcaattcactgctgttgtaatctgttggaggagatcaaaagatgcacccatcaaaagatgcacccatcaactcattaattccttcatagagagtttaccacatgccaggctctgtgctaggctcaggatagcctcctagatacaagtatggtcacccaacagctacatcaggttcctgactgttggcttgaatgtcttacggaatccgttttgtctaccctggggtcagtactgggagcagggtgacttgaatggacacccttaagcaacagaggtgtgttgtgagccctgctgcatgcaaggcctatggaggcgtgggccgacttgcccagtacaccccggaggcgcctgaccgggaaggcatcacattcacatgatcagacaacgctactaggcaggatttgctgcagtccaaacggagcattttgaaactgcacaggggctttcaagacagctgccgggccagaagagtatcctgaaggaagagtaatggtggagtggggccaaaccaggaggcccaggaacgggggagagggagacaccacgcaggggcaatgctctctctggctgtactcccacctcactgccagggttgagctcttgtgtgctgatgcaataacactaagccaggggttcctcaggagactctgctgaagtgcatgtacccaccctgtgcagcacaggggccactagcctggcttaactgaatcaccagcaagagcactgggggtgccccaattcactgaggcccactggagcgactcttacgtgacatgccttctgcctggcaccacggccaatagacggtaagtcagacatggctttcctccctccaagaactcagtgaatgaaggggtggtgtaaaacagacacacaaataactccaatacaaaccagaacatggatgctacgggcaaaggccataggcaaatatcacacaggcaagggccataggcaaatgtcccttcagagaagggacagttcagagtgggagtgagaggaagagagaggagttctgctggaatggatttaaggatgtgtcaagcagggtcggatgagataaagctggagaaatgaatggcctaggctgccaaccacaatgcttcggacttcccaccagaggcacaaagtgagcctttgcagggttctgagctgcagagcagcatttcccgctgtgattcgaaaggattaatccatctggagttgtgttggagagttcgagaaacgacggagagagaaaaggcaaggagaaggctttagagaaaggtcatctaatgtgggatgtcagtgggtgtaagagcctaggtcatttgcaggctatcccttcccttttcaactacataagccagtaagtcacctaattgttgaaagcctgtttgaacttgattttctaacttctaactcccagtcttcctggctctgaagcaggagagagcgtgcagatttcattaatttttttttttttcttttgagacagagtcttgctctgttacccagactgaagtgcaatggcacgagctcggctcactgcaacctctgcctcctgggttcaagcgattctcctgcctcagtctcccgagtagctgggactacaggcgcgagccaccatgcccagctaattttttgtatttttagtagagatggggtttcaacacattggccaggctggtctcgaactactgaccttaagtgatctgcccatctcagcctcccagagtgctgagattacaggtgtgagccaccatgccccaccagatttcatgattttttaaggaaaagagacagtgactcaggccagtggcctatactgggagaagagatggggcaacttttttaggtggtttataattctaaatttatttatcctctccacctgcctatgttacccaacagaaccaccctgcctgtaactttaaggaccccagagaagccctggagggaaattttcacaatgcaggacaaggactctctcagtaaaaacaatcaaccaactatcaccataagacagaaacttcctactgaaaagaacccctgaacaaaaatgaatcagccacacaaagtctctcaagaggatggctggaatgcaagggaagacccagaggaccccagagactgtggataagagtcatctgaactaagctctaaaggaagaataccaaaacaaaacaaaacaataacaaaactaaaaacaaaaactagaggaaaaaaaaggaagaatacctaaaataatggaaggaagaaaagaaggactagaaaccttaaaacaaaattatggggaaaaaacatgaaaaaagaacaggtagatgtaaaaagagtcaaatagaactttataaaaaccataaccattgaaaataacaatgaaatcagattagatataactaaagatcagattaaacaggttaaacattagttgtctaattaacagattaaacagattacttaacagattagttatacattaaacagataatcatcaaattacacataactgaagacagaattaaagaattcaacagtatatttgaaatctcttcaaatatagcacagaatcaaatggccaaaatacatgactgtctctttgtaaagagacatggaagagagaatgaaaagtccaacaaatttctaataggaatttcggaaggcagtaatagggagtagtagtatttgaagacataatgactgggaattttctacaactaaagaaaggcaaacatctttaagttgaaaaggcccaaagagttccaagaggatcagataaattcttatctagccacatgtagtgaaattatatcaaacacataaattcttaaaagtaatccagagataaaaagaaaattactaagaaacacaaaatggatagcaaacttaacaaaaatacacattaaaaaattaaataatatgaaaatgatgccatcaaacctagaatgccatacccagctgtagtggatatttactgcttttgctacccagcttttggcaacacttcgcatgtgggggaatgcctagataggtgggactcagagccccatttcccacgacagatagctcccctctttgtcccctagcatctgaagtacggactcatgacttcatcaaagccaatcaaatgtctccaccctgcagtgtataacctgagggagtgactcaaaggtgacatcaagaatgggtagtacggcagccagtgtctagggtgatgaccacattggagggatccaaagcacattgttccatgactagatctgagccttgatttcctgaattaagtctccagcctttttgttgattgggtaagttccctggtacgcttttctctctcattacagtctgcttctactgcatgcaatctagagcactgtgatagttaattttgtgtcaacttgattggactatggaatgcccaagtagctgataaaacttttttttctgcaatggggttttgctctgtcacgcaagctggagcacagtggcacaatcatggctcactgcagacttgacctcctgggctcaagcaatcctcccactcagcctcccaagcagctgggactacaagaacgggccaccacaagctaacttttaatgcagagatggggacttgctatgttgccgaggctggtcttgaactcctagcctcaagcaagcctcctgccttggcctcccaaagtgctgagattataggtgtaagctactgagtctggcaactgttaagacattattttggggtgtatctgtgaaggtatttctggaagaaataagtatttgagtcagtagactgagtaaaatagacctgccctcaccaacacggataggtatcatctcctcggttcagggcccagagagaacaaaaagacagaggaagggcaaattctcttttatc

SEQ ID NO: 94099 - DNA, 34209 bp, Homo sapiens
tgcaataaacataaaaatattatcaagaacatctctcaaaactgcataaatacatggaaattaaacaacttactcctgaataactcctgggtgaatatcaaatttaaggcataaatcaaaaaattctttgaaattattgaaaatagggatgcaacttaccaaaatctctgggatgcagctaaagcagtgttaagaggaaagtttagagcatgaaatgccttcatcaagaagttagaaagatctcaaattaacaatgtaagtttgcacctaaaggaactagaaaaagagaacaaaccaaccccaaagctagcaaaagaaaactaaaattagagaagaatttgacactgagttgcaaaaatccatacaaatgatcaataaaactacaagttggttattagtaaaaataaaccagatcaataggcccctaactagattaacaaaatcaaagaagatccaaataagcacaatcagaaatgacaaaaatgatgttacacctgatcccacagaaatataaaagatcctcagataatattatgaataactctatgtgcacaaattagaaaatctggagaaaataaataaattcctggaaataatctcctaagattgaatcaggaagagattgaaatcctgaagagactaatatggaactctgaaattgaatcagttacaacaacaacaaaaaaaccctaccaatcaaaaaaagtcctggatcagattaattcacagccaaattctaccacatgtacaaagaagaactgagaccaattctactgaaactattccaagaaaatccaagaggagggactcctctctaactcattctatgaagccagcatcagcctaatgccaaaatctggaagagtcacaatgaaaaaaaaaaacttctggctaatatccctgatgaacatagacacaaaaatcctcaacaaaataccaggaaaccaaatgcagcggcacatcaaaatgttaataaacgatgatcaagtaggcttcatccctgagatgcaataattggttcaacaagtacaaatcaataaatgtgattcaccacataaacagaatttaaagcaaaaacaatatgttcatctcaatagacaaagaaagaatttcttataaaatctgacatcctttcatgttaaaaaccctcaacagactcagcattaaaggagcacatctcaaaacaataaaagccatctatgacaaacccacagccaacatcatactgaatgggcaaatctggaagcattccccttgagatatggaacaagacataaatgccaactctcaccactcctattaaacatagccctggaagtcctaactagagcaatcaggcaagaaaaagaaataaaaggcatctaaacaggaaaagaagaagtcaaactatcttcactgacaatataattctatacttagagaaccctaaagaatccaccaaaaggctactagaactgacaaattattttagtaaggtttcaggatacaaagtcaatgtacaaaaattactagcatttctatacatcaataacactcaggctgagagtcaaatcaagaacacaatcccatttgcaacaaccacaaataaatgaaatacctaggaatacagctgaccaaggaagtgaaagatctctgcaaggagaactacaaaactgctcaaacaaatcagagatgacacaaataaatggaaaaacattcaatgctcatggataggaaaaatcaatttcattaaaatggccatgcttcctaaagcaatttacagattcaatgctatttccatcaaactacctgcaccaattcttcacagagttagaaaaaacaattctaaaattcatatccaaccaaaagagccagaatcatcatagcaatcctaagcaaaaagaacaaagctggaggcatcacattacccaacttcagactatactataaggctatagtaaccaaaatagcatggtactggtacaaaaatggactcatagaccaatggaacagaagagaaaactcagaaataaagccacaaacctaaaaccatctgatcttcgacaaggtcaacaaaaacaagcaatggggaaaggactccctattcagtaaatggtgctgggataactggccagccatatgcagaagaatgaaacaattgaaacacagccatgcccatttggataggtatcgtccatggctgtctttactatcacagcagttgccaaagagaacatggcctgcaaagtccaaaatatttactatctggcactttatagaaaaagtttgctgatactctaatttggatcactgagtgaccacatggaagacaaccacattgttgacctgaacaacaacactctacttctttacataaatgaaaaataagccattgaaattctgggcctaattgctaccatagtttatcctggtctcactaataattcttcctcagcagtcacagggtgattgactgatgaatgtacatggcccaatcatcagttgtttgagccattgaggtggactagttatgcccatgggagtacagctctctcctctacgacccaccacgagcccaaaatttcctccagatactctgaccagtcagtcctaggacctgattgaccccagggagtctgaccccctaagtataacacagcatcatgggcagcatcatgggcctgggaaggtgtaaacataatccaatttctgcccattgaactgaatgttaacaggaagacgttccctgaagcagaaggaaatgaccttgatgacgatgacccttgccaaaggtaggtacccttgccttgtcacctacctggtggtcatgacggtgatcaaggctggccctgctttcatgtaactaactggccttcaatggttcacttttcccattgagtgacttttttcagttatacacttttgtaaactagaagtgtttttactggcatttctttatgtacttttttatttttaccatcattttaatttaaaaaatgcagtcacacattttccatgcatacctctaatttatggcaggttatagaggtcttgcatttatggcaatggtataaagtctcctttttgagtgagcatgttgaagtaaaaagagtgacttcatttaaagaaaactgctcatggaagtacagatgatatgctgataaggcaaaaaaccatgatattagtatgagactaactgaggttccagaaacactgcgtatgcccaggctgcagtggagaatgtcatagaatcctggattcatagagtgtggagccatggtgaagggtgcgtgagagggtccctcccccagagccacaccctgtctttccacaaggaattcccaaatgtcacccagtggattcagacttctgtctcccagttcagtgttctccaccacaaaatctacacctgatcaatcccatagttcagagacaaagctgagtgaggggcccagaaagacatgtgtttgctgtgcccaatgcctgctctaacatgtgttttccacatatctgctgagcaaactgatggaggtggagaagcttgggagagttcatttgaaggccccagatatgcccactctcccaagtcctacccaacctcctatgtaagccaggggtggctttggcatgtgtccatggggatgttcgcctcaaagtgatgcaggaaggagtcaaggcagtcccctgatgggctgatcctttgctctggaatccttaagatcattgtagatccttaagaacattccagaactctcacagcattctggagtccattatttaacacatgtttattgagcacctactgtgggccaggcatgttcttgggtccttggggtccattagtgaacaaagcaaaggtccctagattcacggagcgtgcattctagcagggggagacagataagaagaacatgcaaattactccatggatcatgtgatatgttagaacgggataagtgccttggaaacaaagaagcagttaagcagatgagggagatcagaaggaaggatcccatgaattccgctgtcttgaattttgacatagtaggggagaggagtgggccaggaggtgtgtgagtggcaagtgtactgaggtgtccagtcggcaagtgctcaactctcaggtgtgcccagctccctaatgctgaggagaaaaatggcaggtgtgtccattcaccctggccaagctgggaagaaaagcccaaaggttctaattggcctcaccacctctccccagggtacaaaggaccctacaggcatcagagaagaccccattcatctcagcagccaggcatttggagggtttccagcagcccacctctagctgccttcttttctttccttttttaaaaaataatatttactgtttttattttctgactgcaaatgtaatgcatacttattacaaaaaaggtaaagtattatgatttaaattttgtttgtattccagtttttctgcctgttgctatactttcttcctttaaaatggaatgttaagttcagataatttggatgcttgctttgctcattaagtatatcatgagcatcattctatgccattaaatagcatagcctgatattagcagctgcatcacatttggtattgcaccacaattaatttccccaagcttttatctggggtcattaggttacatatgaagtttttgataatatagagagcactgtggtgaatattttatagtgaaacctttatgcccattcataattattttaggataagttcccagaaatgacatttctgagtcgaaaagtgtatatcttttgttaaaattccttgccaaaatattccaactacacttctcccattgaaggatgaaaatctccattcatcagattttttgctgtgcttggggttattaaaattgtttttggttatcggataggcaaaatgataataataatagcaatattattttcctatttagtttgcatttatctgaagaccagtgaagttgagttctttttccctttcttcacattggaatgttgtttttattattattattataataattattattattgttatgccacttgtacttggtgatctgcaggaaaacctcccaagatggaaagcatgaaattgtctttgctggctctgattcttgacagctgtgtcatcccagagcctgagtgcctcagtttcctcatgtacctagtgggggccatgaggcctgccttctggtactttgaggtctgggactgttgcttataatatacttgtgtataagcaccacatggcatggatctacctggctatgtaaacttgggcaggttctctaacctctctgggcttcagttttctcatttgtaaaatggaaataatggaacctatgtaatcagagtaatctgaggcttaaatgagttaatacataaagggtacttgaaacagtgcctggaacactgggaggacgcaataactattaccaatgttcatctatgttgtatccttgagatctttcatcagggcaaccaacagcacttgcctgggataggcagatggtagaatcttggcatgtcagggctgcaagactcatgcagaaatcaatcctctcacatagacctggcagattgggacccagaatgtgaaaggaattcacccaaggtcaccctgtaaatgtgtgggagagacaaaactagagcacagttctgacgttgtcccacaaagattttacccctaagatattgttggaaatgtcacctccaagggaggatcagtgtattggtggtctcccctcctcaatgctgggagttccaaagtttccgggaagaaaagagctgtgaagcccttctcactctgcttggtcttaggagaccttagtgagtcccagcgtccccacctgaagcccctgatagcctcctacccactacaatgtcgtgagtctgtaaatatcaagtccattttcaggcttaaacctcccagtccaaggcgctgccctagaagacacctcgcttagatctggctgaacttcaggggttcttctttccccctccgcaggtgcacccaagatcccaaggtagggcagtttctctcagaactattgaccaaccgaaaggaraacattcctttcaagctttctgaagactgtctttacctcaatatttacactcctgctgacttgaccaagaaaaacaggctgctggtaagttgtgggatcccctggtcaagrcgtgtcagtgccagtaccccagatattctagtgtagatcggaaggggatgaaggcagcttggggagggagctgcacaggccaggattgtttcaggaccccagggcctctacaggaaacacaggttttccacacgtcagtttcccctcrtgacatagggactctgggggagtttgctgtgcctctttaatgaacatcttaattgttccaagttccctcatgataatagaaggatgagaatgattacctttagttactagattaaaaatctgatacccagattggtatcagagtgggtaagacatgattttcaataatgttagcggtcgaaggaacttagagaaaagccaacacctcaactcttccttttcagatagagaaaccgaggcccagacagggaaggggaggtcacccagtaggatagttttggctcaagtcttctgatcttcaaactagtgcttttgacacagagtagggcattgagattgtatgtggcctttctccagcacaccaacatccatctggggtaactttcactgtccgggtatgggtgttgggggcagagcctgggacaatcccagaagctcttccttttgcctttggccaaatatctgggatttttttgtacctaatttccctccctaattgtgttggcaaagggtgatgwcccaatgtgtcagcatwtgccaaataaacaaacggcaggagatggggctggctgccagctgcagrgttgggagtgtctgctggcaaagaaggccaccccaaggtgaaagaggaaggggtgtcaggtccagtcagtctcccaggggcaccgtagcatggtgcctaggagtggcggagcaggtctgcgaacatgggactagaagttggccctacatgtgcttcgtgagacacaggaagtgggagaaaggtttactcattaattcattcattcttctattgtgtactcagggccccatatacacagttagacctggggcttcacggaaaggaggaacatgaacgcactccacactgcccctgccttcaaggatcttgccttttgtggggtagaggcatatcctcctttcagcatgttattgcaggtcagcactcgggctcagtcttcacacaaagatgaatgcacactcaatccctccacaggaggcaggcagggattagaggtgtgggagaaacaggagctctgggaacctgaaggcaggaaaacctccaggaatggccacaggttctagaactacacgtgcttagaacagcacttcgtacatagtttatgttatgagttcttttatatttcatgaataatattattacaatactattattttagccactctcacttcttccccactatgtggacttttaaaatgcaagaaccttgagttaggaattgtacctactctcatcctcgggtattagcagagtccctggcacatagtaagttctcagacagtgttagtccattgattgaaggcatcctgaagagggtgggttttaggctgggctctgcagggtggataggatttggggatgcagaggcataaaggaggcatttgaggaagagacaccatcacaggcatgtgtgcttctcgagacaatcattcatgcacagagaagtttacttcaccatgaaagagttaactgagatgaagctgagatacaagggctgccccatrggtacgcggagtgcttgaacagtccaggcttgagggtgatgggagtgaggtggagaacatgaatccttagcgtttgctatgcccatgatgatgttctcagcgtgaagagccttgcgaggaggaggcactggagactgggtagaaaggaaggggcagccagggtatgtgcagtggggtggtggcttgggccccagttgggagaattatggaggagagagactgccttttgcaaccttgctgggcacttgtgaaatttgggtaacaacctccctcagttgtgaccaacaggcaggtcaccaaacaagatgccctctgagtgctccctggccttgtgtcctgtaacgagtatgttgcttcccccctgcccaggtgatggtgtggatccacagaggggggctgatggtgggcaccgcatcaacctctgatgggcgggtactcgcagcccatgaaaacgtggtggtggtgaccattcagcactgcctgggcatctggggattcttcaggtaagaaattagactctcctcactgcacctttggcccccaacatgaggctgctaggaccagctctggtcatgtcagccctcaggagaccttaactgggttcctcattgtagcagacaagcaccttcataattggacactacctaccctctcactccccagccacactagtccactagcctctgagcttttgtatgtggtgttccctctgcctggaatgcttagtctacctaaagaattcctcttcatcctgcaagacccagcccccagttagctccactgaaagactcatctccttttcatctgtgctgctcccacacattgcatttctctgtcatggcagctagcatgcagcccagctgttgaaggttgacacatctgacttctcatggaaaggagggaaggggcagagtcatacagggagttcagggcatattgtgggtgaaggaatgggcgctgcaraaggtggggtgtgggagcatctgacyccttcctggaggagtgttgggacccactcaccccattttctgcttgaaatctggcaagtgtgggaagcaaagatggagtcctcctcatcaggtctccatggggacagaagtccccatggcgtggaggaatttggtagctttgagagcttgtttggggaaagcattcaaacttaaagggctggtacattggaggagagaaaatggggatgccaagaatttttagaatttttgagaatgyttttagaattcattggttataagcaacagtttcccagtgaccagatttaagtcaagacggacgattggctaggtgtggtggctcatgcctgtaatttctgagagtgatgtggccctcactcctgctctggtggagaagggtgacgtcaagcccctggctgaggtaggtctcccgctggatscccccaaccccttggctctgtgcttctgaattctcagaggttattcttgccatgggttctagctgatgttctcctagaatcactgaagcgattgggaggtagaggcggaagccttgcttgagcccaggagttagagaccagccagggcaacaaagtgagatcctgtctctacaaaaagcaaaaaattaagctgggcatggtggtgcaagactgtgggcccatctacatgggaggctgaagtgggaggatcacctgagcccaggaggtctatgctgcagtgagctgtgtttgcaccactgcactccagcttgggaacaaagcaagaccttgtcccaaaatcttctcttkaaaaggagaatttatttttcaaggaaatagagatctgggaggatgggctttgtgcaaaaacaggaagcagaaattacaaaatgatgggaatcctagactctgttactcttgttctctctctgtctctttctctctgtctgtctgtctttctctctctctctcaccctctacttctccctgtccctgtttatttatttgagaaacactctgggcattgattctgtccgagatcctgcacggggctctgggggcatgtgcgcttgccctgactccccractgtggagcctgcctgctctccctctgtgcccttctttctggctgcactttgcttccaatctgcatgagcaccctatctgcccctgagcttaaggactctccttggttccagaaagtagtcaggctgtctttcctgttgtgaaaaatgagtgttttttacattagcagctctccaccccaattccaggtcacttaagagagaggctcactgtcccgtctttgcttcsatgtccctgaactcttagaaaagtaggaaaccagagtatgctgggcaaactgaccccaatgcctaggtcaggcagaagggaccctgtccctcgggagggctttttaaatttttatattttttacatttttttaaagatgaaaagaggttcttggtgtattaattattgttactttgtggcttgactcaggacaaaggtgcagagaccatckcccatggccaaatctggatctatgcctgcatggcccttgagctaaggatgactttttttaatcatatgaaattcaaatttcattgtccataaaggaagttttcctcgaacacagtgacacccattcatttaccttgtgtctctggctgtgtttcatgccaacagcagtcttgaagttgcagcagagaccacatggcccacaaagcctcaaatatttactatttggtctttgatgggcacattgctgacctgtggcctaaagagtcatgtttgattactgcttgggactctagtacacaaatgtgcaggtggaaactcctggctgtgccacagatgcctcactcagctgagaaaccccatctatgtcttgcaagggacgagaccctgtttttctttagaactcaccattraagcacatttgctactttctgaagtggtcctgtgtgaatcatcttatctaggcctcctgcaattctgcacatctttattgtgtggaagacatggcactctcccacatgtattaactcatgaggtaggtgcagtcattattaccatccatgagtggagaaaccaaggcccaracaaatcaggtggactgcctgtggcctaatggctggtaagtggagcagccaggatttggaagcagacaagtaaattcaagattccatcatctcaaccccagctccacctcacctttcttgacacattcagcttgagatgattatgtccattttaatagagataaggtagcagagataagagactgggtaattggctcatactacaattgtgattagtaacagaggcaaygctctgcggaatccagaacccacacatgtgggtctagagtttcttctgctgccccctgccacttgtacaagtcaggcttagttaggatagaacatctttttccatattgatggagggaagggacttcgctcttgaactctgttgttgcttgtgatctttgcagcaaattgctaacactgttgggtgtgaaaccaccaactcagctgtcatggctcactgtctgcggcagaagatggaagaggagctcttggagacgacattgaaaatggtaggttgcctgttcccrtagcccaaaccctgtaaacttggtcccagacttcttcatttcagctgtcctcttgccctgggacagttacctggggcaatttctcaagtctcaggagtctcagtatctgaatggggaatctaatttgtccttttttttattgaaaaatgacacaaatgtaaaaacaaagtccaaaaataacatgataaaaaaactgaccaaatttactatttgaccaaattttaatattttgccattcttgttttcagatgtatttttgagaaactaaacattacatattcccaggggacaccatcattctgaattttggggatggagttattaagctcaaagattttcagaaagatgtcacaagttatcttggttgacttagaaactgtctgtattagacctggtagtggtccagttttctagattttctgagactctgactcagttgtcattctaggatagtcgttcgtccactcaatcattaatccatctactatgatcttcttatgcatctatgtgttcactaattcatcccattcattgatatatttttatcaatctaatatcaacctgttcataactttttatttttctattttcaatctatccactgttcatgcatcatccagccaccatatatcttaactctatcaccccattcctccaaaaccaacaatccagttatcacctatctgttagttttcacccactattcatgtatccatccaattcaactgtactccagctattggtgaagccatccatccctccatttatccacccatccatccatgctaagtatgtaggggtgggtgttagaggtagtgaaacagacatgaagtggacatagtccctgctcacatatacttttcaggttgagtatggtggcagcacagaggggaagcattcattgtagtcatcaggggtgcttcacagagaaggtggacgagccgaatttgagaccagacagcrgaattcgggaattcatgcccttaaccctgactccaccttatctttcttgagaaattcagcattgagatcattgtgcccattttaatagaggtaacagagacagagaaattttgtaattggctcatgtcacagttccagttagtcagaggcaacacagttccagttaggacccagaacccacacctgtgggtctagaatatcttctgccattcctgctgtcctcacatattaggacttggggacctttatgaytgacggacagctgtggcagtctctcaacacagggaagcccagcaggacaaacacccagatgacacagcacccagggccattgggaactattccctttgagggagaagggtgtgaattccaagctcatgagtagcctgatctctggaatccctccttggacctgaggctactcctgggtcccaggtccggctgctaccactggactctgcttgtgtttacatgggttgagtccaatgtggtcttggagcttargtcttggttcaagctctaaatgaccaaagtgttcaaggaattaaaacacaactgctttctaatgcctggaaggaggcaaacattccagcaattctgcatgtggcatcagaggacccagcttaaaaggaaaaacttggtaactttgggaaaatccagccctaagatcctgggacatccttctgagattttctgagatcttgtgggagcgcctccatgattacccactgcctccagtacacacacatgcagacacacagagaaacacacacacatagacacacacacacagagaaacacacacacagacacacagagacacacacaaacacacacacagacacacacacagagaaacacacagacacagacagagacacacacaaacacacacacagacaaacacacacacaaacacacacacacacacacagacactcctggctagtgggactacaatccttaatggagagacctgcactggttacttcctgcgaacaggccagacacgtgagctacagtgcagcgatacaatcactgcaatcttcatgaacacacaccaaagagaagcatggggtagggtaagtttcagtgagttgtatgagtcagagctgtgtaatgggagatgagaaaactcccccaaggtgccttgaatggaaaaaggaatgtgttggaataacatccttgtgttaactgaaaaactcaggagttgacagtttcaggcatggctggatccagatgcctattgaatgttattgagaatctaccattctctatccttcagctttggacaactctgtgttgacttcactcttcagcagatacatcttctgggaaggttaaagacaacagcactctagagttatatcctatctgcttcgaaaccctctgtccaaacaattcctacaaaagttctggggtaaactctattggattgacatggatgtatacctatccctgaactaatacccgcaatcagggaaatggagcgccccaggtcacatatagatgcctgaattcatggagtgatagggaaagaaagagatccctgaaaaagaatgggggtattcttccctggggaacaggaaggggagagggatgggggacagggaaggctccaaaagcaggtgtcctatccagagctgtagcaatgctggctcagagttcctggcccatccttcccgtgccagtgcccactctttcgttctatgccttcaccctgtgctcaggcccagcagagccagagtccggcccacttcctctgggcccagccagctcggcaccaggagggagaacctgacacctctgctgccccactcacccagctcagtgttctcctgggaagcctcttacccacatcctctgcttttgtcttcacagaatttctgaactctagacttacatggagaccccagagaggtaaggacattttgtttctcgattgcgggttttgagtcttagcacctttaagctccaattaactataagtgaaagaatcctctctcgggtaattataggaactcctgtgtgcttgatgctgaggcccagagaggggcagtcactcacctgggtaacacagccaggaagactagtggctggcctggaacccattttcctgactcccagtccagtgctcccaggcatcacctctgtatgccctgggctctgcccactcccctgcttttttacattttctgctccccaaaatggcactatgggaggaggttgaaccagaacattccattatcgggaggcagagataacagggatgattagccacggagaggggaagcctgaatctcagtccaaggacactcaactcctcccagcacacaggagtctccaacaatatcctcctgatctcctcaccacccccacctcccaatgggttgacagtttctggtgacatcacctctgacgaatcttacaatcctgtcctctctgctgccttcctggaggtcacagcactctcctaaatggtcatgggcggagtacacgarattcatccagcaaagacttaataaacacttcctatatgccaggacttgtttaggagctggtgatataggagtaaaacaagaaagactccctgccctcttgggaccttccattacagtgtagggagagtgcaataaaaaagcaaatctagtatgtattctgttggatggtgtgcagcattaggggtagagtttgcaggtggtttcaatttaagtagcaggatcagggaatggctcaataagaaggtggcatttgagccaagctctggaggaggcaggaagccagctgtcaggaaacctggggaagcctattccaggcagagggaacagccactgcaaagaccccgatggaagtggcaggtccagctggagaggatggagtgtggggacagactggcttgaggctgaagaggtaatgggaagtgggagagggatcatttaaagtagttgcatttggattctgagcaagatgggaagcctttggaggttttgaacagaggagtcacatgatcttagatttcacaaaggtctctgcccctggtgatcaaatagactgtaggaaacgggcagagtggatgcagctgaccagctggcgggccactgcattgccataatccaggcaatggctcctggctgcttaaggctgtagtagtggggatgggaggaatggttggagtctggatatctttgaaggaatagctgagaggattcgctgatggacaggatgctaggggtaagaaagggagaggagtggaggatgtcctgagttttcgggcagaagcaaagtcatacccacacagggcagccacttgaaaactctaagtggacaacaatcacttgtcattgttgctgatggcagtcttcccacttggctgccacccaaccagggcaatcctgtctctctcctcaacttttatccttttctacttcatatcctctacccaattccgtgtctcatggtgcagccagattggccttccttaacagagttagagtgcgtcacccccacttcttaaaagcctgaccttccttatgagacaaattcccttccctccatggagttagtccttcaaaacacacctgcgtgcgcactatgtgccagactatacagaaggtaggctctgcacctgtccctccctctaaaacctgccccacgataattttccaagcccagaactcctgagtgtttctggaatttaccctgcatagtgatatctatgtccctttgctcacgtggttcccgttttttagaaattctcactcctttcctcacttgtcaataccagtcactgcccagagcccactgcaggcaggcggcacctcctccacgtagcctgccctgcatcttccttgcagagaagctgctcctcttgctggcctcccacggcagccctgcctgaactgcacagcctctcaaggaggccggacttgcaccccaatcctgttccgtattgtcagccatattggattaggatctgcaccttgtccagctggttctggtccacttcacagaacatttcccccaggcagcccgaactagctcgtcattcattggcttttgtagagcagaacaaaggtcctggaagccatagggtctcaaaaaagctaggaattgtccagttgcatctgatatctgggagggaaatacagcccatagggcatggagctgggaagatggcacagaggactggggtctatgagagggacccacagcaaccctgctaacaagtaatacctaacagttattcagcccttccagacaccaggtgctgcgctaagtattttgcatgtgttcagccatttaattcctcacaataactcacctcttagatgagaaaactgaggcccaaacaggtgaaactcccagccagtaagtagcagagccaggcttcagatccagttaatctggtttcaaagtcyatactctgttttaactgtacccagaaccagctgccctgatggcaatgcgtgaatcaggctctcgctaatctgtgaccatacaaaaattattcatcaaaggtaaaacctaaaattaggacatggatcaatatactgtgagttcatcactgattcttttattcatgattttctctctaatagggaatcwcgtcctagtctaggctccttgagtgatgagggttccgtacctcctcaaagccacccatggatcaataacagctctcatttaaatagagatagatagcacaatctctcctcattaatcatggattctgcgtytataaattcacctgcttcctaaaatgtccttataacccccaaatcgatactggtggcactttcatggtcacacacaggcaggtacagagtaggggaatctggatttgcatgatgggcacgttccatctgagatccggcaaggcaacctctgtcttcttgtttcatctctcaagctaacaagtgtcctcttcgtggtcaatttagtgccatgtgttctgcatttttgtgctttttctggtgatgtcactgttcagagttgcccgcaagagtagcgctgctgtctagtgttcctgagctaagcaggctgtgctgtgccttaccgggaaggcgcctgtgtgagataagcttgggcagtgctgctggccatgcgttcgttgttgaaaaatccacaaaactgcacatacaggaaaaggaggaggaaattggccagttcatacatgaggctgtgatgggaagtgctaaagtaacacctactgtgtgtgatgcagctgtggaaagatggaaaagaaactgcattgggagattcatgagatgatgaaggaatttttaaaaagcaggatggacagcactgttgtgaggttgaaaacaggaaatttacactcatcttacccagggtcaaaaaatgggaagggcttttcagctggtgttttattaaaagtaatcctacttataattaactctttgtaagacttatgtattatataaagtgtctttcaacagaaacccacacataaaagaaggttgatgaaaatgttgtggccagaggtttgcaagaacctaacccagtatttcccctttgagtgaagaccctgtattctctaattcagcactcgtgggagctttgtcggaagcaactgctgggactaccgaaaacaactgtggacacagagagggaaatgcatgtacttcaaattgaagtatatagacatgtaattttatatagataatacatgtatttcagtctgagtgaagatttcttcctctcctcgtcacctgaccagtgtcagcytctgcctgaagttctgcccctgagtcacacatctatcctccttagttaggaccctgtgtgtgcatacccatggcccaaagtcacgccggtctagggtgctggtctcaccctcagacaggcagagttggggacacggttgtgacctagggtgggaatcacaggcgctgtgttgctctctcccccagagttacccccacacacccacggtgattgatggagtggtgctgccaaaaacacccgaggagcttcaagctgaaaggaagttccacactgtcccctacattgtcggatttaacagraaggaatttggctggtttcttccaacagtgagaaggcgcaggcctcttggagggactcacccacccccatcagccctcccacctctgatcccaggagtgcttccctctccaagcactgctctgagtcctggrcagctgttcccttcagcaggagttaacatttccatggaaaccttctccaggagggcacagttgtcaccgggatatcagggccctgggatcccctctccccagactctctgattgtcttcctattgaagaatcctgaagtgtctgtgctgggaggaccagtagataaaataactgtgcagatgggaaaactgagggggcctaggaggggaaaggagttgaggagtccggagaggcagtcgggggcttcctggcttcccactttgggctgggtatgcatagttcccccataaatcactcatgctcttcatcacctcattgaaaagatccaaaaaagtggcttcttttgatttcccattgacttctagggaacagtagacaccagggtctacttgagggatgacggtcagaggagggtgaggatggacaagttacctaatcgggtgctgtgctcaatacctggtgacaaaataatccatacagcaaactccagagacacaatttacccatgtaacaaacctgcacctgtacccccaaccctaaaataaaaattgggaataaaaagtggaagaaagaaagattgacttctaaaattgaaaaagcgttctccttccagtcgaggacacacaaagctgaccatgattaaagcagtaggacagaatttattcagtaacacaactgcacagaggaaagaagagtccagtatggattggactcaaatccccaaaactaactcctggcactgttttaaaggctgagtgtgcaaaaggataggcactgtgtgctgtggagagggacttggtccatgtgactagaccgcctggatgtcttcatcctggctcacctggggcagaaacaaactcctcttatcgtcaggacaggaagccatgcattagactgcaggaagaacccactgaagtcaggctctactctttccacagggactgggaagatcaggagtcagctccctgaatgtttgcattgcaaagagaaggctctaaggccctcaaggaaatggggttgggtggtaaattccatcccaaagggcagagaaagtgtttatcattgcaggcttctaaactaactgctctagttgggttcaggggcctgtctgcttctctccaggttttggctggagcagagtaaattgttctggcagagttgagccttcccaggcaagcatgttaaggatactggagtcattctagggacacagccttaagctgctagaagcgatgctagagtttsgtcgagtctctgagtgcagaggtttgggcagagttgttttgtgtgaagagatatgaagttcgcccctcagaaggatttcagaggttataccaaagaccaaagccatgaaggcaggctctaaggctttcagtgtcatctgtgacaggtgggggtactagggaggtctgcatcctcttccccagaaccctctattccacactggcttggcagacaccttccctcaccatgtcactggccactgtaggtatcccagcctgacacacacacaaaamacacacacacacacacacacactgcaaaacactgccacagcttctccacatttttttttttttttgtaatctttgcaatgcttgagtttctggatataagcccatttgattcattgattttgcccatttcagtaaaaacccatgcctttaaaagcccaaaatattggaggactttcagtctgcattgatttggttggttcgtcagtttgtttcttctcgttaattcccaatgattcataaatgcttaactttttttttttttttaacagttgatgagctatctactctccgaagggaaactggaccagaagacagccatgtcactcttctggaagtcctatccctttgttgtaagagtctaggaatcacgggaattggctaggacccacagagcgacaaggattgcccaaattatagagcaattaaatggccgaatgaagactggggcctcagggtttctcccatctttccacctttcccacttcactttccaccctagcggggagttgcacagggcttgtgggattcaccattgaggcagcccttcctggtgggctggagaagctacatcgctcaccagggggtggttgtcactttattgatctattttagcgcattcctaaggaattgattccagaagccattgagaagtacttaggaggaacagatgaccctgtcaagaagaaagacctgttcctggacttaatggggracgtactgttcggtgtcccatctgtgactgtggcccggaaccacagaggtgagtcctagaggtcgaacaggggagggatatggaccccaccagcttctgtatctgactcacctacctcccagcatagacagatgtggaaacagccgagggtcaggcctcaaaggctgattccatatggcatgggatgaggtgctgtcttattttggtttatgccagtagcagcctgtgaaaaaaaaaaccagaggcaagcggtttttttaaggtggtgatcccagwtatcagcagtagggcggtggggaagtgagagaggaaagagatggaatccaatccaaggtgccttgacaagggagtatcctctgtggacaactggagctgggaaactcaaggaaacactgagaatacagcactcaggggcatcccatctgagcaccaagggagctggggtatttayccaccagctcccacttgtcattgtttgaaggctcttgcaaggagttgtttattccctgtgactttgacctgctgcacacaagggcagagtagtctcttgtgaccagacaaaggcctcaggccgggagctgcagatgctggaggtagaagtcaggctggcatgcccaggaagaggggatatgggtgagacactgacagcatctgctgcaagggctccatgcctggagttatcgtgggacatagggctgctgtaggacaaatattgaaagatgagtcttggaaggtttttaaggtccaagttggctgcaaacaagcttgttaagcattggagctggaagaacaatgggagtcctgcacaggatccagaggattgtccaggaccaagaaggccaaaagtaagagctatggtgggtgtgggggaggtggtcggaagaatggcaatgtctgaggctggcttttgtctatctcggtgtgtgcaggaacatgcaagcacagtgccaggacagggtctatgcaggaccttctaccactgacccaaggctgtgtgggtggggcatgaggttagggatgcgtgggctcacctctagagaagtgtcttctcctgggtgccaactagaggaggctcacaggactcctctttttcttccagctctcattcgcctagtctgcaagccaggaaatgtcctctctctaaccatgctggaagggtttttaaatttggaacttcataagctaaagctaaagctrtagctaaagctgatgtcgcaggtgcccagacacacctttgcacaggaaggggcaggtgctcataactctcacttcttcacaaagtcctgataaaaccctataaccaggaccactggagttgaatcatttctgtcttaaacttggctttgccccatgytctgcatctgatctatatatagtgttcccatctccatcttccaatggtttgagcaatactgaacctctgtttttcatctgatttcccayaactttgagttcagagttttttgttgttgttgttgttgttgtttgccaggactacacagatcttatcaactttcacttattgttgtgtctcactctttttgataaaaacaacatttctgaacataaagttaatatgttaaagttaatatgaagaaagtttcaaaaatatggaaacacgtaaagaagaaactacatatcactcctaattyccccacctggaggcaagtggtataaatttttttgtactttcttctaaagatttttcatgtcctatatactttaaaaatcaattttatatttcrcttttgttcatagaacactatgttgtgaggattttctcaatattcatataaactcatcaaaacattccttattccatgaaatggctgtgttaaatagactttaatattcctatcctattagatgtttagcctggctgctcacattctgatactacaataacactgagttcagcctaatgtttataagtctctaaccacatgtctaataattttcttgggattctttttagaagtgaataactaggctggaccaaagaaatatttttgaactcttggcaaataatgcaaatttgcattccmgtgcataagaacgtggatttcttaatttactttctcatttgggataccaaggttaaaagttaatgctgccaatttgccccaccaaaaagaagcacatcaccctgtattcttttgcatgtctttcatgacatgtctttcattgtctctgcttctcttcttgtgcctatttgtcattgcccaaaactgtgccctactttcctctgaagacttgtgttgtgactgtaggaattctatgaatatcaatcactttagccaaaaaggtttgacaaagtacattttgggcagcatgctgcctataataatttctatcattcacaaaagctctttcctctatagttggctctgagttcctttggaaaatgtttgaatggcaaaggcaaggtcaaacccyccttttagcaagttttgcttgaccttgaagcagccatttaacaggtggattacagagccacagaaggatggcatcttcccaagtgcgcttcctgctgagccaagggtgcagtgcaggaggctgacaaagatgagtgaatagattattcttcattcttacattgaaatgacatgtgcgggtggggcgtgaggttagggatgcgtgagctcctgttgttaaatccttttgtggctgaatatttaagaatgttaagaaatgatggctggaggtggtggctcatacctatactctcagccctttgggagactgaagtgggaggattgtgagagcctaggatttcaagatcagcctgggcaacatagtgagatcctgtctctacaacaaaattgttttcaaaaagtgatgatactatattacaaaataacatatataatatcatcccaagtttatatacataaaagagagatatgttaaaataaaaaagaagcattctctgtggtagagttaccagtgatgttttaaatttgatttttaaaatggtttttcaaaatgatttttaaattatataggaggtggaaaattcaaagtgctgaggcacaggaccaggtggcccatgatgtagcccagaaggggcagtgatttgtggctccaatgagccaatcattgggaaactggcatcttcttcgggctggaacaggagagctttgttggtgggagaggagggcagagcagaaggagagagggcggggagaggcaaggtcacccttgctcagccccttctttgctctgccatgactttactgccttaacaccctaacactcccaggccaggcaggcagcaagacacatggagacagtgagatataaagcagtgagtgccgcagattcctgagacacaagaggcagattgttccctctctgcatatgtttgtatttaagtagcctcatgttcagacaagcaacttggatttgcttcagtcttctcaggatgggtgagaaaaacactggaagtgctcaaaatgagggagaacagaagacacctgtcagagtggagatggcgtccaagtgaacgaagtctgttatcaatgaattacatccagtgtaaccagatgtagagagattgtcttgtgtgagaatgtaccagcaggcaaaggggtttacgaggcagagtcagtgtccctgcactggcagttattttgaatgaattgacccagggtttccacattcattcattaaacatttgttcattgaacaaatatctggctctaattccagttccacctcaaccagctatgcagcccggagcatgtcgctgagctttcctgtgactctgtttctctactgtgctgacagccagaggtttcctgcagagttggagaccttggtagcctccaggtgtgtgtctggcaacatgaactgtgcatgaatccttgtcttctcagatgctggagcacccacctacatgtatgagtttcagtaccgtccaagcttctcatcagacatgaaacccaagacggtgataggagaccacrgggatgagctcttctccgtccttggggccccatctttaaaaggtaatggctccttgctctccgtgarcttggagttaggagatctgggttcctgtcttggtgtggtggctttcagcaagtttcttctctcctggtcttagtttactgattctctataacagggttgaatgtcactgggttgtcccccagcttcctcccactctaacatatgtgaggcgggatgtgtattcatgtgccctttgcacagccactcagaatcctgctctgtgacatcaacaagacgggtgtgtgtgggggagtcttctgaaggattcactatacagggttgaatgtcattaggttgtcccccagcttcctcctgctctaatacacatgacgggggatgtgtatccatgtaccctctgcacagaaactcagaatcctggcctgtgacatcaacaagacaggcgggagggtgtctyctgcaggattcagtatgacagagttgaatgtcatcgggttgtccccccacctcctcccgctctaacatacctgagggaggatgtgtattcatgtgccctctgcacaggcgttcagaatcctgttctgtgacatcaacaagacaagtgtttggggggtctcctgcaggattcactatgacagggttgaatgtcattgggttgtcccccagcttcytcctgctctaatacacattagggaggatgtgcatccatgtaccctctgccacagacactcagaatcctgggctatgtcatcaacaagacaggtsgtgggacacatgcaggggtgctctaggttgagaagccaccmatcaatttccctctcccaggagcgctgagaatgtgagtgagggtgagattagagttggtgttaaccctgagtcaggtctaatgtgtgtcggtttgtctttctgtctgtctctaacaaaaactcataaacctttacatttawtacatttaataattgttagtttagaaatcacaggattatgaattaygrtttatagtcagcaggattcactgtgacaggattgaatgtcattggcttgtcccccagtttcctcctgctctaacacacatgagggaggatgtatatcatgtgccctctgccaccgacactcagaatcctgggccgtgtcatcaacaagataggcggagggacacatgcagggccctgctctaggttgagaaaccaccaatcaatttccctctcccagaagtgctgagaatatgagtgagggtgagattagaattggtgttaaccctgagtcaggtctaatgtgtgtcggtttgtgtttctgcctttatgtctctaacaaaacctcataaacctttaaatttaatataattaataattgttaatttagaaatcacaggatgtatgaatttggaatgggagaggagactttatttttgatgtggtttatagtcagcaaagttgctatccctcaagctgggaaggtgcctctggccaagcccagaaacaggctcatcgaacgaggaggggttgggtagaagctttatatgaacagattggctaaacatacatgttcaacacgttacagggggagcaatggatattcatgaagacagtcctgacacatgtgtattaaacaaacatgcatgtaacattgcccatgttcacctggtgttggagacctaatatttaaatgtattacaattagggcttataaatccaagggtcttctcaggacacaaagcccagcaagtgagcagcctctgtacaccggccaggtccagtccatggctggtgatgttcttatctggagaaaataactgaaatcagtctcttatgcaatcaaagccgtagttaaggctggtgggcagggttctgttcttccgagtatccaagctgcagccattttaattgttttcattttgcttaactccaggccagtactggtttagctgtagacaaaaagaagcaccttgcagcagggagaacagagtggattctttaagggtagagatgcaggcctgaacccttgcccggcatggccttcgatctttttttaatttggtgtcttattgccacaaggagtgtgttctgtcagaatgatcacctttattttattgctgatactcgtccggtggtgtctaaaccacaaaaaagggggagtatgatgaggcgtgtctgacctcctrtctgtttccaggcaggaactcagtttagggtttttctggggtccccttagcccagagagggtctgttcagtgagttrggggtgttaggattttatttttagtttacattatacaatatttttaaaaatcctttcatgatgtcttctaagccttaactctcagctgttacagatcacatgggactcaccccatggctgctcaggatgcaccatygccactgggcatgtcccaattatgcacccttaggaggcttgagttctgttatatttcagaatgtgaattgtgggtgtgtgcaagagagagcaaccctgggaggtggggcaagcacatggaatgatgcatgcccattgctgagccctaggtcagccatgcttaaaggtaaagtacacacaaatccaccaggatcttctaaatgtgcagacctcagctcagtgggtgtggagcatgcgccaagactatgtttctagcaggtttgcacgtgaagttgacaatgcaggtccgcggaccacactttgagtaacaaaggctttttttcttcttccccacagagggtgcctcagaagaggagatcagacttagcaagatggtgatgaaattctgggccaactttgctcgcaatgggtgaggctcttggcaaagacacagcacagctggtgarggtggggggcggggcatgccwattgggaaggggcagcttctaaggttctagcgatcaaacttctgaccctgtgaccatagcactctgacaatgagagctctctacaaatggagaggccgccccyggagatagtgaactccccgtctctggagatatacaagcctcttgacggagataacttgggcgtcctcacacatctctgaagattgttggggacacacagcagctttggggcaattctatttgattttgtttccagaaaccccaatggagaagggctgccgcactggccagagtacaaccaggaggaagggtacctgcagattggtgctaacacccaggcagcccagaagctgaaggacaaggaagtagctttytggaccaaactcttcgccaagaaggcagtggagaagccaccccagatagaacacattgcgctgtgaacggaaggtccatccagcctcgggaacctggaggagcaaagactggggtcttttgccaaagggattgcaggttcagaaggcatcttaccatggctggggaattgtctggtggtggggggtagggggcaraggtcatgaaggagcaagttttttatttgtgaccycagctttggcaataaaagatcttttgaaagccaaatcactgcttgtgtcttgtattagagattaatccatcctcctcagagacagaacgatgatgaaagaggcaatgtgagaaggaagctggctttgctggggatggcctggcctcaggacgagtacagtccagagggctgggtcatggacagtgctcaggggagctctgggcctactgcatgtttctgagcccccaagaatttccaacaataggatttaggattgccagagtgcagcatccctatcctccatttggatctgcctatggaaatggaaatggcccaggctgagaatttgcctggatcagggaagagagagaggtgccgaggtgatcccgtggcactgttggatggcctttattgactcttgcacaggtctgccacaccttcctcagtatgtacactagcctcctagacccctccctgaggctgtctctttcaacagctggtctaaactccctctgtaacctggaccacttctgttgcgggcactgaccaccttagagcaagtctccagagggtcatcctaatactgtgtctttcagaatctcaggggtgatttctggattctgctagaatgtggaaaactctaaagagtgtcactcctgccttatcagcaagagaaaaagctggattgtcctcaaaatcataacttttcctattgcccaggagaaagattggggtagatagtcagactagagagggccaggcatggtggctcaagcctgtaatccagcactttgggaggccgaggcaggcagatgataaggtgagaagatcgagaccatcatggctaacacaatgaaaccccgtctctactaaaaatacaaaaaattagctgggtgtggtggtgggcgcctgtagtcccagctactcgggaggctgaggcaagagaattgcatgaacccgggaggcagtgcttgcagtgagccgagatcatgccactgcactccagcctaggtgacagagcaagactccacctaaaaaaaaaaaaaaaattcgccctgggcagagctgcaggggagggtgggaagccgactcaggccctgcacctgggtagctgccccacctggtgctgccccaggtaacgcatgtacaggatgagcctcccttcccccagcagggacagatcccactcagtcctgccccgcatgctctcctaaaagtttgtatcaagactgtgcctcattattccctgcgatgggaagggctggggagaaaaaaacctaccttaccacttgattgtgtcaaaatacaagggaattcattgcaaagagcttgctgtgctccatgaacggggtggagctcaagtctgaaattaaaggatgggtaggaagggggatggccagccacaacgtggtggaagtgtgaccctgagcagtgggggcaagggggccagcccacgggcagcagggctggtgttggcaaggttgctggagcacaccgtgggtgcctggaggacagcttttctaccttgacatgtaggaaacagacttctctctttataggaagataatgccataaaatgtctgtctacctatctgtctatctattatctatctaccatctatcaattatctatctatcatctattacctatctaatctatttatttcattaattacatttatttatgtaattgtatttcaagctctatttacctcctgaacttttcatgtgagagactacattttattcaatatatgctttaggtaagtttcagttggatttctcttagtacatatgacagagtcctgattaaaatcattgctgcatttgatcatttatattctatcctgtaactataatttatgtgatcaccagtaattttatctgtatcaatcttgtctcctgtattagataacaggttcttaaggtctggtacaaacatttcagttttttattgaacataacatacatataagaaatatatatatatacacatacacacaaacacacacatgctatgtatatattatgacttgataacttcactaactgatcacactgtgtaattaggacccagatcaagacacaatattaccagcatcccagaagccacatggagctcaattccaggccctgctcacttccccctccttgcctatctacccaaaatggtcaccacagtcctgatgtctagcagcaatatttctttttccaggttttgtgctttatatgaacagaatcacatactcttgcatctggtttctttccctcaatattatgtttatgagattcacgtgtattgttgtatatggctgtagtttgtcatcattgctgtatagtcattcattgtatggatatgtcataatttactggtgtagggcacttggagaatgtattagtctgctcgggcttctgtaacaaaataccacagactgggtggcttaattaactgaaattcgcatttgcatagttctcaaggctagaagttccagaacaggacacaatgagaaggcagcagtctgcaaacaaggaggagagccctcaccaggaaatcagtcagcttaatcaactaaaatttgcatttgcatagttctctaggctataagttccagaacaggacacagtgagaaggcagcagtctgcaaacaaggaagagaggcctcaccaggaaatgagtcagcttaatcaactgaaatttgcatttgcaaaaaaggaagagagccctcaccaggaaatgagtcagcttaatcaactaaaatttgcgtttgcatagttctctagactagaagttccagaccaggacacagtgaggaggcagcagtctgcaaacaaggaagagaggcctcaccaggaaatgagtcagcttaatcaactaaaatttgcgtttgcatagttctctaggctataagttccagaccaggacacagtgaggaggcagcagtctgcaaacaaggaagagaggcctcaccaggaaatgagtcagcttaatcaactgaaatttgcatttgcatagttctctaggttagaagttccagaccaggacacagtgaggaggcagcagtctgcaaacaaggaagagagccctcaccaggaaatgagtcagcttaatcaactgaaattcgcatttgcatagttctcgaggctagaagttccagaccaggacacagtgaggaggcagcagtctgcaaccaaggaagagagcccccaccaggaaatgagtcagtttaatcaactaaaatttgyatttgcatagttctctaggctataagttccagaacaggacacagtgagaaggcagcagcctacaaacaaggaagagaaccctcaccaggaaatgagtcagcttaatcaactgaaattcgcatttgcatagttctcgaggctagaagttccagaccaggacacagtgaggaggcagcagtctgcaaacaaggaagagagccctcaccaggaaatcagtcagctgttctcatttaatgttctcactttagaagatcatgcaagggacaaaatctccagaatctttcctgggcggggtcacagctggggtgggaaagttgtagcccctctgaaacttcccgcatagctgtccttctatggaggccaggagcgcatcggggaaggtacagtccacagtccccctccatcccaccagtcaggctccaaggggtcttcacatccacaaaacaccattttcatagatcaatagcacacacaccaagatgcgcaaattcaaaccagatacccaaatggcactcacttattgaatttgcaaggatttttaccactactcttttggtggtagtgcctagtggcaagaatatagaaaaccaggaagtattcagcactgatgtgacagatcagtagctcctgggatttgggcagaattttgtgcagtccagctttttggagaagcttatgtcatttacgcttgctgagtcctgtgtaagccccaaagccaagctttcacaagctaggacttaggcagctttgaaaaggagaagtttatcttctaccctctcaaagagggtgtaggaggttccccttgagagtaaccactggtccctccagatggcttggctgcttctgccaggctctactttcagaaatgcccttcattgtgcaattatcagaattaaagcctttcagtgtctcctcattgtccagggatgaagtctgttctccttggcttggcattgaagctctctgtcctccattcccccttccattgcaactggcctccccaagaagcccctgaatctgccttgttccaatgctaatttcttctctgcctctccaaattttgcccatctctcaatacctggtaccatcaagagtcatcacagctttgggcattaacatatatgaatattgatagttctcagggcaagaaaacacacagaacatgcatctctatggaggccactctattcacctggatgcttataatgtaatctgtagtttgagtttccagggctctttccagattataattcaatcttcacttttctgtgtctaaatttttacattgctttctgaatcatcttttttcccattttattcttaacaggctaaaggaaggcttaatagagtagccctaatgaataggatctgggtttataatcgggcttttgtgatttgaatcaaagaaatgcaaaaacttagtgtttatcagagtgtgctgcacttattcctggagttatgcaagatcattttagatggcacacaaactaaaaaccacttatagaatggctgtttatttattttgctgtgtattagggaaaaaacccttactatcaagtccatggtttaatggatattacctgtgacaacgattgctggcagtctgttaaaatctgtcccaccttccttggtacacagccagattacattttccagccttcattgcaattagattgaacacgtgaataagttctcaccaatgtcctctgagtgggagtggagagtgccacagccaggcctggcccatacaaatgctccatggtcacacttctgctcctgcctcttccaggtgacaggcaattgacacctatggcaactttagaaaccatgagtgaaggaaggcaaagccaccatagcctagatcaggactgagtaaactacagcctgagggccaaatctggcctactgtctttttaaaaataaagttttattgaagcacagtcatgcccattggcgtaggtattgtttatgggccgccttactaccacagcagtcgccacagacagcccatggcctgcaaagtccaaagtccttactctctggccctttatagagaaagtttgctgatatcctaattttgatctctgaatgaccatatggacaacagccaccttgttgacctgaacaacgttctagtcctttacctatgcgaaaaataagccgttgaaattctgggcctatttgctaccatagtttaccctactctcactaataattcttgctcagcagtcacagggtgattgactgatgaatgtacatggcccgatttccggttgtttgcgccattgagggtgactagttatgcccatgggagtacagctctctcctctaagacccaccaccaggccaaaatttcttccagatgctctgaccagttagtcctaggacctgattgaccccaggtagtctgaccccctaaatataacatagcatcatgggcctgggaaggtgtaaacataatacaatttctgcccattgaactgaatgttaacaggaagacattccctgaagcagaagaaaatgaccttggtgatgatgacccttgccaaaggtaggtgacccttgccaaaggtagttaacccttgccttgtcacctacctggtggtcctgatggtgatcagttctttcatgtaactaactggccttcaatggttcacttttcccattgagtgacttttttcaattatatgcttttgtaaattagaagtgtttttactggcatttctttatgcacgtttttatttttaccatcattttaatttaaaaaatgcagttacacattttccatgcatacctctaatttatggcagg

SEQ ID NO: 94100 - DNA, 35015 bp, Homo sapiens
  misc_feature (1)...(35015): n = A,T,C or G
ttaaagcctttcagtgtctcttcattgtccagggatgaagtctgttgtccttggcttggcattgaagctctctgtcctccattcacccttccattgcaactggcctccccaagaagcccctgaatctgccttgttccaatgctaatttcttctctgcctccccaaattttgtccatctctcaatacccgctaccatcaagagtcatcacagttatgggcattaacatatatgaatattgatagttctcagggcaagaaaacacacagaacatgcctctccatggaggccactctattcacctggatgtttataatgtaatctatagtttgactttacagggctctttccagattataattcaatcttcacttttctgtgtctaaatttttacattgctttctgaatcatcttttttcccattttattcttaacaggctaaaggaaggcttaataaagtagagctaatgaataggatctgggtttataatcaggcttttgtgatttgaatcaaagaaatgcaaaaacttcgtgtttatcagagtgtggtacacttattcctggagttatgcaagatcattttagatggcacacaaactaaaaaccacttatagaatggctgtttatttattttgctgtgtattagggaaaaaacccttactatcaagtccatggtttaatggatattacctgtgacaaggattgctggcagtctgttaaaatctgtcccaccttccttggtacacagccagattacattttccagccttcgttgcaattagattgaacatgtgaataagttctcaccaatgtcctctgagtgggagtggagagtgccacagccaggcctggcccatacaaatgctccatggtcacacttctgctcctrcctcttccaggtgacaggcaattgacacctatggcaactttagaaaccatgagtgaaggaaggcaaagccaccatagcttagatcaggactgagtaaactacagcctgagggccaaatctggcctactgtctttttaaaaataaagttttattgaagcacagccatgcccatttgcataggtattgtttatgggccacctgactaccacagcagttgccacagacagcccatggcctgcaaagcccaaagtacttactatctggccctttatagagaaagtttgccaataccctaatttcgatctctgaatgaccatatggaggacagccaccttgtggacctgaacaacactctagtcctttacgtaattgaaaaataaggcgttgaaattctgggcctatttgctaccatagtttatcctactctcccttataattcttgctcagcagtcacagggtgattgcctgatgaatgtacatggcccgatttccggttgtttgcgccattgagggtgactagttatgcccatgggagtacagctccttcctctatgacccacgaccaggccaaaatttcttccagatgctctgaccagttagtcctaggacctgattgaccccagggagtctgacccctaagtataacacagcatcgtggtcctgggaaggtgtaaacataatacaatttctgcccattgaaccgaatgttaacaggaagacgttccctgaagcagaagaaaatgaccttggtgacgatgatccttgccaaaggtaggtacccttgccttgtcacctacctggtggtcatgacggcgatcaaggctggccctgctttcatgtaactaactggccttcaatggttcacttttcccattgagtgacttttttcagttatacacttctgtaaaccagaagtgtttttactggcttttctttatgtaagtttttatttttaccatcgttttaatttaaaaaatgcagtcacacattttccatgcatacctctaatttatggcaggttatacaggtcttgcagttatggaaatggtataaagtctcctttttgagtgagcatgttaaagtaaaaagagtgcttcatttaaagaaaactgttcatagaagtacagacgatatgctgatgaggcaaaaaaccatgatattagtgtgagaataagtgaggttccagaaacactgcatatgcccaggctgcagtggagaatgtcgtagaatcctggattcatagagtgtggagccacggtgaagggtgcatgagagagcccctcccccagagccaccccctgcctttccacaaggaattcccaaatgtcacccagtggattctcagacttctgtctcccagttcagtgttctccaccacaaaatctgcacctgatcaatcccatggttcagagacaaagctgagtgaggggcccagcaggacatgggcttgctgtgcccaatgcctgctctaatacgagctttccatatatctgctgagtaaactgatggaggtggagaggtttgggggagttcatttgaagcccccagatatgctcactctcccaagtcctaccccctgcttagaagttaaggccagttcctcggattttactttccacatcatatagttccacatgggaaaccagagggtgttccccagggaaaacaataatatcccccccgccccccaccaaccaactgccacttaaacaagagacgtattgcttacagctgaagtgttgcaggggagttatatgtattaagcaaaaattagatctattgtaaggcttggtaggctccagcctcacccatcacaatctgcagagtcatcatgaagcagaaaaaggtgtcagaggctgcagccagacccaggcaaaacctaggagtggccaaaaaattctgtttgcacaattggctggtgtcacaagcgggcatgtgattgagcagtggttcaggagaagaactaatccttatcttttatattttgtgaacacagcaccacaaaatcttcataggccaagagccagggctgtttcccaggttgcaaaggtcagctgactagggcaacagggcaggatggttaacaggcacgcgcatgcgtgcacatgtgtgtgtgtgtgtgtgttgtgctgagtgagtgggactagccttgctttctatttaggaggacctcccaatttgtcccttgtggatagagatagggatgctttttattagcatgcagtttatcagccagatttctgtcctggataaaagtaagggaggaaccctaaagctcaggtcaacctttgtagagtcagttagctctggggactgattctcatgctgtcagagcatcctcattcccatcacagaatgcccctcaccagcctgcacgtggctagaatgagtgctaatgagcatgcctttttgaatttgggtctccagaagtttcatttcagctacaactcatggccttgggcaagaatccatcagcagctctgggactgtcatgtgatttatggctgctggttgcccaatctttcctgatgtcaatagtggtctggcctggacaagggcaggcttgccaagtgacattgggaaaatagaacatagctccccaggtacctggtacatggctcccatctttgtcccttccttccttccttccttccttccttccttccttccttcctctctctttctttctttgtctctctctgtctttcttcttcttcttcctcttcttctttcttccctccttctccttcttctccttcctctttttcttcttcttcctttctccttattcttgtagagatagggtcttactatgtttcccaggttggtcttgaactcctctctcaagcaatcttcccaccttggcttgccaaagtgctaggattaccgagcgggaagggttgccacagtgcccagcctcccctggctatttctatcccttcagccctaccatgctaagcctgggtcaatgagctgacaaggcaatttgccttagataaggctactgattagaatatcttcctgatgtacaaaagcaagagaaatggctgccagccaccctgtgctggaaggcagaagcctcaagttctggttctgactttgccattgagttgctgtgtgaccttaggcaatccctcctcatctctgggccttagtttcttttgggaataaataacggaattgagttgagcctatgtattagtctacttaggctgccagaagaaaatatcacagactgggtggcttaaacaacagaaatcaatttaagatcgtgagacagcattaatctcacggggttattttgagaactgagatcctgcatacaaaactctcggcatagtgtttgccacacagtaagctctcagtaaatatttgtcaatgaatgtatgaaggaataaaagtggaaaatgcaaataagtgaaacactgacaagattacagccaggaaatggctgttgtaattctaattagatatatagccttccaatattttcccatgcaaataaagacatatgttactaccaaaacgggaccatattatacctatctagattttcaaaaatatttcattattttattgaaatataagtcacatgtcataaagtttacctttttaaagtgtacaatctagtggtgtttagtatattcccaaagttgcactaacatcatcactatttaatcccaggacatttttaccacccccaagataaaactcatgcccattagcagtcactcctcatccccgtctctttccccttccccagaccctgtcaaacactttctgtctccatggatttgactattttggaaattacatataaaaagcatcatacgacatgtggccttttgtggctggcttctttcctttaccatgatgttttccagcttcatccacgttgtagcatgttcttcttatggctggatgatatgcctctgcacgcatacaccacacttcatttacacattcatcaggtcatggacatgcgggttgtgcccactttttgactaggatgaatgacactgctctttgtgtacaagcttttgtgtggacatgctttcagttctcttcggtagacacctaggaggggaattgctgggtcatatggaaactctgtgttgaactttttgaggaactgcctacaccgcacaacagtttataacctgttattttctcctttcacaacgcatcctgtcttcattgttaataaatagctgtgcacatcactattttgagtgaatacatcgtatttccttagccagcggtaccacagtgtgtttagtgaattccctattgttggacatttaataatcccatgaaagaggctttgagtgacttccttgtgtccccagcagcttgtaaatgacagttttccaggtgtgcccacagcactctgtatccccttaatttggtgatttcacattgccttgacatcacccctactgctcctccaccccatctgtcttgtctacaatggtgagccccttgagaagctgaaccatgtcttgaattggtctttgtatccattatacatggccaggtgccaagcattttggtaaatgttcacaaaatggatgggtacttggatggatggatgataacagccagggactatggggggacggagttcatttttacattctgtccaaaaatccctgctttggaaagtagtgagttctctgacaccgatggtgtgtgacaggaggctggaccagttggcaggatattgtgaagctaattcaggcctcagaaaggggactcgatgaaatttaagatcgcttccaagcttgagagcctggaaagctatgaaaacacaagccctgggagctgagatatgtcctaacttacccagctgagctgtgaggtgtgagtggctctaacattttccagttgtttctgaggacctcagatcaaagcttccctttgcctaaaagcatctgcctgctggtgtgggcccttgggggccgtcacagtgcactgaggttagagtcctgcaagggtgaacccttatgtaacaagtagttgggcaagtttacagctctctgtaatctgacagtagagtccagactggtttgatgaaagagggtaaactgtgggtgggcgtggcctgaggccccactagaagcccagggagatctgaggaaagggagggcttttctgatctctcccaattagaggattaggcaattggcagcgcagggcggtaactctgggcggggctgggctccagggctggacagcacagtccctctgagctgcacggagacctcgcaggcccccggaactgtcgcccttccaggatgtggctccctgctcttgtcctggccactctcgctgcttccgcggcttggggtgagtccttctgaagtcaaatatgcggggcactttttgaaatccttgttctgggccgaggtgggcgcagatgcgtagaaaggcaaagacacaacaggtccggctctgcggcggggcacgacttccatattaggacttggacttggagcagctgagcccggccagcctggcccgcgcggagacgcagggagggtgaacatcctgagatcgccctgtactgctcgcccaaatgcaggccgacagccggcccacctcaggccgcacacacgagaaatttaggcagctcagtttgctgtcccttaattagtccccttacggctggatcacggagagcggctcaacataatattaagagcatcgactctggagccagagtgcgtgggttcgagtccccgctgggcgcttcctcgctgtgtgtccttaggcaagggactgcgctattccgtgcttgggttaccccctctctgaaacagaggtggcagtgctgcctacctcactgggctttggtgaggaggaaatgggtggctgtttctaaagcrctcttggcagcgcctggtatgtagaaagcacgaaaaagggrtggataaataaaggcgctgtttaaaaacgtagtgtatgaatagaaaatttgagctgtggtcaggccactatatcaggacctcttgccattaaaaagacagtttcttactcatgttctcaacaggagggggacaccagtgcgcggggcacaaggggaagcagcagagcctggggaggggacagggcggatctgaggccaaggggcttttactgtggcttccaaggatagaagaggaaaggcagggcaggcaggctgaggactggcaagttgggatacttcaggggctctggggcacaggggctgttcctaattgttttgtacctagccctggcatgattagggcaggtgggtagtggccagggcatggcaacccgatcaaagaggcagttggrgtgtgggctctggggtggctggaccctgggagggagtttctccaaggtcaacaaggcctcagatgccagagcatcagaatacagaaarcaaaacacatggtacatagaggggtgcagcgaggggcctcgaaatacccccatgccattttatagacagagaaactgagactcacacagggaaatgtacttgcccagggtcaacccgaaaatcacgcctaggtctgtctctgggtcctgaatcctgacagcccagccccgtctgcatcctgtcttccttctggcagcctgacactgygggagctctggaactgtggggaagggcagagaagagaggaagcctatttggaactgaatgttcctttacctctggttactcctggcaatgccatccatttccttccttaggaagaccatacaggctgcctccacttcctcagtttcctcctctgtaaaatgggcatgttgatgcctacccagcaaggcttatttgaagattaatttaaaaaactggaatgcatgcctggcacatagtaggtgcccaccatgttcgtgcttcatataacatcagcagcaactggtcttgttctcacacttgtttctgcctccccccattcacccactttttcacccttggcaatctggctgccatccacctcatcctgttgaagggaatccctgagctgagcatgaccagcccagtggtttcttctctgacttgactctcctccacctccctgaagtcctcagcaatcttagctggttcctcgccctcttgctccctgggcttcaaagacatgggaacgttctctctcccctattctgatggatctttggtcttggccgtagtggtccctgtgtttgacctttgtttttttttctcttccctctcacactggcatcttcaatgaagccatacacatccaccgtatgtaccctcacagtccaggagaagattctgccctgctccctcaccaggcttccttccagctttgaagtgcgctcatcctgtggcatcatcttgcctggatatcccactcacatctccaccgagcctgtgtaaacagggatccagcattacaagccannnnnnnnnnnnnnnnnnnnnnnnnnnnnnnnnnnnnnnnnnnnnnnnnnnnnnnnnnnnnnnnnnnnnnnnnnnnnnnnnnnnnnnnnnnnnnnnnnnnnnnnnnnnnnnnnnnnnnnnnnnnnnnnnnnnnnnnnnnnnnnnnnnnnnnnnnnnnnnnnnnnnnnnnnnnnnnnnnnnnnnnnnnnnnnnnnnnnnnnnnnnnnnnnnnnnnnnnnnnnnnnnnnnnnnnnnnnnnnnnnnnnnnnnnnnnnnnnnnnnnnnnnnnnnnnnnnnnnnnnnnnnnnnnnnnnnnnnnnnnnnnnnnnnnnnnnnnnnnnnnnnnnnnnnnnnnnnnnnnnnnnnnnnnnnnnnnnnnnnnnnnnnnnnnnnnnnnnnnnnnnnnnnnnnnnnnnnnnnnnnnnnnnnnnnnnnnnnnnnnnnnnnnnnnnnnnnnnnnnnnnnnnnnnnnnnnnnnnnnnnnnnnnnnnnnnnnnnnnnnnnnnnnnnnnnnnnnnnnnnnnnnnnnnnnnnnnnnnnnnnnnnnnnnnnnnnnnnnnnnnnnnnnnnnnnnnnnnnnnnnnnnnnnnnnnnnnnnnnnnnnnnnnnnnnnnnnnnnnnnnnnnnnnnnnnnnnnnnnnnnnnnnnnnnnnnnnnnnnnnnnnnnnnnnnnnnnnnnnnnnnnnnnnnnnnnnnnnnnnnnnnnnnnnnnnnnnnnnnnnnnnnnnnnnnnnnnnnnnnnnnnnnnnnnnnnnnnnnnnnnnnnnnnnnnnnnnnnnnnnnnnnnnnnnnnnnnnnnnnnnnnnnnnnnnnnnnnnnnnnnnnnnnnnnnnnnnnnnnnnnnnnnnnnnnnnnnnnnnnnnnnnnnnnnnnnnnnnnnnnnnnnnnnnnnnnnnnnnnnnnnnnnnnnnnnnnnnnnnnnnnnnnnnnnnnnnnnnnnnnnnnnnnnnnnnnnnnnnnnnnnnnnnnnnnnnnnnnnnnnnnnnnnnnnnnnnnnnnnnnnnnnnnnnnnnnnnnnnnnnnnnnnnnnnnnnnnnnnnnnnnnnnnnnnnnnnnnnnnnnnnnnnnnnnnnnnnnnnnnnnnnnnnnnnnnnnnnnnnnnnnnnnnnnnnnnnnnnnnnnnnnnnnnnnnnnnnnnnnnnnnnnnnnnnnnnnnnnnnnnnnnnnnnnnnnnnnnnnnnnnnnnnnnnnnnnnnnnnnnnnnnnnnnnnnnnnnnnnnnnnnnnnnnnnnnnnnnnnnnnnnnnnnnnnnnnnnnnnnnnnnnnnnnnnnnnnnnnnnnnnnnnnnnnnnnnnnnnnnnnnnnnnnnnnnnnnnnnnnnnnnnnnnnnnnnnnnnnnnnnnnnnnnnnnnnnnnnnnnnnnnnnnnnnnnnnnnnnnnnnnnnnnnnnnnnnnnnnnnnnnnnnnnnnnnnnnnnnnnnnnnnnnnnnnnnnnnnnnnnnnnnnnnnnnnnnnnnnnnnnnnnnnnnnnnnnnnnnnnnnnnnnnnnnnnnnnnnnnnnnnnnnnnnnnnnnnnnnnnnnnnnnnnnnnnnnnnnnnnnnnnnnnnnnnnnnnnnnnnnnnnnnnnnnnnnnnnnnnnnnnnnnnnnnnnnnnnnnnnnnnnnnnnnnnnnnnnnnnnnnnnnnnnnnnnnnnnnnnnnnnnnnnnnnnnnnnnnnnnnnnnnnnnnnnnnnnnnnnnnnntcccttctctctgctgtgtaccactctctgcttctcatctcccctcattcagtcctcccctgccgcaagtcccagctcctccatgatgcccgcaatcagaaggccttgccccctcttctaattcctagactgccttatgggtacctctcccaggacatggccacttccttcccagctgtagccccaggtgtatatgtgacccttccctataatggtcagtgcttgtgagaatatgggacacccctttttcatcctctcatccagcatgcggctcagtgccaggattctaatggataaatgtttccagagacttctaagggggaagctaaatgtcttgttctttcctagtagctctccttcttgcatttatttttagctggatgtttttatgcctccaattctagtttgcccattaaaccagctcaatgggttagggaggacattgatcgtcatccctattgtacatcaasagaaactgaggcctagagggtttaggtgacttatttaaggtcactcacttagawagyggcaaactccacctggaatctgggtccagccttttgcctctgatgcatcctgatttmttctccatgtccagcagggcatccgtcctcgccacctgtggtggacaccgtgcatggcaaagtgytggggaagttcgtcagcttagaaggatttgcacagcctgtggccrttttcctgggaatcccttttgscaagccgcctcttggacccctgaggtttactccaccgcagcctgcagaaccatggarctttgtgaagaatgccacctcgtaccctcctatgtaagctgcggcatgtgtccttggggatgtttacctcaaagtgatgcaggaaggagtcaaggcagtcccctgaygggctgatcctttgctctggactccttaagatctttgtagatccttaagaacattccagaactctcacagcattctggagtccattatttaacacatgtttattgagcacctgctgtgtgccaggcgtgttctgggttcttgggatccattagtgaaaaagcaaagatccctaggttcctggagcgtgcattctagcagggggagacagataagaacaatatgcaaattactccgtggattatgtgatatgatagaacaggaaaagtgccttggaaacaaagaagcagttaagcaggtgagggagatcagaaggaaggatcccatgawttctgctgtcttgaattttgacatagtcggggagaggagtgggccaggaggtgtgtgggtggcaagtgtactgaggtgtccactcggcaagtgctcaactctcaggtgtgcctattcctgaggagaacaatggaaggtgtgtccattcaccctggccaagctgggaagaaaagcccaaaggttctaattggcctcaccatcactccccagggtaggaaggaccctacagacatcagagcagaccctgctcatctcagcagccaggtgttcggaggctttccagcagcccaccagtggccgccttcttttcttcccttttttaaaaaataatgtttactgtttttattttctgagtgcaaatgtaatatatacttattacagaaaatttaggaaatacagagaaaggaaagtaagaaaattaagatcacatacaatattccaccacccagagagaacaactatcagtattttagatggtaaagyattatgatgtaatatattgtttgtattccagtttttttgcctgttgatatactttctttctttaaaagggaatgctatattgagataatttggatgcctgctttgctcatttataagtatatcatgagcataattccatgccattaaatagcacagcctggtattaaaagctgcattacattgggtattgaaccataattaatttccccaagcttttatttggggtcattaagttatatatgatgtttttaataatataacatcatgaatgtgaaacatttatgcacattcatgaatagtttaggataacttctcagaaatgacatttctgagtcaaagagtatatatttcttgtttgatttccctcccaaaatattccaactacactcctcccattgaygtatgaacatctccatttggcagactcttggcaatgcttgggattattaaaaatatttttggctattgtataggcaaaataataataacaataccagcaatattattttcctctttaatttgcatttatctgaagaccagtgagttcttttttcctttcttcacattggaatgtattattattattattattattattattattgttattcctcttgcacttggtgatcttaggaaaatttcccaggatggaatcaagaagtcatctttgctggctctgattctgtcacttgagagctgtgtcatcccagagtctgagtgcctcagtttcctcatgtacctagtgggggcggtgatgactgccttttggtacattgaggtctgggactgttgcttataatatacttgtgtataagcaccacatggcatggatctacctggctatgtaaccttggtcaggttctctaacctgcctaggcttcagttttctcatctgtaaaatggagataatagaacctacctaatgggactagtctgaggcttaaatgagttaatatacaaaaggtacttaaaacagtgcctggaacactgggagaactaaataactattaccagtgttyatctatgttgcatccttgagatctttcatcagggcaacacaacagcaactgcctgggagaggcaggtggtagaatcttggcatgtcagggctgcaagactcatgtagaaatcactccgctcacttagacctggcggattgggacgcagagtgtaaaaggaattcacccaaggtcaccccataaatgcatgggagagacaaaactagagcacaattctcctgatgttgtcccacaaagatatcacccctgagctattgtgagaaatgtcacctcccagggaggatcagtgtattagtggtctcccctccttgatgctgggagttccaaaggctctggaaagggaagaggtgtgaagcccttctcactctgcttggtcttaggagaccttagtgagtcccagcgcccccacctgaagcccctgatagcctcctacccactacaatgtcgtgagtctgtaactatcaagtccatttccaggcttaaacctcccagtccaaggcgctgccgtagaaaacacctcgcttagatctggctgaacttcaggggttcttcyttccccctccccaggtkcacccaagatcccaaggcggggcagttamtctcagagctatttacaaacygaaargagaacattcctctcaagctttctgaagactgtctttacctcaatatttacactcctgctgacttgaccaagaaaaacaggctgccggtaagttgtgggacccyctggtcaaggcgtgtcagtgccagtaccccgcatcttctggggcagaatggaagggagtgaaggcagcttggggagggagctgcayaggccaggattgtttcagagaccccagggcctccacaggaaacactggttttccacacatcagtttaccctcgtgacataggcactctgggggagtttgttttgcatctttaatgaacatcttaattgttccaagttccctcatgctaatagaaggatgagaatgattacttttagttactagattaaaaatctgataccaagattgggtaagacatgattttcaatgttagtggtggaaagaacttagagaaaagccaacaccccaactcttccttttcaaatagagaaactgaggcccagacagggaaggggaggtcacccagtagggtagttttggctcaagtcttctgatcttcacatcagtgcttttgacatggagtagggcattgagcttgtatgtggcctttctccagcacagcaacattcatctggggtaactttcactgtccaggtacggatgttgggggcggagcctggacaatcccagaagctcttccttttgcctttggccaaatagctgggatttctttttgtacctaatttccctccctaattgtcttggcaaaggctgatgacccagtgagtcagaatttcccaaataaatgaagggcaggacatggggcagcccgccagctgcaggttggagggtggggagggtctgctggcaaaggaggcacccagggtgaaaaaacaaggggtgttgtgtctagccagtctcccaggggcaccgtggcatggtgcctaggagtgggggagcaggtctgcgaacgtggaactagaagttggtcctacatgtgctttgtgagacacaggaagtgagagaaaggtttactcattcattcattcattcattcattcattcattcattcttctattgtgtactcagtgccccatatacacagttagacctggggcttcagggaaaggaggaacatgaatccactccacacagcccctgccttcaaggatcttgccttctgggctgtagagacatatcctcccttcagcactttattgcaggccagccctcaggctcagtcttcacacaaagatgaatgcacactcaatccctccccaggaggcaggcagggattagagttgtgggagaaacaagggctctgggaacctggagtcaggagaacctccaggaatggccacaggctctagaactacacggtctgggtttaaatcctggttctgcttttgactagctgagagacttgggagtttcttaacttctctaagcctctgtttcctcaaaatgggaatcatcacatatgatcagtcaagggtgaccactaagcgtgatctcagtccctggctaaaaaggcagaggcaggctcatacccctgccctaacagtggactcactgcactgtggccggcgcctgcagtgtgctgggcagctcaacatgtggactctggaggcagactgcctgggttaaagtcctgctgctaccacttttgagttgtaggaccttgggcaggttaagtgcctccattttcccacctggataatgggacattatyagtacctacccaatgtatagtttattttactgtgcttagaacagcacttgggacatagtttatgttacgagttcttttatatttcatgaataatattattacaatatcattattttagccactctcacttcttccccactatgtggacttttaaaatgcaagaatcatgcatgaggaattgtatccactctcatcctccagtattagcagagtccctggcacatgctaagttctcgacagtgttagtccattgactgaaggcatcctgaagtgggtgggttttaggctgggttctgcagggtggataggatttggggatgcagaggcataaggaggcatttgaggaagagacaccatcacaggcacgtgtgcttctcgagacaatcattcatgcacagagaagtttacttcaccaagagatagttaactgagatgaagctgagatacaagggctgccccatgggtacgctgagtgcatgaatagtcyaggyttgagggtgatgggagtgwcctcccgaagaggacatccttagcctttgctatgcccatgatgatgttctcagcatcaagagcctttcggggaggaggcactggaggctgggtagaaaggaagggacagccagggtatgtgcagtagggtggtggcttgggtcccagttgggagaattatgcaggagagagattgccttttgcaaagttgctgggagctggtgaactttggatagcatcctccttcagttgtaaccaacaggtaggtcaccaaacaagacatcttctgagtgctccctggctctgtgtcctgtaactggtatgttgcttcctctctgcccaggtgatggtgtggatccacggaggggggctgatggtgggtgcggcatcaacctatgatgggctggcccttgctgcccatgaaaacgtggtggtggtgaccattcaatatcgcctgggcatctggggattcttcaggtaagaaatyggactctcctcactgcactttggcccccagaacgaggatgctaggacccagctctkgtcatgccagccctcaggggagcttagctaggttccacagtaaggcatccaagccccttcgtaattggacactacctaccctctcactacccagccactcatccacttgcctctgagcttttgcatgtgctgttccctctgcctggaatgcttattctatccgaagaacacctcttcatcctgcaagacccagcccccagttacctccactgaaagactcatctcctcttcacctatgtttctccagcacattgcttttctctgtcatgacacttagcagtcagcccagcaggtgaaggttgacacatctgacttctcatggaaaggagggaaggggcagagtcacagagggagctcagggcatgttgtgggtgaaggaatgggggctgcagatggtggggtgtgggagcatctgaccccttcctgtgggagtgttgggacccactcagctcattttctgcttgaaatttggcaagtgtgggaagcaaggatggagtcttcccatcaggtctccatggggacaggagtcagatctccttcaaggcgcaactgctatgaaccttttctaaggttctcctccatccatgccagtcaggtttcttcctgaacacgccactcagttggtctcattgcggtcatcaatgacctccccctgctctccacccaacctctcaggacytcccagcagcagcagatggccactcagcctctgtgacatgcttccttcccagcccctttcctggtcctccctcctccctgtccacaggcctctcttgtctccctctccctccttactaattcccagtgatcccagggagcagccagagcccctgtttccagcccacctcacctttgaagcccacaggcatcactcactccctcctccccacccctggctgtctaaagggtgccccactcttcccagggacaagttgaatccttgactcccactgcccctccccaacagagacccccttctcctcccaccacgcctccactcagcttctgctgccacatcctcccttgggctcaggagaaggccttgtggacagcccggactgtctcttttctcacaaccctcttggctgcgccttcagaatccactcagagtcccctactttgcacctcttccctggctcctagcccagccaaagctctctgtctgtcaccttgattatgawctttaacactttcagatccctgccacttttatataaagctgagttgcacagtagccagagtgatcacttaacacatgcattgaatcatgcgatgcctctgcacaaaaccctgcaggggcttcccatgctccttaccatgacagccgaagttcttgccaggccccagggccctctctagctgcacctcctgactcacactttctttcactgggccccaggccctttgcacttgctttttcttctgcctggaattcctttctttggatatttacaaggttcatgtgctcattgtgcttgttttatgaaggtctttgcctccaaaacctcaaatgtcactgcctccaaaaagccttccctgattgggatctgaaatggcaccccctgtcccactcctgtttttttccttactccattgtatttacctcagtgcactttgactacctgacatcattatattctctctatgtatctgtttatctgcttgtgatctgtagtgggaattcagtgtcatcacaggttttgcctgttttgctctcagatgtgctctagctcataagacagcrtcaggcatacagtagatgctcagtaaatagttgccagttgtgtgaatgtagaaccatacatcaccacaatgctgtactaatgaaagcagggtctcagagatgctgaagcccagccttattcttaagggttcactgagaacccctagccccatctgtggtcctgaaggtcctgcatgacatctctgctccccwccctcaacctgttctcttcctcacagcacaggggatgaacacagccgggggaactggggtcacctggaccaggtggctgccctgcrctgggtccaggamaacattgccagctttggagggaacccaggctctgtgaccatctttggagagtcagcgggaggagaaagtgtctctgttcttgtgagttttcctgtcaccaggcccaaccccasgcttgatgtgatgctgatgagacctcttggacacctgtcaatccagctatggatacctctgattacaatacctgaattcaggactggccctactcacagcccagcatcagggggtagaaagctaaagaccagctctccttggcccccaggaagctcagagctcagcttagtgtcctggggccatatgaatctccagttgcagcctgcaatggtggcattctcctcttccagcttggttgagctctctctctctctctctctttctctctctccttcmcactcattttaacataaggactcacatcccttctcttgggaagtaggaataggcataaattatgagtaagggcaggcagagagaagaggtggacagaggtcattgtttggctaaaccagacctacatgtggaggggacatggacactgagcaggctgggaattcctctggggtggtctgatggcttgtccatgcccaagaaggaggcgacagtctttgtgactgtggggtccagtgggctaggggaggcaggcagaggaaggagggatggagccgcggatagggagggatggggcaggggttgtgggtcatagacacaaccttgggtgtgaggggtcctgctgggattggggattgggttcaggagacactgggggatctgggatgaaaacccagatgagaggtgctgggagctgtaggaagacttccacctccttgaggtgggcagagggtcagcccactactggattcctcagtcccgtgttggttttatagtggrgtagatctagcctggaakagygagtgagtcactgaccccactcctgagcatgaactctccwcccctccactctgctgtcaggttttgtctccattggccaagaacctcttccaccgggccatttctgagagtggcgtggccctcacttctgttctggtgaagaaaggtgatgtcaagcccttggctgaggtaggtctccggctggtasgtctcyggctggacacccmcacctccttggctctatgctcctgaatcctcrgggatctctcttgtggtcggttgtagctaatgttctcctagaatcactgaggcaccaatggctgagcaggaagggcgaggagacaccttgatcagcgtcccagtttcacagccaggcaaaccgacacagggcttggaagggatttgccaagggcagcaggtgatcagggcagagctgggactccagctcatggccctagcagccagtacagtgccctrtctgtgaccacactccwcctatgtgccagggcctggtgccatgttgggcagtgatggtgtcttgtgtctctcwgggtctgcctaatggctggtaagtggaacaaccaggatttgaaagcagacaaggaaattcaggattccatgctctctatcccagctccacctcacatttcttgacacattcaccttgagatgattatgtccatttcaatggagataaggtagcagagatgagagattacataattgacccatgttacaattgagattagtaacagaggcaacgctccgtgggacctggaacccacacccacgggtctacagtatcttctgctgctccctgccactagtacaagttgggcttgggatagaatgccactttcctctttgatggagggaagggatgtcgctcttgaactctgttgttgcctgtgatctttgcagcaaattgctatcactgctgggtgcaaaaccaccacctctgctgtcatggttcactgcctgcgacagaagacggaagaggagctcttggagacgacattgaaaatggtaggttgcctgttcccgtagcccaaaccctgtaaacttggtcccagacttcttcatttcagctgtcctcttgcccagggacagtttcctgggacaatttctcaactctcagtatctgaatggggaatmtgatttgtccttttttattgtaaaatgccacaaatgtaaaaaaagaaagtcaaaaaataacatgataaaaaattgtgtaacaatccccagtcctgaccaaaatttaatattttgccattcttgttttcagatgtatttttaagaaattaaatgttacatattcccaggggacaccatcatcctgaatttgggggatggagatattaagctcaaagattttcagaaagatgtcacaatttatcttggttgacttagaaaytgtctgtattagacctagtggtggtccagttttctagattttctgagactgactcagttgtcatcctaggatagtcatccatccacccattcgttaatccgtctatctatgattgtcttatccatctatctgttcactaattcatccaattcactcatatctttttatcaatctaatgtcaacctattcataactttgtatttatctattttcaatccattcaccattcatggatcatccagccaccttatatctcaactccatcacccattcctccaaaatcaacaatccaattatcgcctgtctgctagttttcacccatctattcatgtatccattcaattcaactgtactccatgtattgaccaactccatccatccctccattgatccatccatccatccatgctaaatatgtaggggtgggtgttagaggtagcaaaacagacatgaagtggacatagtccctgctctcaaggaactatccaaagagaaatacattcatatacttcgcaggttgagtatggtggcagcacagaggggaagcattcattgtagtaatcagggatgcttcacagagaaggcggaggagccagatttgagaccagacagtggaattcaggagttcatgcccttaatcctgactccaccttatctttcctgagaaattcagctttcagatcattgtgcccattttaacagaggtaacaaagacagataaattttgtaattgccccatgtcacagttcaaattagtcacagaggcaacactgtaggacccagaaccgacacctgcgggtctagagtatcttctgccttccctgctccctgccatcctcacatattaggacttggggacctttaggattgttggatggccatggcagtctctcatcacagggaagaccaggaggacaaacacccagatgacacagcaccsagggccattgggaactattccctttgagggggaagagtgtgaattccaagctcaggagtagcctggactctctccttggacctgaggctrctcctggatcccagggctggcctctaycactggactctgcttgtgtttccatgagttgagtccaatgtggtattggtgcttaggtcttggctcaggctctaagtgaccaaagtgttcaaggaatgaaaacacaactgttttctaacgcccggaaggaggcaaatattccagcaattctgcatgtggcatcagaggacccagcttaaaagggaagagttgagtctttgggaaaacccatccctaagatcctagaacattcttttgagtttttctgagatcttgtggaagcacctccatgattacgcgctgcctccagtacacacacatgcagacacacagacaaacacacacacacacagacacacacacagagaaacacatacagacacacacacacagagacacacacagacacccacacacaaagagccacacacagacacactcatacacacacacacacacactcctggctagtgggacttcaatccttaatggagggacctgcactggttacatcctgagcacaggtcagatctgggaactacagtgcaacactacagtcactgcaatcttggtgaacacacaccaaagagaagcatggggtaggatgagactcagtgagcttgcgtgagtcagggctttctaatgggagatgaggaaactctcccaagtaccttgaacagaaaaagaaatgtgttgcaatagcatcgtcgtgtaaactgaaaatctcaggagttgatggcttcaggcatggctgggtccagatgatcataggatattattgagaatctaccattctctgtccttcagctttgcacatctctgtgttggcttcactsttaggcagatatatctcctgggaaggttaaagacaacagcactctagacttatgtcctatctgcttaaaaaccctctttctaaacaattcctgcaaaagttttggggtaaactctattggattgacatgagtgtatgcccatccctgaactaatattcatgttcagggagatggagcaccgcaggtcacatatagatatacgaattcacggagtgatgcgggaagaacctgacacctctgttgccccactcacccagctcagtgttctcctggtaagcctctcacccacatcctctgcctttgtcttcacagaaattcttatctctggacttacagggagaccccagagaggtaaggaccttttgtttctggattacgggttttgagtcttagcacctttaagctccaattaactgtgagtgaaagaatcatctcttgggtaattatagtaactcctgcgtgtttgtttctgaggcccmgagaggggtagtgactcacctgggtaacacagccaggaagactagtggctggcctggaacccattttcctgactcccagtccagtgctcccaggcatcacctctgtgtgccctgggctctgcccactccccttcttttttayattttctgctccccaaaatggcactgtaggaggaggctgaamcagaaccttccacaatcaggaggcagagataacagcgatgattagccaaggagaggggaagcctaaatctcagtccaaggacactcgtctcctcccagcacacaggaaactccaacagtattctcccaatctcctcatccccactcccacccccacctcccagtgggttgacagtttctggtgacatcacctctgacgaatcttacaatcctgtcctctctgctgcctccctggagatcacagcactctcctaaatggtcatgggcggagtacatgagattcattcagcaaagacttaataaacacttcctatgtgccaggacttgtttaggagctggggatataacagtgaaaaaagaaagactccctaccctcttgggaccttccattacagtgccaggacagtgcaataaaaaagcaaatcaagtatgtattccgtttgatggtgtgcagcattagggkrtagagtttgtgggtggcttcaatttaagtagcaggatcagggaatggttcaatgagaaggtggcatttgagccaagctctggaggaggcaggaagccagctgtcaggaaacctggagaagcctattccaggcagagggaacagtcactgcaaagaccctgacakaaggggccagtctggctggagaggaccgagtgtggggacagactggcttgaggctaaagaggtaatgggcagtgggagagagatcaattaaagtacttggatttggattcagagcaagatgggaagcctttggaggttttgaacagaggagtcacatgatcttagatctcacaaaggtctctgtctctggtgttcaaatagactgtaggaaaggggcaaagtggatgcagttgaccagctgggcagccactgcattgccataatccaggcaagggctcctggctgcttasacagggctgtggcagtggggatgggaggagtagttggagtctggatatctttgaaggaatagctgacaggatttgctgatggacaggatgcaaggggtaagaaasggggaggagtggaggacgccctgagttttctgacacaacaaggttgtgcccacacagggcagccacttgcaaactctwagtggagaacaatcacttgtcattgttgctgatggcagtcttccagcatggctgtcacccaactgaggtgctcccgtctcttgcctcaacttttagcctcttctacttcaccttctctccccatttccatgtctcatggtgcagccagactggccttccttaacagaattagagcacgtcacccccacttcttaaaagcctgaccttccttatgagacaaatccccttccctccatggagttagtccttcaaaacacacctgcgtgcacactgtgtgccagactgtgcagaaggtaggctctgcacctgtccctccctctagaccctgccccacagcatttctccaagccaagaactcttggttgtttctggaatttaccctgcacagtgacacctatgtccttttgctcatgcggttcccactgtttagaaattctcactcctttcctcacctggcaataccattcactgcccagagcccaccgcaggcaggcggcgtctcttccacgtagtctgccctgcatcttccttccagaggggctgctcctcttgctggcctcccacagcagccctgcctgaactgcacagcctcttaaggaggctggacttgcaccccaatcctgttcttcattgtcagccatattggattaggatctgatcttgtccagctaggtctggtccacttttcagaacatctcccccaggcagtccgaactagctygtcattcattggcttttgtagagcagaccaaaggtccyrgaagccatagggtctcaaaggctaggaattktccagttccatctgatatccagragggaaayacagcccatggggcgtgraactgggaagatkscacagaggactggtgtctatgagagggacccacagcaaccttgctaacaagtaatacctaacagttattcagcctttccagacaccaggtgctgtgctaagtattttacatgtgttcagccatttaatcctcacaataactcacctcttagatgagaaaactgaggcccaaacaggtgaaactcccagccagtaagtagcagagccaggcttcagatgcagttaatctggtttcaaagtccatgctctatcttagcaacatccacgctctatcktagcaactacaccattgtgactaaatatgaaatataactgtacccagaaccagctgccctgatggcaacacatgagttgggctctctctaatctgtgaccatataaaaattattcatcaaaggtgaaacctaaaattaagacatggatcaatatactgtgagttaatcactgattcttttactcatgattttctctctagtagggaatcatgtcctagtctaggctccttgagtgaccagggttcggtacctcctcaaagccacccgtggatcaataacagctcttgtttaaatacagatagatagcataatctcttcctcattaatcatggattctgtgtttataaattcacctgcttgctaaaatgtccttataacccccaaatcaatactggtggcactttcatggtcacacacaggcaggtacagagcaggggaagctggatttgcatgatgggcatgttccatctgagatccggcgaggcaacctctctcttcttgtttcatctctgatgtttacaagtgtcctcttcgcggtctatttagtgccgtgtgttctgcatttttgtgctttttgtagtgatgtcactgtttagagcgaacccaagagtagcgctgctgtctggcgttcctgagctaaacaggctgtgctgtgccttacggggaaggtgcctgtgtgagacaagcttggatgaggcaggagctgcagtgctgctggccgtgcatttggtgttgaaaaatccacataatagcacattcagaaaaaggagaaggaaattggccgattcatacatgaggctgtgatagaaagggctaaagtaacacctattgtgtgggatggagccgtggaagtctctttcaacagaaacccacacataaaagaaggttgatgaaaatgttgtggccagaggtttgcaaaaacctaacccagtatttcccccttgagtgatgaccctgtattctctaattcagtactcaygggggctttatcagaagcaactgccaggactaccgaaaatcaaytgtggacacacagaggaaaatgcatgcacttcaaattgaaatatayagacatgtaattttacatagataatacatgtatttcaatatgagtgaagatttcttcctctcctcatcacctgagcagtgtcagcctctgcctgaagttctgcccctgagtcatggagacctacccccctaagttaggatcctgagcatgtgcagccatggcgcatggccatgccrgtctayggtactggtctcaccctcagacaggcagagttggggacatgggtgtgactagggagggaatcacaggtgctgcactgctctctccccagagtcaaccccttctgggcactgtgattgatgggatgctgctgctgaaaacacctgaagagcttcaagctgaaaggaatttccacactgtcccctacatggtcggaattaacaagcaggagtttggctggttgattccaatggtgagaaggcacatgtctgttggagggactcaaccaccmccatcagccctcctgtctctggtcccaggaatgcttccctctccgagctgcactctgagtcctgggcagctgttcccttcagcaggrgttaacatttccacggaaatcttctccaggagggcacagttttcaccggggtatcagggccctgggattccctctccccagactctcttattgtcttcctattgaagaatcctgaagtgtctgtgctgggagggccagtagagaaaataactctgcagatgggaaaacggagggggcctagaagggggaaggagtggaggagtccggagaagcagtcgggggcttcctggcttcccacctcgggctgggtgtgcgtaattcccctgaaaatcactcatgctcttcatcacctcattgaaaatatccaaagaaagtggcttcttcttgagttaccattgacttctagggaacagcagacatcagcgtctactaagagagtggatggtcagaggaagatgaggatggaaaagctacctaatcgggtgctatgctcaatacctggtaacaaaataatctatacagcaaactccagagacccaaattacccatgatcaaacctgcacagttacccccaaacctaaaataaaagttggaaacaaataaatggaaaaagtaattgagttctaaaagtaaagaagtgttctccttccagttgaagataaacaaaactgaccctggttaaagcagtaggacagatttattcagtaatatgattgcaataggggaaatagtccagcgtggagtggactcacatccctgaaacaaaagcctgatgacgtttcataggccaggtgtgccaagggaaacactgtggtctatggggagaggcttggttcatgtgactagaccacctggatgtcttcatcctggctcacctggggcagaaacaaactcctcttatctttaggacaggaagccatgcattagaccgcaggaagaacccactgaagtcaggctctactctttcgacagggactgggaagatcaggagtgagctccctgaatgtttgcattgcaaagagaaggctctcaggtcctcaaggaaatggggttgggtggtagattcacatcccaaasrgcagagaaagtgtttatcattgcaggcttctaaagtaactgctctagttgggttcggggacctggctgcttgtctccaggttttggctggagcagagtaaattgtcctggcagggttgagccttcccaggcagttatgttaaggatactggggtcattctagggacacagccttaagctgctagaagcaatgctagagattggtcgagtccctgagtgcagaggtttgggaagagttgttatgtgcgtagagatgtgcagttcgcccctcagaaggatttcagaggttataccaaagaccaaagccacgaagacaggatytaaggatttcagtgtcatctgtgacaggtgggggtactagggaggtctacatcctcttccccagagccctctattccacactggcctggcagacaccttgcatctccatgtcactgaccactgtagggatcccagccacagacacacacacacacacgcgcgcacacacacacactgcaaaacactgccacagcttctctgaaattttgttttttgttttttttttttgtaaactttgcaatgcttgagtttctggatataagcccatttgattcattgatttcacccatttcagtaaagactcatgcccttaaaagcccccataattagaggactttcagactgcattggtttggttggttggtcagtttgtttcttatcattaattcccaatgattcataaatgctgaactttttttttttkkttagcagttgatgagctatccactctccgaagggcaactggaccagaagacagccatgtcactcctgtggaagtcctatccccttgttgtaagagtctaggaatcatgggaattggctgagacccagagagggacaaggacttgcccaaatcatagagcaattaaatggcagaatgaagactggggcctcagggtttcccccatctttccacctttcccacttcattttccaccctagcggggagttgcacagggcttatggggttcaccattgaggcaggactttctggtgggctggagaagctgcatygctcaccmggggctggtggtcactttttgatctatttcagtgcattgctaaggaactgattccagaagccactgagaaatacttaggaggaacagacgacactgtcaaaaagaaagacctgttcctggacttgatagcagatgtgatgtttggtgtcccatctgtgattgtggcccggaaccacagaggtgagtcccagaggtcgaacgggagggacacaaaccccacgagcttctgtatctgacccacctacctcccagcatagacagacatggaaacagctgagggtcaggcctcaaaggctgattccatatggcatgggatgaggtgctgtcttattttggtttatgccagcagaagactgtgagaaaaaaaaatccagaggcaagtggtttttttaaggtgatgatcccagataacagcagtagggaggtggggaagtgagagaggaaagagatggaatccaatccaagatgcgttgtcaagggagtatccactgtggacaactggagcggggaaactcaaggaaacaccaagaatacagggctcaggggcatcccatctgagtggcaagggagccgggtatttattcaccagcttctacttgtcattggttgaaggctcttgcaaggaattgtttattccctgtgacttcgacctgctgcacacaagggcagagtagtctcttgtgaccagacaaaggcctcaggcctggagctgcagatgctggaggtggaagtcaggctggcatgcccaggaagaggggatataggtgagaccctggcagcatctgctgcaagggctccatgcctggagttattgtgggacatagggctgctgtaggacaaatattgaaagatgagtcgtggaagggttttaaggtctgagccagctgcaaacaagtttgttaagtattggagctggataaaaagtgggagccctgcatgggatccagaggattgtccaggaccaagaaggccagagagaggagccagggcgggtgtgggagaggtggtctgtagaatggcagtgtctgagggtggtttttatgcatctcagtgcgtgcagtagcatgcaagcacagggcaagggcagggtctatgcaggacctgctaccactgacccaaggctgtgtgggtggggcatgacgttagggatgtgtgtgctcacctagagaggagtgtctgttcctgcgtgccagctagaggagattcacaggattccttttcttccagctctcattcgcctagtctgcaagctaggaaatgtcctctctctaaccatgctggaagggtttttaaatttagaacttcataagcatgataaaaactagctaacgcttaactagcaggtgccctgacacacctttgcacaggaaggggcaggtgctcataaccctcatttcttcacagggtcctgataaaaacctttaaccaagaccactggagttgaatctgttctttcttaaacttgcccttgccctatgctctgcgtctgaactatatatagagttcccatctccattttctgatggtttgagcaatactgaacttatgtttttcatctggtttcccatgactttaagttcagggcttttttttttttttttttgccaggactacacagattttatctactttcacttattgttgtctcactctttttgataaaataacatttctgaatataaaattaatatgttaaattatagaaactttcaaaaatatggaaacacaaaaagaagaaactatgtatcactcatttccactacctggaggcaagtgctataaattttttgtgttttcgtctaaagattttccatgtcctatatactttaaaaatcaattttatattttacttttgttcatagaacactatgttgtgaggattttctcaatgttgatacaaactcatcaaagcattccttattccatgaaatggctgtgttaaatagactttaatattcatatcctattagatgtttagcctggctactcacattctgatgctacaataacattgagctcagcctaatgttcataagtctctaaacacatgtctaataattttcttaggattatttttagaagtaaataactaggttggacaatgcaaatgttttagaactttgggcaaatattgtaaaattgcattccactgcataagaatgtggatttcttaattctctttctcatttgggatgctaagattaaaaattagcataacacttccagtttcataagccttccccaccaacaagaagcacatcagcctgttttaatctgcatgtcctccatgactagccctctcattgtctctgcttctcttattatgtctaattgtcattacccaaatctgtgcgctactttcctctgaagacttgtgttgtgattgtaagaattgtataaatatcaatggctttagccaaagagttttacaaagtacgttttgggcagcatgctgcctataataagttctatcattcacaaaagctctttcttctatggttggctctgagtttctttggaaaatgttcgaggggcaaaggcaaggtcaaaccctccttttagcaagttttgtttgaccttgaagcagccatttaacaggtggattacagagccacagaaggatggcatcttcccaggtgcgcttcctgctgagccgagggtgcagtgcaggaggcnnnnnnnnnnnnnnnnnnnnttgagcatttccagtgtttttctcacccatcctgagaagactgaagcaaatccaagttgcttgtctgaacatgaggctatttaaatacaaacatatgcagagagggaacaatctgcctcttgtgtctcaggaacctgcggcactcactgctttatagctcactgtccccatgtgtcttgctgcctgcctggcctgggagtgttagggtgttaaggcagtaaagccctggcagagaaaagaaggcgctgagcaagggtgaccttgcctctccccgccctctctccttcggctctgccctcctctcccaccaacaaagctctcctgtcccagccccaggaagatgccagtttcccaatgattggctcattggagccacagatcgctgccccttcagggctacctcgtgggccgcctggccctgtgcctcagcactttgcactggtcatgatacccactgagaagtgacactaagacggaaagagtcagggcaatgccaggctggtggagaaaatttacaatgtcctcccctttgggtacagtaagaaatttggaaaataaaaacaattaggaataattagaagaaacaaaaatatggaaacgcataaagcaaaactagatatcactcataattccactacctgaggcaagggccatgcattttttgtatttccttctaaaatttttccatatcctatataatttaaaaatcaattttaacaatcaaatttaaagtatcactcataactctaccactcagagaatgcttcttttttattttagcatatctctcttttatgtatttaactggggatgatattatatatggtattttgtagtacactgtaatcacttcccttttaaattgttttgtagagacagggtctcactatgttgcccaggctgatcttgaaatcctaggctctcataatcctcccacctcagcctcccaaaatgctgagagtgttggcaagagccaccgcctccagccatcatttcttaacatcattaaaaattcgttcacaaaaggatttaacaatgggagctcacgcatccctaacctcatgccccacccgcacatgtcatttcaatgtgagaatgaagaataatctattcactcatctttgtcagcctcctgcactgcaccctcggctcagcaggaagcgcacctgggaagatgccatccttctgtggctctgtaatccacctgttaaatggctgcttcaaggtcaaacaaaacttgctaaaaggagggtttgaccttgcctttgcccctcgaacattttccaaagaaactcagagccaaccatagaagaaagagcttttgtgaatgatagaacttattataggcagcatgctgcccaaaacgtactttgtaaaactctttggctaaagccattgatatttatacaattcttacaatcacaacacaagtcttcagaggaaagtagcgcacagatttgggtaatgacaattagacataataagagaagcagagacaatgagagggctagtcatggaggacatgcagattaaaacaggctgatgtgcttcttgttggtggggaaggcttatgaaactggaagtgttatgctagctgatgtgcttcttattggtggggaaagtttatgaaactggcagcgttatgttaatttttaaccttagcatcccaaatgagaaaaagaatccacattattggctgggtgcggtggttcacgcctgtaatcccagcactttgggaggctgagatgggcggatcacgaggtccagagatcgagaccatcctgggtaacacggagaaaccccgtctctactaaaaatacaaaaaattaaccgagcgtggtggcaggcagctactcaggaggctgaggcaggagaatggtgtgaacccaggaggcagagctggtagtgagccgagaccatgccactgctctcagcctgggtgacagagcgagactccatcccccccaccaaaaaaaaaaaaaaaaaaaagaagaaatccactttcttatgcaatggaatgcaattttgcaatatttgctcagagttctaaaacgtttctgtggtcctgcctagttattcacttctaaaaataatcctaagaaaattattagacatgtggttagagacttatgaacattaggctgagctcaatgttattgtagcatcagaatgtgagcagccaggctaaatgtctaataggataggaatattaaagtctatttaacacagccatttcatggaataaggcatgctttgatgagtttgtatcaacattgagaaaatcctcacaacatagtgttctacgaacaaaagcaaaatataaaattgatttttaaactatataggacatggaaaatctttagatgaaaacacaaaaaatttatagcacttgcctccaggtagtggaattatgagkcatacctagtttcttctttttgtgtttccatatttttgaaactttctataatttaacatattaattttatattcagaaatgttattttcatcaaaaagagtgagacaacaataagtgaaagttgataaaatctgtgtagtcctggtaaaaacaaacaaacaaacaaacaaacaaaccaacaacaaaaaaaaccctgaacttaaagtcatgggaaatcagatgaagaacagaggttcagtattgctcaaaccagcagaagatggagacgggaacactatatgtagatcagacgtagagcattgggcaaggccaagtttaagaaagaacagattaaactccagtggtcttggttaaatggttttatcaagaccctgtgaagaaatcagggttatgagcacctgccccttcctgtgcaaaggagtgtctgggaacctgctagatcagtgttagctagtttttatcatgcttatgaagttctaaatttaaaaacccttccagcatggttagagagaggacatttcctggcttgcagactaggcgaatgagagctggaagaaagagtcctgtgagcctcctctagttggcacccaggaaaggatacttctctctagaggtgagcccaagcatccctaacctcacgccccacccacacagccttgggtcagtggtagaaggtcctgcatagaccctgtcctggccctgtgcttgcacgttcctgcacacactgagatagacaaaagccaggctcagacattgccattctccagaccacctcccgcacacctgccctggcttgtccttttggtcttcttggtcctagacaaccctctggatcccatgcagggctcccactgttcctccagctccaatacttaacaaacttgtttgcagccagcttggaccttaaaaactttccaagactcatctttcaatatttgtcctacagcagccctatgtcccatgataactccaggcatggagcccttgcagcagatgctttctgtgtctcacctatatcccctcttcctgggcatgccagcctgacttccacctccagcatctgcagctcccag

SEQ ID NO: 94101 - DNA, 111415 bp, Homo sapiens
  misc_feature (1)...(111415): n = A,T,C or G
ctgtaacaaaataccacaaacttggtggtttgtaaacaatagaaatttaattcccacaatcatgggtgttgagaaatccaagatcaatatgctgccagatttgatgtctggtaaggacccatatccttggtttatagatggtgcattcatgttgtgacttcacaaggtggaaggggcataggttctttttggggccttttttatagaaaagcactattttcattcacaagagctccatctcaatgacctaattacctcccaaaagccctaattcctaatagcatcatctttagggtaggaatttcagcatatgaatttggaggggatgtaaaccttcagaccatagcaccatccaagtccacagttcacatttcaaaaatgcagatttgacaacacaaataagacttttgtcataaaacaacaaagcatgagtgaaactccttttcattttacaattatctataatgatattataatccttttaaggtttttgttttttattatttcttcttagtcttacatgtttattcagtgtatctatgcaaatagtttcctgattcataaaaatacttggcaagttacataatggaaggccaaagaaggtaatagataatgcacataatccaactaagaacttctagatccatagtagaggtacttaacattttattattataattcataattcaatggccaatatcttgtcatatgttattaaatgagtatgaaacaagctactctaatgaaaagattcaaatgttcactgggtaaaggaannnnnnnnnnnnnnnnnnnnttcaaatgttcactgggtaaaggaagatagattatttctttttcatttactattcagaagaaggtgaacgatctagggtagacaggtagctatgttccacaaagttgtcatggaatcttatgagccttctaactttttactccactatctccaaggaaatacatagtcaaagctgacctacagaaatacatatgtgtttggttcatagaatgaagtaaaggatgaatgagagaaagctgtttctttttttaaaaaaaaatgtactatggaagtcacaagcatgaaatcaggtttcatcccattgactagaatttagctacatacacaaaattagcaacatgaagggtttaatagcatagtctggacagccacataccctattaaatttaggtggttctatcactaaaagaaagaaaagagagaaaatgaaaaattagctgttaatggttagattataataaaccatgtttttaacaaggccatattgtagctgcaaaaattgacttttgagtatgttgctgttttattaccaatgatatatccctagcatgattttgttcctccagtgtcctgaacaaagattatgatacctggcaactatgttactgaattgctcttacttctggacattattcaattcaaagctagccttcctttctctagcctctatagccacacagcacaagtctaaatcctataataagcctcttccaacttcctgttactaagagaccctgctcttccttgtttgaccacatttgagttctgtatagactttgactggtgagctttgataagggagaattgatatggatatacaagtggcagtcactgctatattctactgtatataaaacatcctgaaaagcattttgaattaagcaaaggcaaggaaagcattgtcctggctctctctgcatttccagtctcacatggccaattgaagcaattatggatagctttaatatgagacaagctaagacagcactatactacaagcatgaaacacattgttatgaagggaaaagtaggggagatgaaatggcaaatatgaaaggtatagggttttaaaaataaggttaagaaatttggttctccgcctccaggcattaagtatcattggactactgcactgggaatataatgagttgaattattttgtggtgagaggtgggtggttttactttagagaaaagagaaaagttgaataactggagtttgggagaccagttaggaaacaattacaataatgtaattgttataccagtagcagcaaataaatagaattacgtatgagacactgaggaagagcacttgcagaattaagtgtcaatatagaacgcttaacaaaaaggaattaaaagtcttgagctcacgttgcttggggagatgtaaagatatcaattgagatagagctagataaagaattgtcttgatggagctggtaaagagttctactttagactgttgaagatatctggaaatttgggtatgaagcttctaagaatcgttacatctagagatacacctaaaaagtcacctgtgctatttattagcaaatgtgtgatgttatttatttatctatgcatctgtgtgtaagactggaatactagcacttgtatatgccttattttctggaagctcttcacgtaactctccatcggtctttccaatggttctggtgtcttgcccctgaatttgttttctccttcttcttctaaaatcttttgtatccagtattttttatgacccaggcaggaaccttggcttccctttttatatttgtgttctattgcacctgcttctgtcttctaggagaaagaactcaaacaaattcaacacctcccagagccttcttccattccttcttctcttgccatgtggctgttttctttctagttttttcacaggcctctaaaagaagcagaacattttttattatttaatattttgaaatatctctgcattatcgctgtgaaaattcgatttttgtctttttgttgcatcctggtggcaagtaacatataaaactagtatattaaatcatgtaacttttaacctaaggtgcatatttgaggtccatgatttaactactgtagacgtccatgatttaactaccatatgtttgaaattctgacatgcacatttcagagacaaagtacataatactccctaaagagagtagttgaacattaatctgttctaattacactaggtgtcaatcaccagttatgattcacttttggtgttcacaactcatcctgcctgctgactatccaactcaatttggggatcattttgcttatgaagttttaaagtttttggacaactttatattaataattgaaattttaagaatttatatttgtttttaaataaaatgatatgttttaagttaaaacacctttttaattactgtacataacttccttatgcttataattgaatacatttattttgtgatttttatctgaatttaccttctaagcattttttgaacaccttattcgattgattgaggttcattgttggaaccagagctagggtggcagaagtaattgcttaaaacaaaggccagtttgttgacatgacagggagataacgatacgaaatagaaggtacacaaattcaaaatcacacaaagttttttttttctgtctgtttctttaagactttctttttttaaattatactttaagttctagtacatgtgcacaatgtgcaggtttgttacatatggatacatgtgccatgttgaagtgctgcacccattaactagtcatttacattaggtatatctcccaatgctatccctccccccttcctccacctcatgacaggccccagtgtgcgatgttccccttcctgtgtccaagtgttctcattgttcaatttccacctatgagtgagaacatgcagtgtttggttttttgtccttgcgatagttnnnnnnnnnnnnnnnnnnnnnnnnnnnnnnnnnnnnnnnnnnnnnnnnnnnnnnnnnnnnnnnnnnnnnnnnnnnnnnnnnnnnnnnnnnnnnnnnnnnnnnnnnnnnnnnnnnnnnnnnnnnnnnnnnnnnnnnnnnnnnnnnnnnnnnnnnnnnnnnnnnnnnnnnnnnnnnnnnnnnnnnnnnnnnnnnnnnnnnnnnnnnnnnnnnnnnnnnnnnnnnnnnnnnnnnnnnnnnnnnnnnnnnnnnnnnnnnnnnnnnnnnnnnnnnnnnnnnnnnnnnnnnnnnnnnnnnnnnnnnnnnnnnnnnnnnnnttttaactggagagaacaaaagctgttacttgaaatatttctataaataaaggaacatgtaaaggaggactagttaaaacttgacagaggcttatcgtttcaattcaaagatgtggaaagctggaaagaatctttgctctcacttctaaaggaagaaataaaaagacaacttgttaactatttctcttgaatctatcagagaactaaaattaaagggaaaacaattgatctgaaatataagatttatcaatgttgttgcataaatcagtagtttataacttttcattgctgagtagtttgctattgtatggatatgccagagtttacagacacttttgttgtttccagtttggggaaattatcaataaagctgttatacaaattggtatacaaaatttacaatcagcttgtctatatttacttcatggagttttgatttagattatattttatgtgtagatctaatagtggcaaattggcagcttaatactgagttttgcagtctatgaatatggcgtatctctcaatttttaaaatctttaactttttcatcaacattttttggtgctattctaattgataatctagctatctatcaacttatatctctgtctatatctatattgtagtttcagtttccaattcttccttgctattaggtaggatcatgattgacctttgtatgttgaccttatatcctgtgaccttgctttgcttgcctattggttctaggagctttgagttcatttagtgagattttacacatataaaataatgtggcatatgaatagagagtaaatcactcaaaagttttattatatttttcctatttagatcattctggactgattttaaacttattgctatataactgattttatatactgnnnnnnnnnnnnnnnnnnnnnnnnnctgaaatttctcctttatatagctactgagtcttacaacaatccatgcatactttttttaaattttctttttagactcatatttagtttgcttcaaaaactaattgctctactttatgcaaacacattattttaatatatattttgttgaaaagatagtatccagatggtatgcaaggcttagactctgacaatttcagagtcaaattggggtcaataataattaagcaatattagctcatataattcttttagtgattttataggtagtattttgcccacaatttctcaggtaagcatagtacagccagcatttatatccaaatttattatatcaaatccattgcttttaaacattatgctagcttaaaccagtagtgtaattaattttatacattttactacatgaaatgagaaggtttacaatatgattttttataattcaatgagtgctatctgtggtaaataaatagataaaaatgttgattttatctctaaattactgatctgggcacctctattttatgttttatacttaaggatttggtcactttttcaaccttaagatcaaagacaagatacagggaataatttttatttaatcattactttttataaaatattatcttctaattgttatatcctgaaaatttttcacagattctgtctttcaaatatgtttctactctccagtgaggatctaaattgcacacaatggacaaaatagttattataacaaaatccaaatataaaataaatataattttgaaaagagaaaaaatagaaagaactacttttatgttcttaagatattaatagttcacagctttgagaaatcaaagagtatctgacagtacaattactaattaacttagattcccagagagaaacatttatgtaaactactttcagggttaaggcttttaacaattgtatgttgagcagaagattattaaacactgataggctggtragggtgcaataaaactttatgagtaggtcaatatatacctaagcagctttccttgatcattattttggcagccttatccaagtctggtacaacatagcaaagagaacaggctatgaaataaggtaagtctatggctcatatgttttgttgttatttttatgttttcaactaattatattttttcttaatttgtgttagcagtattcccatctatctgcactaggctaaaatagcaatatcatatattttaagttgccatttgaaatatgtagtaccttgtattaaacaggaaaaaatatttctaatttttttttaaatacaggattttttttggcccaactcttcattataacttttgtaagacttaggtggaatcatagcaagttttgtttaatgactctatatgaaaagaaannnnnnnnnnnnnnnnnnnnaaaatagatgaataataaagtatgcttaaatatattttaagaaaatctatataaaatagaatgctacatttataaaacattactgttttctagctgaccttttaaagatcattcatcaagttgttatacaataaagtattattcatcttcataataaatatgcagagaaagggtatcaatatatattttccaagaagagttgcttaaaattactgtaatccaaaattacagggatcatatttttttatcacagtaattttaagcaattgttttaaattttgttttgatttttctagacaaaggagagtttgtttcatgacaaaaatgcattttttaagacttcccttatcaaaaaggaaagcacaattctcattattgacttcttggtagcaaagtaggttatcacttcaaatgagatttacacttatttaaagttgtacactaaatgtaactttgtcatttctcaacataacatcacgcaactgggcttcatttttcgaacagctttgtatgttacctgttgctctgtttactttacattcattttctttgaaaattactgatgcaataaacagcttacatatctggaacagaaaattgtatactaagaataaatgctaatctgcagatattcatttataagctatactaaaaaattaagtttttgcttacttaatattattctctgactacttttataatttttgctaacaagaatgtaacgatctaattgaggaaattaacatatacataaataattgcaatggacatttaatatgctatgstaaatgaagaaaggctagattaactgtgcctcagagtggtaaggaactcaccatggcrtttgaattcagcaaaatttagaattcacctagaagagtggatggggagggattgaaattgaacagcaggtatgaaggcaatatgttatctaaaaattatgctgtggtgctggggataaaatgaaggcataattctaaaaatactttgaagataaagtcagatggacttattgaatgattgaatgttgtaaaacatatggaagaaggaaaaaaaggtgtttaggttgggacaactgggtacatgagttgacatagttacagaacagggaccattgtgagaccaaaaaaaaaaaaaaaaacaaaccgtgattttaaacccaataatttattaaagcacttactgtagtaattctaagttctactttggtatatgtctttgaattaagatttatactaaaatcatagaatacagataatccatggaaacttgagaactaagaaaaataagatatatgtggtcaaaattaaattaaacaaatatgctttcagataattattggagatgtgttctttcctgtctacatttgggtatcttccatatgctacctcaaaagtataatgtcttttaataataaatatgtatttttgatataagagttttgtatatctcatttgctgctgtttgatgaaggaacttggtgaaaattcaaaagatttttaaacagagtagcaactcccaaatatatactattctatcaaatatatgtatttatgttcttttcgacaatattgtggaaagtagtgttggaattagagagaggagagttcaagaaaaaaactgaagtttttaactttgaactataacttattctttgttaagcttaaagttcctgatcagtaaaatgtgaataactatttccttcatagaattgtgagaattgagaaacagtgcaagtggaagcctttgccttgcaaaatgctctaaatgagaaggcaagacacacctacttgaagatctttttttccatctgtattttcatcttagtgtactactactactgtaatgtgcatcagtaattcattccttttactttaaattgcatgtgttgcttacattttatatcagtataagtttcaggttattaagtacatgcttaatatattattaagtaagtgcttaatttaggatattatgtaagtgctgtcttcaactctgcattatacatagtaaaaaaaagaatatgtaatttcatgagaattgttggtggtttattatagttatatattttacattttaaatatatattcttttctgtttttagatggcaagaaagaaatttagtggattggaaatctctctgattgtcctttttgtcatagttactataatagctattgccttaattgttgttttagcaactaagacacctgctgttgatggtaagtagtacattaaaagcatggctacattatcgtgaagttaggaggaagttactccacaatagttataggttttaaaaaataatctgtgtaagatgaaacacttatagaaaaatccagggtaagttacacaattacttcaactttttctattcattatattccatatttcaatgatgagctattgtaattaaggaatccatgtgctttgacattaattgccttccctagctacttgacaaagagcaaagaggcaaagggatcaaatcgttaatgtaaggtggaataatcgcctactggtgtgagcatcatctcattagtgggaaaacctgggtttttgctccagccttcacacacttgcaaaggaaataaggattttagcaaatattctttgttctggttarattttattttaaggagagagagaggttgtatgagaaaggcaggtagaggaaagttgaaaaaagacttggatagtttaattatctttttctgaatattttaattctaatttagagttggtacatacggaatgctgaatctctttcttcattattctctcttgagcaaatcagtattgtaaaggatgttacacattatcttctagactacagttagcatttcctattcctgttaatcttttgttttacctacttccagaaactgagagcttactgtattatgaagcaatatattttaatgatatctcattgctggaatgttatttatatggcgttggtatctaccattcttcgctattccagctttctctactttacctatcaaattattcccttgcaagggataatttgaataactttcacctactttcctcttctctaatttcttctcaccttctctatatgtttttcataactcatattgctccatcttttcttcagctataaaatacaagttgtaaatacagtatgaatgtatattttgttaccttctgaatctacaccaagtccttttgtaaatatattttgtatttctgcagaaacagtcaataggattctacactgtcaattttaaaagtatgattggatctcttccttttgatgactagtgcttgaaattgtgggtctttttaaatgcaaaatttattttaaaattttcattttatatgaattcatgtattctttcaaaaagtacttattacttgataattctgagaaaattaatttaatgtcatgttttattttattgagttttttcctcccccagaaattagtgattctacttcaactccagctactactcgtgtgactacaaatccttctgattcaggaaaatgtccaaatgtgttaaatgatcctgtcaatgtgagaataaactgcattccagaacaattcccaacagaggtctgcagcaaaagtctttaatatttttaatgaatatatacattattatattaagataattgctgaatattggatcgatcttatttaataaagatctagacataaattaggctgaatttatcattttattatagcttcctattaaaaatgatagataatagaagttactgaccttgctttcctttatctctgctcaatttaaattaacaagttaatattcatccatatttaacaagttatagttaattttayaaatcttcatgaaattctgtcatctcaaatctacttctttaagaaagtatacctttgataatatagaacatttaggagggagtatatatgttccagtagagtatttgtaatgatagcattaagaagtatctgtggaaaacaaaatactcattttatgaaaattattaattgtttttaatttagcaattagaagtgaagaagagaaaatggagaaaattaggtgtaaccaattggattcatgtaacccaagttcactcttcctttttttccccacaaacctgtgtgggaataaaagtcattgtgtgtgggtgtatatgtacagtccttcatgggtatcctcggggaattggtttcaggacttctgaggataccaaaatctgcagatgttcaaatctctcaaataaaayggcagtatttgcatataacctatgcacattctcctgtatactttaaatcatctgtagagtatttataactctaataccatgtaaatgctatacaaataattgttataatgtattgttttttatttacattatttttattaccatgttgatattttttgttccttgaaatatttttgatccacagtttgttgtatccacagatgcagagggctgactctatatattgacattttgcaaatatttgcatttgcaaatatgatatgcaattacaaatgtcaccttctccactccaccttaccacacacaaattaactgaataaactataaaatttattttgtccctattctgtcttccctacatcatagtaagcatgcaattttctaattaatttgaaaaaaaattgaaagagatgagattttcctttgagtaacattacaagtaataggtcctatagcttacctgctgatagaagagctaaataacatagtatttactgagatacactgaggaaagtggccagatattctctttacttaaccttcttaggcagagcttgcagtgggcagagatcgcgtcactgtattccagcctgggtgacagagcgagactccgtctcaaaagagagagagagagggaaagagacagagagagagagagagagagagagagagagagagaaatgattgaagctaaacatagaattctattaggaacaatatgggttttgaaggtcttatagggaaacaatatttgaaagtcagtggtttacatttttcttgcctaatattagtctttagtgtcaacctaaactgttagattgctgaagaatgttttcagtgtgaaataaactatatttgtgaagtaagcaagttaaacttcagccaatatatttatgcttgttatttataaaaatacaacttacagttttaaaagtttaacttagtatatctcaaaagaatttgagtgttttcttgacatttttaactaggaaaagtgcaacttaacaaaatgattttaaagagattatcatttaaatggtatcttattcacaaagttttggatttatatggaagcttagactgtttttcaaggctaaattaatattccagtgtcactttgctagtttacaggcaaaactggaattagaacagtggtatgcaaatttcaatgtgagctcatgtttcacgaactcagtagtcactgttctttaactagcatgtcataattttctaagtagatgaattttcaaggtagcatttttctattataggaaatggatttaaaaaataaatcataaaggaatgaaaaatgaaatctacctgaaattagaaaacgggcctaaatatttgcctttttttgctttaggagatgttgcaattttcaaatatgatttttattcaaactttgtcactcagggtttttttttgttgttgttgttatttatagctatgtatctttaataatacttttcattaaataccctaaagattctttaaaatacttcaaatgttaattttccaccatcttaacggatcaactaaagcaattatttatcatcttaaatatatacacttactcttttaaatatttgagaggcattccatctgactaaatattatttgttccaaatgcagtggtagagattgaagttggttaaagtaatgattttctaaaaatttccttaatttaaaaaaaaagatttatcttaggttttcatatacatgaggatagatcatgattgttaaaattggaaagttggttatattaaacttactgtataaattattgtatactagaaatggcatgtttattgtatattagaaagggcatgtttgcttattgcacaatgatgacaaaatatagaataatcaaatggttacctaggtaacagccataattccatgcaaagtgcattagctcgggctgccataacaaaattccgcagaatgggcagcttaaacaatatcaattattttctcacagtcttggaagctagatgtccaagatcaaggtgtcatcaaggttggtttctagtgaggcctctctttctcgcttgtagacagcttccttctcattttgtcctcacatagtatttcctcttcgtgcacagagagaaagagatctttgctgtcttttcctcttcttataaggacaccagtcctaatgaattagggccccacccttatatccttatttaaacttaattaaccccttaaaggacctatctccaaataccttcacattgggggttagagcttcaacatatgaatttcgggggcataatacagtgaatatacatatctacatattgaatacacattatatattattacatatgaaattattacatttaatatataatcacttataatgtatatacatatatatgataaaatatgttaaaatatgataaatttattatacctttatttgctagagtttaactgtgtcaaatgaaggcaaaaggaaaataattagatgagaaattaaaaataatgaggaaaatgcctaaaaccctgaaaaataggaagaccaactaaacataaataacaagtatcaaaatcttcgcaagataaattaaaattactaatattttgaaagcaacaacagggagatacatttttaattaatatgttggagtgtatatgtagtaggttaaataatgttttccaaaaattcgtgtctacttggaatcgcagaatatgagcttatctgggaatatagttttccagaagcaattagttaagatgtagtcgtagtaaattaatttgggccttgcgtcgaatgactaatgtccttataagaggaaggaaccacacacagagacagacagggaagaaagccctgtgaaatggaagcaaaaattggaaaaaggcgcctataagccaaggaatgccaaggattgccaggagccactagaagctagagagagacaagggagaattattttgtgaagcctttggaggcagcatggctctgctgacaccttgagttaggacttacaacctccagtacggtgagagagtaaatttctgttgttttaagtcaccttttccatggttgttatgaaagacataggaaactaatatggcatattttcaggaaattaacgtaagcctattttactatatatttttaattatgtaaattgtgattatagtgtgcttatttctttcctcttattttttaaacttagcacctttgtgtgtttatagatgtatttatataaatgtatttagagttttatatacaaatctttcatagagactgctgtaagtaattttttttgtagaattgtctctttgtattgctaggtatttctacaggttagataactggagataaaattgcctgatcaaaagttgcacacactttagactctaataagttattagatccaattgtaccccagtttgcaatgtatatgtgtatatgtgtgtttgggtataaatatataaatnnnnnnnnnnnnnnnnnnnnacacacatatatatatatatggtgtttagagagattttatatatataatatatgtatatatacatataattatatatgtatataatcatatatgtatatttattatacataaaaataaaactatgtgtatttttattctatataaacatattttatatataatatatactttaatatataaataaatatatcaaaatatattttatatataataaatatacatatatcccatatacttatctatttaaatattatataaaatatataaatatatagtacatatactatatatattatatacgtgtgtgtgtgtgtctgtatctgataccattttaatttgaggataaaataggagaaaggttagtgcacactttcagctgattaaaatggaggcttttaaaaacttattttcatggaaagtaagcaaaggggaaaatcctacaatttttcaaattatgaaagtgtgtcacactattaaatttacatagatttataattatactgctattcatgcatagcatcactattttgctaaactatttataaataaacatttataatttttctttcacttcagatagtatttccatatggttaataaaattactgagaattcagtattttgctttattaattgaatgctattgcagcaactacttgtgatacctggcacataaactagttaagatagtttaaataattaaatatgaactagtaagtaggtagaattaaatcccttacacattttaagtgggtttaaattcaaggccatattttcatcctcctagtttaaatttcagcttgatacataattagtacaaaataaatatttcagttcttccatgtcaataccttggcaacagaataaattataattacttagagatcaggttcctttaaaatacataagcttacaaaaatttgtatagatacgtgattttaataatcacatctcaggttataaatttctgacagggtgtaattaattcaatttattaaatacttgtatttcttccaggtagaagaaacaaaagagcaaatgctattttggcatattatacatttgaaaaagttagattatttcaaaatattcattccttggaaaaacagagactgggacatctgataatagtagtaattatataattcctttaaaaatattttatcagggaatttgtgcacagagaggctgctgctggaggccgtggaatgactctcttattccttggtgcttcttcgttgataatcatggttataacgttcaagacatgacaacaacaagtattggtaagaagtcctctgttataatgattcaatatgatatattctaactggagygaaaatgtggaaaataccttaaatagaatcaaataagaaatatgttcctgagaatgttcaaattccttatttttgcatgattgtaacaaatttaaaaagtactcatttgtggtaaatacaataacataaatatatttaataattgttaacattataaatcaagtcactcatggcagcttttttttattctttaaggagttgaagccaaattaaacaggataccttcacctacactatttggaaatgacatcaacagtgttctcttcacaactcaaaatcagacacccaatcgtttccggttcaaggttcggtttttaaggtttccaaagatttaatactaaaagacatttgatgggctgggcgcggtggctcacgcctgtaataccagcactttgggaagcygacgtgggcggatcacraggtcaggagatgkagaccatcctggctaacagggtgaaaccccgtctctattaaaaatacgaaaaattagccaggcgtggtggcgggcgcctgtaatcccagctactcgggaggctgaggcaggagaatgrcgagaacccgggagttggggctttcagtgagacatttgatgaacacacctttcatcctacaaatacattttctctcttgagaaatatttattccaaggcaaagaattaattaaactgcacttctctcaaattgtttatgcaaatataacatacgaataataatagtgtgctctgcacttatttttggaggctttaaataatatcgttcatgtaaaatatttagcttaatgccttgaagaaaataaacattctcaagaaacatttgaaaatttttattatttaaactacaggctatggcagaagattaatctaaaatttaatttcagaaaagtgttagtgtcgtatacatgcaacataatactttcactgattatnnnnnnnnnnnnnnnnnnnntttgtatatcacctttttagcaataatttcactggaactaaatttttctttttctcagtgattctgctttatttcagtgcttctttttagtttctataatttttttaaacaaaatttcttatctttatgggtaagattcttatctttatatagttatataaggacccaaacactgaaaagcattgagattgattaaattcacaaaggtctaatattctgtaatcaatatttggtaatactgtcatttttatatcagtcaataaaaatctgtacttaattttatacataatacttcataaccaactaattctatgtatttctttaaaatttatacactttttctgtgcatagccattcaaaaatattaaaattaaggttctgaattaatactcttctatgaaactaatcaccacgttattttttatttggaacttgcatttaataattcagaattggaatattaaataatagtttagaatccagtaatgctaccttgcttaaatctttccagattactgatccaaataatagaagatatgaagttcctcatcagtatgtaaaagagtttactggacccacagtttctgatacgttgtatgatgtgaaggttgcccaaaacccatttagcatccaagttattaggaaaagcaacggtaaaactttgtaagtgtattattttacaattatataagtttattctattattatagaattggaaagtcttaatttcaagacattttcagtagaaataaatttcctcccaaaagagggtaggtggataggtttataaaaattacggtgataaaggagtttggtttcttgtggatgaaagatactggaacataaattagaatctacaaataaaggttgaacaaagatgaaggtggagagcttcactaatgcaaccctagccttgcatatatttgtacatacctagaatagctcttgtgtctttcccccttatatttattgtattttgttgccaatttgtagaatcagacagttactattcaaagaccaaagaggagttatttcccatattaatattaaaataatttatatatatgtagaatccaatatagaatgaacaccttcattatgattgtatgaggggtgtaggtgcaagagatttggtaatttcctaggaatggtttcaagataaatgctcttgtatccctaagaattgttaataaagcaattgtcaagattaaatctcagcaattactcttattaaatgtatcttagtacttttgtttatgactttgtgttaaatcataaaaatattaaatgccatgtgaaataagccaggcacaaaaaggcaaatactgtatgatctcccttatatgttgaatctaaaacatgttgagttcatagaagcagaaagtaggattatggtttccagaggctgggagtggaggagaatgggggagatgttggtcaaaggattagacagaaacaacatgtttttgagaccaatcaacatgatgactatagttaataataaaataataatttaatatatattgcaaaagtactaagagactactataaattctaaatgtgcggtaaaaagtatgtggtgtggtggatatgttaattagttttatcatcaaataatgtacatcaaaacatcatattgtatcccattaatacagacctccctcagtatccatgggagactgctttcaggataatccccactcccccactgagtataccaaaatccatggatgctcaagttccttatataaaattgtataatatttgcatataaactatgcacatcttcttgtatacttaaatcatttctagattacttataataatgaatacaatgtaagttatatgtaaagagtttttatactatattgtttagtgaagaatgacaagaaaaataagtctgtatatgttcagtatagatgcaccattcttttctttccccttaaatagtttccatccctggttggttgaatccatgaattcagaactcacagatatggagggctgactgtatatgcaatgactaattgtcaataaaaataaaagcatacaaatcataaacatcatttagcatttctggtagtacatatttcatctgcataacacataaaactttttgggggaaaaatgctttcaaacttaatttttaagtgtggaagccagtaaaatactgtattttaaaatctagtacctagagcaagcagaattgggtttgaaacttggctctcctgcctaccagtttgtgatccctaaaaacatcaattaattatcccagtttgtgtcatctttgaaatgtgattgataatggtagttatgctttgaacttgtgatgaaaagtaaagaaatggatgtgaaagatattggcaaaaattgtgttgatgcagtgaacaaatttcttttatggggtaatttgtgtgtttctaagaagtgaccaaagctaaccactggcatgtttataatgaaatcttctggatgatgttaacataaacctgtatctggtagaatatcatatatatatatatatatatatatatatatatatatatatatatatattagattatttctttatttcttttatggtgcaggtttgacaccagcattggtcccttagtgtactctgaccagtacttacagatctcagcccgtcttccaagtgattatatttatggtattggagaacaagttcataagagatttcgtcatgatttatcctggaaaacatggccaatttttactcgagaccaacttcctggtgatgtaagaaattatttttcttgttataaataaaatcactatattgcagcagatgaaaatcttagcatatttgaaaacagcatttattttaactgatcaactaaactatttgaatgtcactgataccaatatagaagcttgtttagcttgggagggacaattgataggttctaaattgactcagtgaccaacagattttgtaaaggttttcacaggatttccagtttataaatgttttattttgactttcatgatcgtattttattattcctttttcactcaccttgtacttatatccatcaatagctagctattgcactagaataattccaaacactgttttacatgtcttcatataatacaatgtctgcctagctaccagatattatctcacgcatctctgtccttcttactgttctataatatatagtcattttccgtaacttcaaatctttgcacagtttgtttttttggtaactactgaaacttaatgttctttatcactcatatatcattcagcactcaatgaaaattttatctcataagaacttctcccaaactctcccataagggcttagtctttatctttatacttgacttagtataataatcctattagtgtattattcctgtatatgtttgtttttatgtttgttgctcaaaaaatgtgagatttttgagaccaaacatcataactttaaaaaaatatgtttgattcatgatggatttgggtcaaacgtttgtcagttacttctttttaaayggcaatgctaactatttctatatcaaagataaacagtgagtagttgttttaaagagtttcatttggtacagaattattaataaattttactaatctctgtttgcagcatcactatctataatcgacaccagagtgagactgtcagagctaatttccatacatcctttcctttaaaaatccatatctaattagtcaggaagtctttttcctttcatcatatcagtgtatttccagtttgtctctatcatgtcagctcttcatcagctctcaagaaacagactactaaatttttattaaggtacatatcattttggaagctcctgcagtaccttgggcatacatgggcctaactgataaacatgccattaccttatcatgactaagttattattttatttatttttattttttattttatttatttatttttaagatggagtctcactttgtcacctaggctggagtgcagtgagggtatctcaaatcactgcgacctccgcctcttgggttcaagcgattctcctgcctgagcctcctgagtagctgggattacaggtgcgtgtcaccacccccagctaatttttttgtatttttagtagaaacagggtttcatcatgttagccaggatggtttcaatctcctatctcgtgatccacccacctgggcataagttattaaaattaatgtaattaaaatgaaataggacagttaagtaatatattaatagtattatatatgttatatattttatacattactatattaataatgttaaaaagtttgaagttttttgttttacctataatatttcactggtacatatagtgaagacaatttgtgtagaaacaggagaagtaaattatagcaacaaattaattcatgaagagcatataaaatatataatctttttgtgttttaaatatatttgaaaatcgtattttcaaattcttgccttatagaataataataatttatacggccatcaaacattctttatgtgtattgaagatacatctggaaagtcattcggtgtttttttaatgaatagcaatgcaatgggtaagaataattcatttgataatatatttatagatttcacttgaaatgttttaactgctctctttatttcaatcattcatattgtatgtgagagtaaactctattatagttaatattaacatgtgacattattataagaagattttgaaattaaagacaaaatcaatttttgcatgccagcgcatctattttggggagagtatgctatgctgtggtattcaggcactctattttcctttcaaaggaatrttgaaacacatccatgccaatgggtgttttcattcccacaatctcatttgtcgagataagtaaacatgccactacaaatgaaaacaaaaaagatgtctatggaagtagaaaaaagagwattttttttagtttatcataactcatataatgtagtattttattttgtaatattatgagtgtagtatctaataggtgaattggtgataataaaaaattaaagaaattaatcacatttcagcaggatcagtttattacwtggttttccagccagttactgtgtcttacatttagaaaagttaaattaaaacttttgacattttgtcttttagaaattaatatgtgataacttgatctttcagataatcttcaatttaaacgactaattaaaaatgcagtttyagagaaaaatcttttggtcgccagagaactaatcctttgcaactaaccctttgcaacacaatatccaggggagcttttgccaccacctgtgaaagaaaatagctgggatattttattataagcctcagacatgttggcgttttacttttttcctatgttattcctgcattcaatatttcattatttcttaattatttaaacatattgtaaaataatgtagttaatacaaattaatttaaatggactttgcaattaattactataatccttttcactatttacatataagtttaccaattttattttgcagagatttttatccagcctactccaatagtaacatatagagttaccggtggcattctggatttttacatccttctaggagatacaccagaacaagtagttcaacagtatcaacaggtgtgtttcaggtctattttataaaattttttctgcatacttttatttcatctaacatgaccacatatttagatgactttattttacatagtaggggcctcttagctaaatgttttcgaaaatcttatcatatttaagatgcagctgggtgttttttttttcccctatacaatgaactctacatatactcaagtatctatgtttctgaattcaaaatttcttacctctaggcagctgagttcaagaattggaattcattgagatgttgaatattatatatttacttattaatgactttatctgatggaataaagcaaaaggaactatcttatttaacactgaggataggcaataaatgtgtaggtcatatatccttttggtcaaaatcctagaggtaactgagttgtgagaagaccaatgaatctagccataaattcacagcaggtaaactccaggaaaattggctcttatcctggggacttcagaaggttgagtttgaaacctagcctgaaactttacatctccagttactatctaagcaactcttatttacatattaagtaacatcttgtatacctgagcccaatatgggctttagagaggtggggaacccaggacctacactgaagatgattctaaaactttcatgtaatttctctcttttaactgttgatatatatgattcctggtgttacaatggaaaagaaaattattttcattggtttaagattttaagattatgcctattttaaaaatattattttcttgatataccttttgacataaaattcccatttgcaaaaatgatctcaaaagataattgattactataaaaaattttaaattaggatccaaaaagctgaaatgagagcagctaaggttttttgcagtttaatcatttacaatgtctaatcattcccaagttcatgtttataaatgtaaaatttagaaaagaagcgcagaaagtttacagtatctgtaatataaaatcataattacagttctaggctggcctacatatagactttgtgtgtgattatcacatgaacgagagagaaacaacactctgatattccaattgtcaaacataagttggcatagctatctcccacatgttaagtaannnnnnnnnnnnnnnnnnnnnnnnnnnnnnnnnnnnnnnnnnnnnnnnnnnnnnnnnnnnnnnnnnnnnnnnnnnnnnnnnnnnnnnnnnnnnnnnnnnnnnnnnnnnnnnnnnnnnnnnnnnnnnnnnnnnnnnnnnnnnnnnnnnnnnnnnnnnnnnnnnnnnnnnnnnnnnnnnnnnnnnnnnnnnnnnnnnnnnnnnnnnnnnnnnnnnnnnnnnnnnnnnnnnnnnnnnnnnnnnnnnnnnnnnnnnnnnnnnnnnnnnnnnnnnnnnnnnnnnnnnnnnnnnnnnnnnnnnnnnnnnnnnnnnnnnnnnnnnnnnnnnnnnnnnnnnnnnnnnnnnnnnnnnnnnnnnnnnnnnnnnnnnnnnnnnnnnnnnnnnnnnnnnnnnnnnnnnnnnnnnnnnnnnnnnnnnnnnnnnnnnnnnnnnnnnnnnnnnnnnnnnnnnnnnnnnnnnnnnnnnnnnnnnnnnnnnnnnnnnnnnnnnnnnnnnnnnnnnnnnnnnnnnnnnnnnnnnnnnnnnnnnnnnnnnnnnnnnnnnnnnnnnnnnnnnnnnnnnnnnnnnnnnnnnnnnnnnnnnnnnnnnnnnnnnnnnnnnnnnnnnnnnnnnnnnnnnnnnnnnnnnnnnnnnnnnnnnnnnnnnnnnnnnnnnnnnnnnnnnnnnnnnnnnnnnnnnnnnnnnnnnnnnnnnnnnnnnnnnnnnnnnnnnnnnnnnnnnnnnnnnnnnnnnnnnnnnnnnnnnnnnnnnnnnnnnnnnnnnnnnnnnnnnnnnnnnnnnnnnnnnnnnnnnnnnnnnnnnnnnnnnnnnnnnnnnnnnnnnnnnnnnnnnnnnnnnnnnnnnnnnnnnnnnnnnnnnnnnnnnnnnnnnnnnnnnnnnnnnnnnnnnnnnnnnnnnnnnnnnnnnnnnnnnnnnnnnnnnnnnnnnnnnnnnnnnnnnnnnnnnnnnnnnnnnnnnnnnnnnnnnnnnnnnnnnnnnnnnnnnnnnnnnnnnnnnnnnnnnnnnnnnnnnnnnnnnnnnnnnnnnnnnnnnnnnnnnnnnnnnnnnnnnnnnnnnnnnnnnnnnnnnnnnnnnnnnnnnnnnnnnnnnnnnnnnnnnnnnnnnnnnnnnnnnnnnnnnnnnnnnnnnnnnnnnnnnnnnnnnnnnnnnnnnnnnnnnnnnnnnnnnnnnnnnnnnnnnnnnnnnnnnnnnnnnnnnnnnnnnnnnnnnnnnnnatatatgagaaaaaaatttatgtcaacatatatgttgattcttcacacatatatgaaaaaaaatttcaatcacatgtctaaatctttaattctatggaacatatggtgtttaggagtatagtttaaaacatactaatttttgagagctttatttgatatcaggtttatttgatatcaagtttgaaataagtttagtatttcatttgaatagaaaacaataacccaacatgagtaattaatttctttttgattgttacctagtaactttttacatatgtatcatggagaaatcatggatcctatatatatatatatatttttttaatatatataccagatatatatgtatatatataatatatatatgatatgtatataaaagcctaaaccaaagaaaatttattatgttgagtatgattatgcatcatatataacctaactggtgaaaaaaaaaaacaccagttacatccaaatttccatgtgcaaaattatatcatctgttgtaatgtgacactgatattctcttgcactgagattgcttgggccattacagaaataggaagagatggcgatccatttgtccccaggaggaagaaatgaagctgaggcactgcatgtgaataagaaagagcctatgcaataactgggtgggagcattgcagaacatatattttattaacatttttgcaaaccaggagatagataactgccaaaatgtaaggaaacagaaattctgtacttttaaacatcttttctgtttttcttgtatggtgacttgtaatagaaaataggagtgtggtggaaaattttcccttttgttatttatttgttgcttttcttgtattatcttatttaactttctacaatagacaaaacatatcttggcaaatgctactttctgatatgctacactttctaatttttaaacacaaactaaaacgtgaagtacaagacatgaacttgttaaaaatttcataacacattcaaatagaataggaaattgtttagaatccaggtaacactaaaggtttgtttaaattatataaacttaaatgaattttagagatataagaaaataagaggcacattaaccttggttattaatgctaaatatatttatttctattcaaactaattacatgctcatttactttaagcttgttggactaccagcaatgccagcatattggaatcttgggattccaactaagtcgctggaattataagtnnnnnnnnnnnnnnnnnnnntttaatcttagtagattgtatgtgtttaagaatttatgcatttcttctaggtattccaatttattggcatatagctgctcatagtagcctctaaaaattatttacatttctgtgttatctgttgtcatgtctccttttcaatcactgattttgtttatttgggccttgctttttttcttagtctagctaaaggttagttgactttgtttatattttcaaaaaacttttcatttcgttgctgttttgtactgtttgtttttcaatttcatgtatttcttctctgatcattttttctttccttctactaatttagggtttggtttgctcttgcttttctagttctttaagacatatgattaggttgtttatttaaagtttttcaacttttttgatgtaggtacttactgctataatttttccccttagcacttctttcattttatcccatagactttggtacattgtgtttccattatcatttgtcttaaaaacatttgtaaattttttcctaaatttattcattgacccagtggtcattcaggagcatattgtttaattttcatgttttcatatagcttccaaagttattcttgttatttatttctgattttattccattgtggtgtaagaaaatagttgatatgatttcaattttttttaaaaaaaaatattttaagacttgttttttggcctgacatatggtctacccttgagaataattcatgtgctgaaaaaaagaatgtctgtagccataggatacaatattctgtaaaaatctatcaggtccacttagtttataataaagattaaagacaatgtttctttgttggttttctgtctgtctggatgatctgtacaatgctgtacaaagaattctctttagcatatcttataggacttgtctggtgttgatgaaatccctcagcttttgcttgagaaaggctatatttcttttccatgtttgaaggatattttcactggatgtagtctactaagataaaagttttttttttttttgtctctacagcattttaaatatgtcatgccactctctcctggcctgtaannnnnnnnnnnnnnnnnnnnnnnnnnnnnnnnnnnnnnnnnnnnnnnnnnnnnnnnnnnnnnnnnnnnnnnnnnnnnnnnnnnnnnnnnnnnnnnnnnnnnnnnnnnnnnnnnnnnnnnnnnnnnnnnnnnnnnnnnnnnnnnnnnnnnnnnnnnnnnnnnnnnnnnnnnnnnnnnnnnnnnnnnnnnnnnnnnnnnnnnnnnnnnnnnnnnnnnnnnnnnnnnnnnnnnnnnnnnnnnnnnnnnnnnnnnnnnnnnnnnnnnnnnnnnnnnnnnnnnnnnnnnnnnnnnnnnnnnnnnnnnnnnnnnnnnnnnnnnnnnnnnnnnnnnnnnnnnnnnnnnnnnnnnnnnnnnnnnnnnnnnnnnnnnnnnnnnnnnnnnnnnnnnnnnnnnnnnnnnnnnnnnnnnnnnnnnnnnnnnnnnnnnnnnnnnnnnnnnnnnnnnnnnnnnnnnnnnnnnnnnnnnnnnnnnnnnnnnnnnnnnnnnnnnnnnncttttcattaaatttatctgatagaaccctaaactcctccacgttatcctggatttcactgaatttccccaaaacagctatttcgaattttctgtctgaaagttcacacatctctgtctttccaggattggtctctggtaacttatttagttcgttttgtgaattctggttttcctggatggtcttgattcttgtggatgtttgtcactgtctgggcactgaagagttaggtatttataatagtcttcacagtctaggcttgtttttgcccatcctcattcataggttttccgggtattctaagggacttgggttttgtgatctaagtctttgttaactgcagctgtatctgctttaggaggcacctcaagcccaataatgccatggctcttgcagactcatagcctatggctagcgctgttctaaatgctccacctatgggtgtaagctgatttctgcccctttgtactttctgctgtggcaggccaatactgagctccaatgcaaaagaccacaatcactttgctctcccttcagaaagtgcacagattctctctccatgcaccatgggcactgttggggaatgtgagaggggtgatgtatgcaatccaagactctctttcctaccctcttcaatgactcttcacttgatatgatgctaaaatcaggtactgtgatcactcacctgaatttggttcttaggaaggtactttctttgtgtatgggtagttgttcaatttgatgcttctgcagggggggatggtcactggaggcttcttttcagccattttgctctgtctctctgccataagcttcattcttatcacattcatccaacttaaagtttcccgtgaaagtcttttaaataattatgaactccttttgtaaaaaaagaaagcccacacaatttcctacccttaattaacatttcacagaacacatgttaacaccagctttgttccttatggacagatcagacagccratttgaaatgtttggatacaaaacaatataatttagctcaacttatctgaaattaaattctccttgcctaatgtgattattgtaagtaataagtcaaataatgtaaaataatttcaagaagcctaaatcagaaaaagacagcataatacacatagtgtttaacagcatggactcaggtgtaagactgtttgggtttaaattgctgctgtacctgttattagtagattgactttgaacaacttacttaacttctctgggcatcacttctctaatctgcaaaatgactttaattacagtacctacctcatctgtaagtggtgataaaaatagtacctgctttcaaaaattctaatgaagattatatgttagtaattatgaaagtacttgaaatagtgcccagtatgtatcatattcatgtttattcatacaaataaacataaaagacagtttttaaaattgcttggaggcatacacctttggaaataagctaatgtgctttattttatgggatataaaatatattatatagaatatttattgtgtatgtattaaactatcctacaaggatgcttaaaaacaaatttacagtcaaaatagcagccttataccatgttctgataatttttttcttcctaaatgtttcatgatttcacctttttttaactgctcttctttaaatgcattttaaagtcatgatattcttgtaaatttatatatgagtcacatatacctaaagaagtagaataactttatttttttttactattctcaactttattaatttgaaattccatttatttatttttctattttttatgtatatatgtgaatgatctattcttctaggtatggccaggattaacagtataccctgatttcactaatccaaactgcattgattggtgggcaaatgaatgcagtattttccatcaagaagtgcaatatgatggactttggattgtaagtagctattttaaaccaatgattttggtcaatgaccatagacttatttatctgtaaaaattactaagtcaacaaaatatttttttctgatgtattcaatgtaaaatttaaagctactataatgttttttcccagaatggataaatatacccatcgtgtgcataagtaagaaaacaaaacaaaacaaaaaatgccaatcaaggtttttcttttttagcaatacactgtatagaataaattttatttctgtatgcaaggttttgttcctttatgactaatactttacctgaaaattagttaataagatttggtgataagcctattgcagtgcaattagcaaaacatttattaaagttgacaacagtcaagcaacagcagcaatatgatctgaataagcccctgccctttagagacttctctttagtaagctatggaagagaataaataaaaattggcaataggttaagtattactatatctcaaaaaagcaacaaacagaatcctagtttgctcataaacttattaaagaaaaatacagtcttgtgtgatggctcatgcatgtaatcccagcactttgggaggctgaggtgagccaatcatttgaggtcaggagttcgagaccagcccgaccaacatggtgaaaccccgtctctactaaaaatacaaaaattagttgggcttggtggcacatgcctgtaactgaggcagaagaattgcttgaacccgggaggtggaggttgcctgtgagccaagatggtgccactgcattctagcctgggcaacaagagtgaaactctgtctcagaaaagaaaaaaaaatacaagtgtttaagagtttctttaaatgaagttgtgtatctgtagttattgatggcctgctgctagggatagaaactaaattaccactggcaagaatttggaaaaagtacataatggacacactaaggatgactatattttctttggtttttaggtccacaccrtctctattttccttaagtgctcattattgattcaatcattattctaattattcacttatttattaaatcaatcaatcatttagttagcaaaaatttattttgcaccgtgtatctatcagacatgttgttgggaatacaaagatggaaagattatgtttctgctgacaacatggatttgggtaaaggattagcataatcttcaggattcctatgatgacagtaacaaaatgaagatgaaaagccttcagttatttaacataaaatcagtgatatcacaccactaataactagcaattggtagaaataaaaaaaatttactgtgatcttgagctttatttttaattctagttcttatattatttaacctatattgaaagtttctttagtcttttatttttttcttagttaggagccactttgattacggtaaagttacaagtataaataatactgtaggaatagtgagacagagcctgattgtgttatagaaagagagagtgttgcatttcttgcattcattgagaactgaaattcctgattcacctccaaagtgtgggagagaaggttrtctgagaaaggcagagtatttccaacactgctacagaagcactgtaactaagccttaaacaaacaaacaaaaaacacaagaagcagtataatttcaaagatcagtgaacatcagtgaactaatatatatcatggataaacagtggatattctacttttagctattacttatctacttgccatatcacactgctaagtggtttatctaattatttcactttcttcagattattgtttctgatccagctaaaacaagttgttattcaactgataaagttttaatatttatgtcaagtataaaaatagttttataatttactagatttgtaatttagtttccatgctaatatttgtgaattttaggtttaaatattaaaatcactttgggaaatgatgtgagcttaattgtcattgaagtatagtttttgtgtataaaatataataaatttgaattctctttttttacatcatttatgggataatcgaatagttgagaaacaaaagcctactgtacttaatgtaattaagaccaaaactatgatttcaaaacaaaagtgtcagtcaatatttttaaaattaaaataccatttccattttttgaatacatatgcatattttgatatcattgttgttattttggttctattcttaaaaatctaataagcaaaattattcaatgaaaaaactgaataatttaatatatagtatttggaaacataaattttataagaagatatgcccaaataagtttacatatccaaataactagaagcttatttggttatattctttctacatttcatgtgaatcttataaaaatgaaattcttttacaaattcttttaaaaatagggctatatatatttagatttagtttaaatgtgagtataaaatgccatcagatcactatcacaatttttaaggaattttaaagaaacttgaggtacattctcagaaacaaagttgacgatttttttttgttttttgagactaagtcttgctctgtcacccaggctgtagtgctgtggcgctaacttggctcactgcaacctccgccacccaggttcaaaagattctccctgcctcagcctcccgaggagctgggattacaggtgcacttcaccacgcccagctaatttttgtatttttagtagagacggggttttgccatgttggccaggctggtctcgaactcctggactcaaatgatccacccgcccttggcctcaaaaaatagtttttaatagacttaagatgatttgaatgacacctacatatctttagatgtttttattactatcagtccactgaggcttttgcctcatgactacaatgttccaaatctactagttgtaatattaaaaatcttaatttaatgcagtggtatatgacattaaataactgtagtttcacttaaatcatttggataaattagagaattaaaatgcttttataattttcaaaatgccacttaaaaacactacaatagataaattcttttaaaatatgggtagtaagtttaatttaatacaatcttgctatatagacatactttagacatatttaaggaaggttactaaaatattaaatgtcatgtattatgtaaaatatggttaaaattatgaaaaaaaattttgcctcagtaggttaataatttatattcttggttcaaaaaactattttcccttttattgtgagctggcaaaataatcacattctgattcaatcatgttgaaatggtcatacaataaaacttttaaatatttttaaaattattttcagtaaaaccaattaattattttctaaaaaaatttttcatccttaaattacataataatgtttactttcagtgatgaaagattttgtgaaatttatggcaaatttacacatatttaactcaaatagaaatgatattaatatcatagatgagtgttttacccttgcaattcctcaactatattatatattcggatgttaaaattgtttagaaaaagactcttttaaaatttaaaataatgcagctcactattcccaaattatacatttcagcagcagttttttaaaaatttaatgttattggcggaatcatgaagaaaaatgtagtttacctacacttatttgctgtgtaactatggtataccattattaatttctactggacacaggaaacaaaattgaatataacattccagacaatttcaaaaaaataactcaatgtagctttagatatttttgtactttggaataactatattaatttctctcatttctgcttactctgaaaacatttgggaagtggaaatatataccgattaaacgtgtcatgataacaaatctattcttttttcccttgagcaccattaatttatcatttcaattccatgtatcaaatttccttagcttctttttatatccatagttagaaacttttatgagaatattttgagaataatagagatgaataatcatattgagtgtgcttgggtcagaggaactcaatatttatggaagcttttgcaaactaaataagtatgtctagttatagttataattttatgaaacaaatgactacaatacaaatgattcaccattacatgtgtttagaaaattattttattagtgtctttgagtgacaccatcggtctcagatattttctaatctgttaataaatattatctgggaagtctcagaaagtagtatgaaagataggtttaatgattgcaaagttaatataggagtgttaaggttaaagggaggattgaaagctgaaataagaggggaaggattcaagaagctgaaaagcagtgagtcttaaaatataggcatgatgtggatggggaaaaggaaatgtaattaagaaaatctactttttctgagagaaataaaagtaacacagacaaggatgtgactgaatgtgatgtctttatgtgaaaggagactattatagagatgagaaaaataaggcttatagaagtcctcaacacagtttgcagagaagaaagatgaaatgcatatttcttgagtatatgtactgtgatatatgattttataaaatttatcttttttagtgcaaagacttaactgggttatggtcacatagctagcaggcagtgggacaagattggggcctatgttaaaatggctagaaaatccatgaacataatatcccaccactatttcttcaagagatgtttaggtcttggttctcagagtgtgatcatgctcacctggggttctctgaatgtttcagagattctgtgaagccataactattttaattaaaatactaaaggctatttgcctttttacagctttcattcttttatgagtgtataggagctgttggtaggcaaattttgctgctagcaatgtgcttagcacatcatagaaactaggtaagtttaaatgaaaccaaacatattgaatcaatgaatatgcaaggaatgtgtatattaatggactcataatgagaagactaacagctatttagaaatgacttaatacttataattaatgtaattatatataatcaaaactagacacatgaactacattttgattgtttaaaatctctctatcccatctaagatacttatctgatatagacattctgtttatttttaggttggtagcttatatttatcttctaggaattaacgagcattatggttatcttatataaaacattttcaaacaactagagagtttctgctaataggatttataattatgtaaaatctgctgttcttcattttgtatccattcaggacatgaatgaagtttccagctttattcaaggttcaacaaaaggatgtaatgtaaacaaattgaattatccaccgtttactcctggtaaaatttatttggttatctaattactgttttaattgagaataattttgtagttgactagtaatttctaacatatatttctaaattacaatttttggtatagttctaaaaccataaaatcaatttgtttatcttttcttcagacaaatattttctgcctaggattatatttaaatagacaaatctagtataaggctttaaaattggtccataaatatatgatgtacaatatagtttggtataggtatatttctatattgttaaaggttatttttaaagttaaattatttgttatcgaagttaggaaacagagtatttgccaatgtaaatataaatctaatagttaatccaagtttagcaagagtgaaagatgaggacctaattggaacttattttaggtttaattggattgtcctttgtcattgtttttgaccaaatatggaatttcataacacaaatgaaaaggaatatgacatttatgatggaaaatatataacttttataatggaaaaatataagaaatgtttcttatgtattttctcaaagatattcttgacaaactcatgtattccaaaacaatttgcatggatgctgtgcagaactggggtaaacagtatgatgttcatagcctctatggatacagcatggctatagccacagagcagtaagtgcaatttcattcaaagacttctttcatatttattgcttaaaaatgtttttgataatttatcaatgtattcatagttaggaaatagcaaagtttaaaaaaattaagataatattttatgcctgctaaaaagttatggcattcaaaatatcagttctcttactaatattcatgaatttgggactcatttattaagaatgacatggtaggctgggtgcagtggctcacacatgtaaccccagcacattgggaggccgaggcaggcacaacacctgaagtcaggagtctgagaccagcctggccaacatggcgaaacccagtctctattaaaaatacaaatctagctgggcgaggtggcaggcacctgtaatcccagttacttcggaggctgaggcagaagaatagtttgaacccaggaggcagaggttgcagtgagccgagatcatgccactgcactccagcctgggtgacagagctagactcagtctccaaaaacaaacaaacaaaaaagaatgaytctctctctctctctctctctmtmwmtatatatatatatatacatatatatatgtatatatatatttaactaagactcttttttgtaactcctagatttaaattatccttcaaaattttaccatttctgaatataactgtgttttaagcttgcatctcacaattagcctgggaaaatattgccccaagaacaggtctttaactatttttcaaaaagaagtattttaattaaaaygtagttttctaattaatatccttctaactaattttctaatacatttttataaaatatgatacaaaacaaaagaagaaaacaatcatatgttcattatctactaattttcaagcattgtttatggtcctgtgatacaatagtcagtaaaccaaatactattctcaatatacttacgattttctcataattaaacagttgtgattgagtgtttattcaaatttgtatttttatggtcttaaatcatactgataccagaactcttaaccactgtattcatggtgttacttcaatttactttgtaaactcaatggagtattacatgaagcagtgtttaagttaatatatcctaggaaagaaaaaacaggctatgtttcaatataataaagattataacatggaaaagcacttgagaatgtagttacacatttcctaattgtttccaattatgaaaatgttatcaataatagttaggtaacgtgagtgatgcttgtagttgtggacagtggttaacttctagaaactaaaaaaaaaaatcttcttaattatgtaagttttatcccaaccttgcctgctaatatttgaaaatgtmgaaataaatatataattggagtcatcacactacaaaaaatgtattaggttcaagttcaggtataatattttctatttataagggaattcaattactttaaatattatatttcaaaaccaaatgttgagtggataccaaatgcccatgtttatgtaatttgataaaggatgattggagtcattcaaaatttagtgatttctaaaaattccttttcactgtattttaccagaatatatttaaataagtaaatattaataacaaaatacaaaattgatataaaattttgacataattattataaatattatggcatggtgtattagcccagtttcatgccactgataagacatacctgagactgggcaatttactaaagaaggaggtttattggatttacagttccacatggctgggggggcctcacaatcatggcagaagacaaggagaagcaagtaacatcttaggtggatggcagcaggcaaagagagagcttgttcagggaaactcctatttctttaaaaccgtcagatctcatgagactcattaactatcataagaacagtgtaggaaagacccacccccataattcaatcatctcccatcgggtttctctcacaacatctgggaattgtggaagttacaattcaagatgagatttgggtggggacacagccaaactatatcacatggctttggaattatgaaattttagaatttaaataccaactttattttttaaaataaattgtatttgttaatttggttttatttttagagctgtacaaaaagtttttcctaataagagaagcttcattcttacccgctcaacatttgctggatctggaagacatgctgctcattggttaggagacaatactgcttcatgggaacaaatggaatggtctataactggaatgctggagttcagtttgtttggaatacctttggtaagacagtttcatagagtgttactcataaaagctacaattacattaatttttaatgtaatcttaattaattttagtaaaatgatcaaaaggcatgttacagaaataattcagttttttatttttatggagtttatgaggaaaataagaatacagatggtatctataatttccaaccattaaagtgggaatgtagaactaataaaattcaatgaaatcaagataattgaggaaaacaaatataaatataaacagcatagaaaagcttatatgaaagatgtaaagaaaaaaataagatggtgaagaaaagttcaaatacattggttataaaaataaatgtcagaagtctaagtctacttaaaatattagattaccagtttagattttaaaagataatcttttgtttacaatatatataaaacataagaacagaaaaaaagtttaaaatttcaaaagtggagaaaatgtgtactaggaattgtagacatgaaatatctgagaagtctaactctatcaaacaaaaacatagcatccaatattgatattcaagactaaagagagacactacataacaaaaataatgtagaaggtattataaaactatagtgatttgttttctttcatatgcacaaataaaacaaacaccaaaaacccgatcaataaaagtaacacccccacacacaatcttgtgtttgaaaattgaaaaataggctggacaaggtggctcactcctgtaatcccagcaatttgagaagccgaggtaggtggatcacttgaggtcaggagtttgagaccagcctggccaacatggtgaaaccctgtctctaccaaaaataccaaaagacgggcatgatggcaggcacctgtagtcccagctacttgggaagctgaggcaggagaatcgtttgaacctgggaggtggaggttgcacagagccaagattgggactcacttttttgagaccctatctcaaaaaaaaaaaaaaaattgaaaaacatattatcaaattcattcatgagtcaaaagataaactgaatagaattgaaaaaaaaacaacctaagaattaactgttaacaattttacttattaaatcttgggaaatttcagctgttaatatttaaagaaaaacttactgatttaaatacttaaaaagaaagaaacgctgaacagtgagtgaagtgcatgaatttaaaaagtggaaaaggagaaacaataaacctaaagaaagatgtaagtaattaaaataagagaaaaaattaatacaatgtaaacaaaatctctagaggaaaaattttaaaatacaaaggtggctcttcaaaacttttaataaaatagatcaatttatagcatatttgttaaaaaaagaaggaaaaacaagcaatattcaaatgtattttagtataaggtgtcacttattatagcaaccaattaataaactgtaaccaacagtcaatattaaaactaaatgtaggactttttgagaaaatataagtgatagctaagtaaattaaagatataccctgttcaataataagaaggctcaatatattaggaataggcattctctacaaaatgttatcaaaattttgtggaattccaatttaaacaataaaagggattttgggaaacataaaaggtgactctaaacttcatatggaaaacaatacattttaaagaagtagagaaaaagaatgaggattagttctaaccagataaagctgtagttattaacacaatgatactggactgtggatatacaaatagattaacacagcaaaataagacacaggcccaygcatgtataatttgttaaatgacagcagtgaagggaagtatcaactatttatatggactattgactcagtatttaggaaacaatataaaatgtgtcaatttctcacaccatgcacaataaacagtcccagatagattaagggacctatgtgtgtaaaataaactttatccatttcagaagaaaatataaaatggtaaatttatgacatcaggttagagaaataatttcttaagcagaatacaaggagaataaatcttaagagaaacatacataaatttgactacaacaaaatgaaaacttctgttcatcaaaagaacatttgaaaagttaaaaattaaaagcaactcaccaggaaatgttattttcaattcacatagtctataaatgatattcaatttgaagtgcctaccttaaatctgtaaaaattaagaacaatagaaaaataagtaaaagatataaacaggcaattctatagaaagagtaatctatagggacccaataaaaatatgaaaaacttctcaatttccctgtaatcagagaaatgcaagtaaaaactgtggtgagatatattttatgaagaaaggtgataaaatttgtctgaaaatatcaagaattggcaagaaaatgaagaaggggaatcttcgtgtgctatatagtgcttgcaaatggttacaaacagttccgattatacaatgcacattataagtaaaccagaaaaataatcctatgtatgtacaccatagaataagaatatgttttttacatattcacaaggatatctatacagggtgagtaacccctatccaaaatgtgtgggaccagaagagtttcagatttcaggtattttcagatattttaatatttacatatatgtaatgaaatgacttaaatgagcaaatttatgtttcatatacaccttatacacatagtttgaaggtaattttatataattttgttcaggaaacagttttgactgcaacctgtcacttgaggtaaggtatggaactttccacttctggcattatgttggctctcaaaatgttttggattttgaagtatttcagattttggatttttggattagggatgctcagcctatatataaatttcacggaagaatttttatagtcatgagttcccatatactggagaactagagtgacattaatataattgaatttcacacaaaaaggaaattacattataatgcatacaacatgtcatttatacwgttaagaaaacatgcaaaacaatgctatatattgtttatagatacatatatacttacacagaaaaaataaagaaatgtttgtaaatggtaaacactaaattcargatagtattttctggagagtccttgaataaggataatgcagtcttacatgggtacacatcgggcaaagctcaattttattcagaataattaatttcaaagctcaacatgaacacatggtcacagtttgttattttattcctacagttacatattatattataaataagaaaaatcaaatcaaagaagttgagttagggattaagaagcaaccaacatattttaatacagtaatttcatcttttacaatgaattaatgagaacatcaaaataaaaaatgagtaaaatgtaaatacaaaaggataagaaaatgcataaagggacaatgaaggaaagaacatataaaataatgcaactagagacaaggatrsagcaaaaayggaaaataaattggtttaaggaagcatatataaaaggagtaaaacaaattgtatataaggcacattcatcagttgaggcatacagtgtgatgctctaggcaaatttgagaatcttaacattataaatagtaaatatatttgttatttaggttggagcagacatctgtggatttgtggctgaaaccacagaagaactttgcagaagatggatgcaacttggggcattttatccattttccagaaaccataattctgacggatatgaagtaagagcctcttgttctccatgttgcgaaataaaaaacaaccatagtttttattaatgtacttaaattaaatctatagagtatatggtctgaaagattgtagcataattcataagacattgttagaagtccctctctcaagtcctatacatattttgtatatttttacattttttaaaaaacggtcaaataaggaaatcatgaaatgcaatgtattcacagcacaaatattttagttgagactaacgcataactgtacaagtatattaagttaccggtattttaaagtagagccaaagcttttagagtatgaattcttggattctaacaatgtaagttccaggtaacttttatacaaagaaaagttataatatactgtcatggattttgagtttgtgtttagttcatgtaaaacaagaatttaaagatagtcacaaaacaattagagtccagcgtctttcaataataaatagaactggcatagagacaaaaacaaaactaacacttttaaaacacgattttggactggtaggagcagaagtgcaagacaatacaaagctagtctaccagccgtgggaactcagcatactgtgggctcatgatcataggcatgtttttcggagagaatagtaaaattcagttaaaccattaagtcaattaagtatctgttggttaagaaaccgttcagtgttcacacactggttgcatacagggcttatattgtgtttgagaagagggacaactactgagctcagcctggaaggaggcatgatggaaaaaaattaaaaggtacaaattggagattagtttcttcctaatacaccgaaatgatactttcaggaaatgtgtgtccatgggagattttgatagaaattacatgacactctgcgttcacttgtattctccaaaatgctgatgataagacagaaataaattttgaaatttattggtgaaataatgtgaatgacaaagggagtgggcatgagaaaatgaggagagcctgcagaccaccgttcaggtctgaacttgatgaagatgaagggaaggaaggtggtttggtaggcagaatcccgaattgcgcctagttctaaccaagtttcaatcaagtgagtggggagtccttcagggaaagttgaccattgacctttcttgcatctcccaagaataggcctgcatggtgttcttactatgctcattcaaggctgggagcagcactgggaaacatggttttcagtgcaaacttaatagtggattcagggagacagtagttgaggtcttcagttaatattgttatccaaagcaagaggtctaaacaggcttgtccatatcagtgttacttggctgaaggagtcacttatctaccctgagctcagtagagaggctgcactacaaattgtaagtctacaggctgtccaggtagctctgttcactgtgttcctgagccagcaacctatctgtgataattctaatagcaatgggataagacagtaagtccttaggcaagcccatttcaagcctctgctttagtgtgtcacatgtaataacatcctattggccagagtagtttgcatgactgagcgccacatcgaagcatgggtaggcaccctccaccttcactggtagggattacaacattccatgataaaggctgtgggtacaaggaagcatgaaacattgatttacaagataaaaattctattttgtaaaaaaaaaatttattttttctgtggcaacgctttaaatatgttgaaatgtccacttcaaaattaagtttaattaaaatatataacaaaacctagaaatattcattcagacactttgatgatgaaataggaataattttaatttctcataaacaagctgaaatttatgtagttgctttaaaaagcagattaaaatgcttctactttaattttcactcatactttagctttcttattttaatttctctttctatctcacagcatcaggatcctgcattttttgggcagaattcacttttggttaaatcatcaaggcagtatttaactattcgctacaccttattacccttcctctacactctgttttataaagcccatgtgtttggagaaacagtagcaagaccagttcttcatgagtgagtactacgtacaataattataataataccttttaaagtatgttcaaacatacacagaaaagtttaatggaggtaaatcaagatatcaattaaatttctgctgcttgtttttacattggtgtaaatgatttgaagagctatataatgatgccagtaaatataattaattggacaatatttaggtagaaatgagagaattaaatagaacttacaaggaaaagatatataaaatatgttaggatattatatcagtaaagagattaagcatagaatttttaaaaatacatcaactaaatattgaaagtataaactaaatatagatcaagagtagagtataaaacttacaaaaaagggaaattgtgcttatctttgcatgtatctttgaccagagcagggcctttctgtgatgacttaaagatccttttaaattcaggtaaaaactagagcttaccacaaaaaagttaagtgaagaaagtagaacatgaaagatttccgatactttatgaacctatcttataggagaaaataatttaacaggagaatttttgtataaataaaaagtaaccttgtcatctgtgatagatttttctgagtatgagataaactttctccttctcttttcttccttccttcttcccttccctaccccttttctactttccttccctctgttcccatcccttcctcctatcctccctcccctccttctttccttcatttcttccttttcctttctccctcttctactccccccttcttccttcttcccttcctcccttccttcctgagtgtcagatgaacaataaaggatgtaagaaccatgaattgaaaatgtcatctgaaacaagcacaattcaagataacaacaattcccaggaaaaaactgaaaagataaactgaaccaggaatttggataaacttattttttcattattatactttaaacattgtcattgttcttaggttttatgaggatacgaacagctggattgaggacactgagtttttgtggggccctgcattacttattactcctgttctaaaacaggtaggctctacaggtttaataaccttattgtttgatctttgtataactaaatcgaccctacattacaaaacatctgaataatagatgttactcagtggactgtttcaagctgataaacatcaagttggaattctacgatgtgacacaaatttcaaaatgttataaaaatattaagtagattgcttaccaaatatgtgatatctaacctggggacaagaaaattgtatgaagttatttttctcctgaaaaaaaaaactgtattatcaaatcaaaatcaattcataataacaaagagttctcatttaagtagacatatacattgaaattttgctcaattgtaaataaagaggaactggaaaactcgctgatcagatgaaaatgttggagaaacactggagtgggttggtaattattacctatttttaaaaggtgcatgtgtccattgaggtatacagaaataaacatattcacattcacaatgaccatgtgttttataacaatacacatatatgcatgcattattttaattgctatctaaattacttttttatttacctctttgcttttttaagttttacaatatgatattatctaaagctaataaaatagccctttgattattatctataggaaatattggagtgtaacaacataaagtttttttcccttgactatgaaaacccaacttaatatttgataagatcctccttgttaaaaattgaaattaaaaaatacatattatctttattttagggagcagatactgtgagtgcctacatccctgatgctatttggtatgattatgaatctgtaagtaaccttaacatactaatggactcacaagtattatattttcaaacacttctacatagaaacttaattccatagaaacttaactacatagcatacatatttttagaatttctgtcattactataaaaaataataatttcagactttaaaaatgtgttaaaatttgtgtaagtataccctttgttgcacatgagctagactcaaatatgaagttatattatttagcataaagagatattatttatttttaaattttggaaataaaaggttagcagtaatttaggaaggagtggcaacttattttaatgctttttcctattttacatatttatcttattgccagaagacttgagtactgagctagtcttatatatttgtttttatatggtatattcaaatatttgaaaaaggcttttatttcaaccttgaagaggcaaaataacagcactcaaatacaccatccattttttcaattgaacaagaccttttgagcaatatttatttatttttttttttttgaatttttttttagtagagatggggtttcaccatgttggccaggatagtctcgatctcctgaccttgtgatccgcccgccatggcctcccaaagtgctggaattacaggggtgagccactgcgcctggcctgcaatatttattttaaatgatattattttgcatatcacttatattggctaagtataccctttatttttacggaaataatgattttaagaaaatccttcctaaaggcataaactttaaaccaaaacaaagaataaaaaagctaattaaagtactgttaattattgtagaaagaaaatgagtctctttttgttgatttttttatttttgagaaagtgaacttatttttcctctactttgttcagcaaactgaaaaaaaaaattctcctaaagttagaaaacaatatattcgtattcatttggatgacatgaattgctcataataaaaatgccttttaattcttgtgaaatagagtttaaagtcttcaataatattaagaatgtttttaatcttccaattattagggtgcaaaaaggccatggaggaaacaacgggttgatatgtatcttccagcagacaaaataggattacatcttagaggaggttatatcatccccattcaagaaccagatgtaacaacaacagcaaggtaaaatgaaaaatcattagttgaaatctaaaataaaattcaaatcttaatatttcatatttgcattaagaattagagataatatttagtttctgcaccagaagatatttgacatacagaggtaatactgaactataaccatcatagctataaaaagaatgaaattatttatattattataaatatcttgattttcaaaatttctaatttacttagaagttaacttcctgtatcaaaaatttacccacattagcataattaaagataatatttgattcttaataactatacaaaatgtgaatatttgttatataattgagtgaagtatttgttaatttttacatatttgaatttccatacatacataaatcccaatgtatttctttctgctaaaatgctttaagttcataaatgaactggatattttatgttaggtaaagagtgagagagaaactaaattgctcactaagtgtaaatctcagaaatattttctaaaaataaaagaaacttgaaaatgctggtgctccatttcacatattcattctgagtacaaagagcacagaaagtgccgtattgaatttacatacttttccctattctgccacaacccaacaggaagttactctttattccttaccctactgtattttcttcataacattaagaatatctgaaattatattatttattcttttcttgtatgtagtatgttagcgatacgcattagtaattagtaatttaactgttttggcattctggaatggactagtatcacaatgtaactgatacaagagtatgttctcaaaaaattgttatacaccasagctgtaatgatcaacagcaacaaacactttggtaaatgcatactggaaggaatacatcctatacagtccaggagatgcctggtaaaatgtaactaaaaaaaaaaaccatatttcttgactacatctcattactcctgttataatcatttcatttataagattcttacagattccactaaactttttttaaattttaatcatatttttttttctcataagatgtagacttaatacattgagatttaggattacacaggttgagttgagccttaataagacatttaatttttcttgtttgaattaaaatattatattatttcaattttgcaagtatctcagccttcaaaaaatccattattgcatttattacatttattcttttgacttattttctacatgtataaattatttcggtattcacataagaacattggtatcggtaaattattaatacatataaatacaaatttattgatgtcaatgtccttactgaattcagggcccataaaacagacaggttgaagtggacttgtttataggatattgtattattatggatttatttttaaccatatatgcacctaatttttcttaacagccgtaagaatcctctaggacttatagtcgcattaggtgaaaacaacacagccaaaggagactttttctgggatgatggagaaactaaaggtaagtctgaaagtaatacgctttaaatgttcactctgataatgggaagttttggctttattgatataggttgtatcattttttaaatatcacgaatttttatttttaattcctaatgttttttatctgtttcaggcttttaggctactttaaaacttttaacattgttatttgctttatctatatgtaactaaaatatccagttttgtgcttttgtttgttgtaagtctttggcaagatttttaatctatctttatctattagattaaaatagtcaataaattctcagatatactaattgcattatattttcaactgttttaaagtaaggtagtgattataactaaaattttgttactgtaaacagaaaataaaaccaacatttaaagatttagttatttaatgtcaaattatttgaggtaagaatatcatcgtatcaattgtttacaatttattttccttattatctttaattgaatttcttgagctccaaacttgggaattcagtataccaaacaaaatgtttaaaagtaatcttctgctatggtatttctaattatgccatagtaagtttgtctatttgtatttaactattcacttacaattttccttatacatttttagaaactttttagaaaaatctcgtttcttctaatagagggctgttaggtatgtgttttatatatgagtataaaaattataatttatcttctattttaattaactacttctcaggtgtattaaggaatatccttgtacaaattttaaagagttacagataaatataggaaggacaacaagaagaaaaagactatcctaaatgcctttaaatgtatatgaaacatgtgaatatttatttatttttgaaaatgtgtatatttaaaaattaccacaggattctataattctctcctaagacttacattcaccctcagttaacattcatttaaataaattacatttatttatggcattatttcaatgtattagcaatcaaacttattctaaggaaagatctattctctgggtgattttctcaatgcaagctatgaattacttgtatcattaacagctattaattataaatattctctgtcttttaattattactattctttaccagtagtcctttccttgataaatgtagtcttttataccatttacctgactttcaaatttatatctccaaaccagtcttctatgtacttctctatttgtttgtctaataaaaatctaaaacataatctgccaagatagaacttggatcttaccaccatgtatctgctccatctatcgtgttccctttgtcagttgatggtaacttcattgctacagatgccaacaccttggaatgggctattatctctcacaacctaaggatttcattggttctactttgatctgaagcctctcatcagttcccccactgtcaccaccatctttcatgttaatttagggcaataacttcctaactggcctgtagctctttttaaccccttttaaaattttattacaatccagcaggtagagtaatcattttaaaaggtgattccagtaattgcatctcttctcaaaaccttctaatgatcctccattttactcagttaggagacggagttttatcgagacctagagagcttattatttgtgctttaacatgtgcacacgtgcatgcgcgcacacacatacacgcacccacacacacacaaacacattatcctgtattgctttctatttctcattcaattttagcacaccaatcttcttgctctttcttaaataccctggggtgtaagcacactagggtgagctctcctgtgagattagattccaaacctattctctggcttatgtagtaagccaaaacttagtacatagaagttttgtaaaagtggatttcagctgaacttaacattgcttgtagtcatcaatcaaacaatgttgagataatacctccattgatagcatgtgtggagcaattataagattattcctattactcaaattatataaatactccaaatacatactgtctactgataaagatgcatatgaatagcttactttcatataagtaagtagttaagaatatgaataatataattcaatcagttatctaatatgatacctatgtagctatgtgcatttaaaaagtgaaagaaaaccagaattctgattaatggatttgtaagcaaacatggagacagtaaagtgatcttcagttcaggttctgaatataatattatttcctaggactaaaattttaagcaaattaatgttatggaaagtatattatatgaatcctaggattccctttatattttaacactgtttatgacaaactatttcagtccttatcttcagtttttctttaaagagatacattgaataaaagttatattacatatatggtacagaatcattgtattcatccattttcctcattaaagtttatttaaatttcagactaaagtttatttcaatcttcaacatgtctccagatttattgttttccttgaataaaaaataatagaaaaaaataaaaagatgcaaaatgtattataatatgccatgtcttcctaagaaaaatgtactgttatgaggtttacaagggagagaatatctttcaaaataatacatttttaattatatattatttactgtaagttttgctttctcttaatttccagaaataccttggtagtctttgaaaaaataagcaaggcaaatatgtattcattacctctacttgctgtgaaaatgaaataccattattatataatttagagacaattaaaaaatttaaaaacaaaatctgtttgggatgcttcattaataaacagcatctagtttgttctaatttcttaagtgttgtataagtgtaaaaccagagcagagaatttaacattgcattttgtactgatcacgatatttttcatttcagatacaatacaaaatggcaactacatattatatacattttcagtttctaatgtaagcactctctttgtacatatacttaaatgcataatttgttcatgcctaggttattcttttatgataaattttttggaaaagatgtttacatttgcctacagattttaatggaatgtaatgaaataaattgttcaattaaattgttatatttaaattgttaaattataaataaattgttaccttaaaattttataaagtttgtgaccatgtaattgatggaaagaaacctttagacttcttgacatgttatgattggttttaggcaacatgccctaggaaaacaatttcaacatatctgaaaatgttttaatgaattagtcacagtaataattggtgtggattttggtttattaaattttgaatagttaatagaaatgattttttcatagattttgggttttttcatacattcttctttagcaaagctaaattattcttcatcaatgttaggactagaatgagtatatatgtgttgcatatgagtaattaaggttatctctgaaaataaaattttctggcatatatataaaaatgaaaatagatattaatgagtatatttctatgtgctacttggatgaggagagctggtgggaatagagatgtagatgatgacctttttttgctatttcttatcggtattgttatttcaggtttgtatctgatgacctaatatataatatcttatactatttttctcagaacacattagatattgtgtgcacacattcatcatatcaggaaggaactaccttagcatttcagactgtaaaaatccttgggttgacagacagtgttacagaagttagagtggcggaaaataatcaaccaatgaacgctcattccaatttcacttatgatgcttctaaccaggtaattacaatcttttaaaatattttagctatcatataatctcatatttaatattatataaccattcaggcacttatcctatttctcctcacagtgtgtattcctttcttcccttcgttgcttccttcttcccttcatttttttcttcactttttctgaacaatattccaatttatgtcaatccaatttgtatttagatatcaacatgaagggaattccttgctatttctctctatatatttcattttctcatgcattctaattatatgggactttctaatattttccataaaaattcttcaaatctgaactctaacctacctattgcatgcaaaagaaaatcccaaatgttttagctgctttagactctttaacaaattggttttgttcatttctttagtctttctcctgtttcttttttagtgaggtctcattgtcctcaaaatatatcttgtacttttctaactttaattttgtgtttacacttttcttctcctgtagaaagccttccttatattgtgatttttgtctctttttacagttgtagtatagaggggaaaaaataacaaaattggatgcactgttattggatgcacagattataactctgctatctctgcttctaaacgcattaaatcaatctctcattattttagctttctcatttgcaaaatgtaatatttcaatcataatgttgctttgggtagtagattgatgtattaaaaaagagactgtaatatttaaaaacaygaaagcaattatttttgtcatttatcttttctccatttatataatactaaattattagtaatattaccataaataatttctaaattatttaagatatagaacattgtcttataatatttttgttttaactcataagacctctggcccagggcttttcaattattagttttcagaaaatatgtactggtcaattattttttatttaataggcatattatgatttatatttcctagcactataagaataaattgatataaattaagtaatacaagcttattgtgaactttatgactctaatagagattaaaagagggaataataaaaaataattttattggttatgtatgcaatataaaggtctatctgtggctatttgtatgtccacttttatgcttataaatatatatatattatatatatataatcttcataattctgctgtgtataccttcataattctgctgtgcatagattgatctttatatgaattttcattccttaaagttttgcaattatgtttggtgggtatcaaaaagtaagctatgcagatgaaaatctaggtgtgggataaatcttgctcacattattcccaaggcatataagcaataatcaaacataattttgaaatcccaattatagacataattctatgtgtgtgacatatgtacatatatgtatatatatacataaatacacacatatatattgcatatatattttctgtttttctagtattttatcaaaactattaatgatttaatttgaagaattgccctcgttgccacattttgtgaaatgtaaaatgtttttttaaatcatccaatgatcagatacagtgtttaatgtttttgtttgtttgtgttttttttttctttttttctttttttttttttgtcttcaaaggttctcctaattgcagatctcaaacttaatcttggaagaaactttagtgttcaatggaatcaaattttctcagaaaatgaaagatttaattgttatccagatgcagatttggcaactgaacaaaagtgcacacaacgtggctgtgtatggagaacggtaataataattttaactattactcatgatatggttatcacataagcattttggtgcaaattttacatattataattttaaatctgcagcatataaactaaattcaagtagataatcatttggaatttgaagttagcatctctgacaggcaattcacttttatcttaattaattatccaaagacatatcttagtaaacgccaggctgaattgatgtgtaaattgctttccaggaactttggataatgtaactttacttaaaaaaataatactctgtctgagagttacactctacttggtgttgactgtagctgatttgcttgtttgggtaagatatgccagtartggacactattttgaaagagttgtctcaagttattaagacatatgatgttgagtaacgggctacttctcttccactaaggatgataatctcttgccagttattttggctttcattttaacaaaatgatgatggctgaggatggcaggtgtttttaccaatgtcacaggaaggacattgtaaaacattcctcttgctatgcctgtttttcaaattctgggcttttcrttacatcattgagttttgtcaacaaatatatttatttaatataaccaaataactaaatgcatctgttatatcactgaggcgagtcaagacatatttgtcagcaatttcccagagacatttacatttgtataaagagatgcatagaatctctgcctccagagaaattatcccaatttctctccattaattgttaaagcagcataatctgtatcactagtgaagaatagggaagaatataagaacagaaaaagtaaggagaagaaaagattctaaaatcaataaaagtcaaatagtgaagttcacttctctaaaccttctcttaagttgcctcttttcagccaaatacacatccattcccctttgcattcaaagtatgctaactttatcaaaacgaatataaaggacaggtgggaacaattcattttgctaaagaataaatatcttctaaacatgaaaatgtgaaattttatctttcctattaaataattttaatgttatatatatatataaggctaatgttacatatatatacatatatatgtatatatatacatatatatgtatatatatacaccacagtttttttatccactcattgattggtgaacatttggtttggttccacatttttgcaattgcaattgtgctgctataaacatgcacgtgcaagtatcttttttgtataattacttctttttctctgggtagatacccagtagcaggattgctggatcaaatagtagttcttcttttaattctttaaggaatctccacactgttgtccatagtggttgtactagtttacattcccactatcagtgtagaagtgtccccttttcactgaatccatgccaacatctattttttttttattttttgattatggccattcttgaaggagtaaggtggtattacattgttgttttaatttgcatttacctgatcattagtgatgctgatcattttttcatatgtttgttggccatttgttcatcttttcttttgagatttgtctattcatgcctttagtccactttttgaagggattgtttgtttgttttttcctgctaaattatttgagtttgttgtagattctggatattcgttctttgtcagatgtatagatggtgaagattttctcccactctgtgggttgtctgtttactctgctgactgttccttttgcactgcaaaagatcttagtttaattaagtcccagatgtttgtctttgtttttattggatttgcttttgtttttggtcatcaaatccttgcctgagacaatttctagaatgctatcttctagaatttttgtagtttctggtcttagatttaagtccttaatccaccttgagttgacttttgtgtaaggtgagagatgagaatctagttttattctcctgcatgtggcttgccaataatcgtagcaccatttgttgaataggatgtcctttcctcactttatgtttttgtctgctttatcgaagatcaggtggctctaagtatcagggtttaattctgggttctctattctgttccattggtctatgtgattatttttatacagtaccatgctattttggtgactatggctttatagtatagtttgaaattaagtaatatgatgcctccagatttgttctttttgcttattctcacttttgctatgcatggtcttttttggttccatatgaattttaggattgttttttccagttcggtgaagaataatgatggtgttttgatgagrattgcattgaatctgtatattgttttggcagtatggtcattttcacaatattctttctatccatccatgagcatgggatgtgtttccgtctgtgtcatctataatttctttcagtagtgtttgtagttttccttgtagaggtctttcacctccttggttaggtatacacctaagtattttagtttattttattttctgcagctattgtaaaagaggttgagtttttgatttgattctcaccttggttgtttttggtttataaaagagctactgacttctgtacgttaattttgtatccaaaaactttgctgaactattttatcagttctaggagctttttggaggagtctttagggttttctaagtaaacaatcatatcatcagcaaagagcgacagtttgacttcccctttactgatttggatgccatttttttctttctcttgtctgattgctctggctaggacttccagtactatgttgaaaataagtgagaatggccatctttgtcttgttccagttctcagagagaatgctttcaacttttccccattcagtattacgttggctgtgggtttgtcatagacggtttttattatgttgaagtatgtcccttgtttgccgattttgctgaatgctggatgtttaaaatgtttttctgtgtctattgagatgatcccgtgatttttgtttttaattctgtttatgtggtgtatcacaattattgacttgcatatgtgaaaccatccccgtatccctagtatgaaacccacttggtcatgttgggctatctttttgatatgttgttgaatttggaatttggttagccaggattttgttaaggattcttgcatctatgttcccagggatattggtctgtagttttcttttttggttatgtcctttcctggttttggtattagggtgatactggcttcatagaacaatttaggggggattccctctttctctttcttgtggaataacgtcaatagattggtaccaattattctttgaatttctggtaaaattctgctatgaatccatgtggccctggacatttttttcttggtaatttttattaccattttaatctcacttcttgttattgatctgctgaggttatctaattcttcccgatttaaggttgtgtcattccaggaatttatccatctcttctaggtcatctaatttatgtgtgtaacggtgttcatagtagccttgaatgatcttttgtatttctgtggtgtcagttgtagtatctcgcatttcatttctaattgagcttatttggactttctccttttcttgatcaatcttgctaatgatctatgaattttatttatcttttcaaagaactagatttttgtttcagttgtcttttgtatttttttgtttcaatttcatttagttatgctccaatcttggttatttcctttcttcttctgagttttggtttgatttgttcttgtttctctagttccttgaagtgtgaccttagattgtctatgtgtgctctttcagactttttggtgtaggcatttagggctatgaactttcttcttagtactgcatatgttgtatccctgaggttttgataggctgtgtcactattgtcattcagttagaagactttttaaattttcaacttgattttatttttgacccaatgatcattcaggagcatattatttaatttgcatgtatttgcatggttttgaaggttccttttggagttgatttccagttttattttactgtggtctcagagagtgcttgatataatttcaaatttcttaaatttattgtgccctatcatacagtctatcttggagaaagttccatgtgctgatgaatagaatgtatcttctgtggttgttgggtagaatgttctgtaaatatctgttaagtccattttttctggggtatggtttaaatccattgttactttgttgactttccrtcttgatgatctgtctagtactatcagtggagtattgaagtcctccactattactgtgttgctgactctctcaattcttaggtctattagtaattgttttataaatttgggacctccagtgttaggtgcatatatatttaggattgtgatattttcctgttggacaaggccttttatcattttataatgtccatctttgccttttttaactgctgttgctttaaagtttgttttrtctgatataaaaatagctacttctggctttcagtgttcatttgcatggaatgtttttttctacccctttatcttgagtttgtgtgagtccttatgtgttaggtgagtctcttggaggcagcagatagttggttggtgaatagttatccattctgtaattctgtgtccttaaagtggagcatttaggccatttactttcaatgtcagtattgagatgtgaggtaccattccattcattgtgctatttgtttcctgtataccttgtttttttattatgttttataggtcctgtgagatttatgctttaaagaggttctgttttgatgtatttctaggatttgtttcaagatttagagctccttttagcagtttctgtagtactgattctggtagtggacaattctctcagcatttgtttgtctgaaaaaggttatatctttccttcatttatgaaccttagtttttctggatacaaaagtcttggctgataattgttttgtttaaggaggctgaagacagcgccccaatcccttctagcttgtagggtttctgctgagaaatctgctgttttcttttataggttagctagtgcttttgcctcacagctcttaagattttttccttcatcttaactttagataacctgacagcaatgtgtctaggcaatgacctttttgcgatgaatatcccaagtgttctttgagctctcttgtatttggatgtctagatctctagcaaggccagggaagttttctttgattattccttcaaatatgttttccaaatttttagatttcccttcttcctcaggaacaccagctattcttaggtttggtcatttaacataatcccagacttcttgcaggctgtgttcatattgtcttcttcttttttctttgtctttattggattgagttaattcaaaaacctcatcttgaagctctgaagttctttcctctgcctgtatgattctattgctgagactttcatttctgtgtttaaggccatgtggtagcatgatatcatcaacgaaataagcttgaatagatgagaagtgttcaaagactaaaccctgggcgattacaaactttagccaaggaggaaatgacaaaggaggcttagaaagaacagctcaagtattgggttggaaataacatgctgggtcctggaagccaattgaacaaagcatttagaatggaagaaatgatcaactatgcaaattgtttgtcagtaagataaggactggaaactgacatgtggatttggcaacatggaagtctttggtaactttaacatgcaaacattagatgtagtactagggataaaagcctagttagagtgagttcaagagaaaatcaagggacaaattagagatagtgagtatgttttgctgtaaagaaagcagaaaaaatagaacagtagtcagagaagttactgaagtgacatttactctaaaaaaatgagaaaaataaaatcagtttatgctgttaaaaataacataatgaatgaaatattattgatgcaagagagagggtggagaattgagggagaaatatttttataggtaaggaggcctgggatagggtacacagatgaaattgttcactttagatagaagccagacagtacacccttaagaagatgagtcaaacagagtatctcaatttagtcagcttaggcccctttcttttaaagagcttttatgaggactcacacaacttctttaaaaggaaattggaaatgtagataaatataatatttctctccaaaatataataatttaataaacaaggaagatagggagaatggattgtggtatggcaaccagccatcaatgccagagtttataattctttttcttaggttttatctctcacttctatgttaaaccaatcaactctgattcttggccagggttcctatttcaaatccaggtcaggatgtaattaaccagtataagaacatgttaaaaaaagaaggattgagagtttcattataagtaacagaattctagcacttgccctttagaggcatgttataatgccatttttatacacaataatcaacaatcaatatgaacagtaagaacaaacatggaatcaaaatttattagtaatatacttgcttttgcagacaacacaatttaatgctattttttgagttaaaaaatgtatgacatttgatccttctgctctaccattctttctctagagtgtaaatgtaaatattttgtataaaattttagtacatgggatcccaaattgcataaaatatattttgtgttataactgttatttcatttttgtattaatgaaacttgtaaatcatacaatgtgtgactaaacgtcagtataattttaaagagtaaaatattacaaggcttataatttctggcaatgaacatgcattgtgtttttagggttcttctctatccaaagcacctgagtgttactttcccagacaagataactcttattcagtcaactcagctcgctattcatccatgggtataacagctgacctccaactaaatactgcaaatgccagaataaagttaccttctgaccccatctcaactcttcgtgtggaggtgaaatatcacaaaaatgatatgttgcagtttaaggtatgcttgatataaactaccccaaagcttaactcatcttgtgagatgagattttgaataatcctgtgattgatatttaatgtaatattaaaggttattaacagatttgataatattttgattttataaaaatattttttcctacacaactcatagctaggtgcccaataaatgaaactgctcattcctgctaactttgtgattaatacaatgatgattttaaaaataaatttaaattcttacaaaatacataagtcatttattatcaaactatgctgatagtgtcattaaaataaacaaaattggatgcctactgtttccattatttttaagttgtggtcttaattttctggccaatgcaataagacataccaaagcaataatttcattcaacttttagagatagcattttttaacttaagaattccaaaggaatccattaagaatagtattagaaatttaaaatatcaacaaaataactagatgtaaaattatatttccaaagatattttcttgtgtattattgctcattatttagaagcagaaatggcaacaaatctcattagcaaactcaaatgaaaaaatcaaataataaatcatcaaaaattataggactaagtggagtatctgtaaggagaaaaactattaaaaatgttcatattaagtattttaaaattataaataagagtaaacgatattttaaatgttaattcactttagctcagtcgctgcttttaaagtattttcatataaatcttagtgaaatatcttttgagacttcataaaataacttttaagtttgtctgaaaaaataaacaccttgcaattgttaaaattcagcaatgggtaaagaataaaaattcatacaattaaaacagtgtggaactggagatagcattgcctggttgtttattgaaacgagacggcacaaaagcatggaagattttgtgtgtgtgtgtgtgtgtgtgtatgtgtgatggcacaaaagcatagaagattktgtgtgtgtgtgtgtgtgtgtgtgtgtgtgtgtgagatggcacaaaagcatagaagatgtgtgtgtgtgaagaaaggttcacaaattaataatgaagaggtaggttatttaaaaatttatataaaaaagtgtgtttttaatcatatgctaaaataaaatttagaatgagttccatgtgaaaactaaacataagcctaaaataaatttagctgcatatttattttgtatctggctagcaaaggcctttcaagccacagataaaaaggcgttaagtgacataggtaaaaatctacacattttctaacataaaaataaaatatgttttcacatcaaaaaacactataaacaattagaggacaaaaaaatgggtaaacatctgataaagatgtgacatagggaaagcaattccaactcatgtaatcaagaaaaaatatcaagacctctcataagaagatatttaacagaagaaactaaaatatcaacataattacactcattaaaaattccaggagcaaaatgcagtttaaagtacagtggaacataaatgttgaataataatgtagaaaaagatgaaacctcataagtaggaaatgaaatgattaacaatgaaaaataaatgcttttaatttaacataaattagcattagagtacacattttggtgagaatattaatcagtaaacaaattctggaaagcagtttgtcaatagttatcaaagaccctaaaacggtaagtatactcagaccctagtggtatttaagaaatgtgctgaagaaataaaaacacaaataaacataaattagcattagggtttattgtataataatatgtatgacaaaaaatattgaaacaacttctgtttttaaccatgaaataattttggtatacccatacaacagaatatttagctctaaaatttttgttttgatttcttattatttagaaaacaaatcacaaaacattttttaaaggttcaaaaatgcagtattcagttaggacccattataaatgtgtatgtggaattctatattgatatggttatatggaccatgaatgtagaattagaaattatgtggagaaaaattctaaatattcttgtttgagccattatttaacttagttcatgatatgtacatgctatgtcagcaatcagaataaacttttttactacttatctgcaatagatttatgatccccaaaagaagagatatgaagtaccagtaccgttaaacattccaaccaccccaataagtacttatgaagacagactttatgatgtggaaatcaaggaaaatccttttggcatccagattcgacggagaagcagtggaagagtcatgtaagtaattgaattatttgatataaaggatattttaattttagcttacgaagggaaaagtaaaatgattaacagccttcactgtcctagagtagcatcacacaaaaaaatttaagacgtgttaaataactttgcccattttaatatttctagctaaacatagtccatgggactattttaaaggattggcccacaattttatctacactttggaggtgttcaatttcactattagtatcagactcattcttctaatcaagttgagaaccaaaaccaaaacctcttttaaaaagcatgataagtgttggcaaaaataagtatttggaaacaagtgaagtaaatattttattraaactgttgaaatagtttattggtgcttgaatctgatagaattaataatttatctgccaggtattagtgaaaataagttacaacatgtaagtctagatatatttttatgttacaatgaataaatttaattttaaaattgtagtctttattttattcaaaagatctataaactataatatattaaaatatacttttatgtaatttaagtttgccatgccattccttagatgatgttatcaggatgttttctggtattgtcaagatatgtacaaataatatctaaaactatatctggattattttaataattttgttgttatgacaatatttttgttcaaaagcatgggaagctaagtcattttataaaaatatcctggtgcaagggcattatttattgtcatttgacaagcattattctcgattaaatagttttccaaaataataaatataaaaagttaaaatatgcccagattacttgtaatacttacgcttcctctccttgcccatgttactttccttcctctttatgttcttcttgcaaatgagttgaataataatatgtttcttgtaacacatttcttcatacacagctatttttatgaacataaaataaaggaagaaaaacacaattgggagtagtaataggagagagttaaacatttgaatatctgttaaacttaaaattcattataatattgatgtatttttattccatatgtagaaaaaaatgtattgtgattatctcaagggagcaggaaaattgaggccttttaatttctaggtcacacattactaagtcatttatgatttcatattaattttatttttaaaaggaatacttgtctaaagaaaaacatgtacaatcatattatttatattatgattctcctataagtatatgaagcatattttacatattccttaacttagctaaaagaaaacatgtattagattaatcatctatttccatttggtacctgggtataattaggaatatggaaaataatattgatttttagataatctaagaaagaattaccgttattatttgtgatactactttgcatatattttgacagacatagctttgttttcttttgttttcagttgggattcttggctgcctggatttgcttttaatgaccagttcattcaaatatcgactcgcctgccatcagaatatatatatggttttggggaagtggaacatacagcatttaagcgagatctgaactggaatacttggggaatgttcacaagagaccaaccccctggtgtaggtaccaacatatgaccactccacgaggcaactaagaccatgagtagaatccaagccacttctttatgggcctgtgctttaggattgaagtaatgacaaaggcattagctagagatctccagagcagctatagcaattttctgagaaacaaacccaaaaagtcaccataaattacaggtggaagtagaggagtggatggataacaatttgcttgactactgtgagaagccaggctttgactcaataccttaactgtttcaaatgcatacaaagaatatgctgattctgtattccctgtcragtttacctttactccagcttttagaaaataactgcctaaagttttccttgattgtttttacttctcaggtactgatttgatcttttttccctttataaccttcagttgcagttgggtaactttatgtggccaaagtgctaattacatctttacaatgtgtttttatatactcatgactctttttccaaagatttgtctcgttaatgcaacacattttatgaatatttaatgtactgtgcaacaaataatattatctataatattccaaacatatcataaaaaatatattttaatgaaaattattctatttgtatttttcacatgtgatgtatacttaaaaggatatactcagtaccatactataagtctgtgaactattgtaagcattttttattgttaggtgctcaaacagcttgcatttatatcataatactccaaacttaggttattgaaggctgttttctattaacactaacttgaaagaatacgttttaccaaaactgatttcttaaaatcccttcagcatttgtaccgatattattagactaatatacttttgattcttgatatctaaaattacttccactagtaattttgcatattactaaaaataaattactataaaatctatttcactggtaattttatatatattaagaatcaaaagtatataatctaataaaatctgactatgattacagtatgaaacaatgaattaaatattttataaatataaaactttaaatgttctataaatataaaatatataaacaagatattttctggacagtttaattgtattcatcacttttatcatttctaggacattttactatggaaaaaataccaatttatagataagttaaacacataacctttggaaataaaccaaactactctaatggcaatagtattctatgtcatttaatgtggaagcatttgcagttgttacatattgtatattaatacaaatatatacatatttgtatattaatttctattaatatacaaatattatagaaacatatttgtaaactgcacgaaagcagaaaaaatttaaacaattatattctagggagacacatttattttaactgaagcatagtttaaggttgggaaacgggaatttaaatatcaagtctcgattgtataataaattttaaaataacattgattaaattcacatgctattgttacttaaaatatattgtgcttatttttcgtatttcagtacaaacttaattcctatggatttcatccctattacatggctctggaagaggagggcaatgctcatggtgttttcttactcaacagcaatgcaatgggtaaaacaatcatttgttgaatgtctcttattttatgtgactttttcataaactagtatacatagatgaaaatgggatgttattttggatttccagatgttacattccagccaactcctgctctaacttaccgtacagttggagggatcttggatttttatatgtttttgggcccaactccagaagttgcaacaaagcaataccatgaagtatgattgcatatttcttttaaaaaaattaaaaatttttatagcataaagtaattctcttagttcacacatgaattttttttaaaggtaattggccatccagtcatgccagcttattgggctttgggattccaattatgtcgttatggatatgcaaatacttcagaggttcgggaattatatgacgctatggtggctgctaacatcccctatgtatgtatatcaattttaaaacaatgttaaatatggaatacgtaaaagtagaatgaaataattaaacatgtatactttaatttaagcagctggtaataatgcttagctttttttactggcaccttatgtattggatatgagatttataaacagtgtctttgtcagactgataaaggagaggaagaaataccattccttttccttttccctccctaatactatcatgctgtgttgtgctaaacaagtcactgtgcacttgatttcctctcacaaactctgggttgtacaggcagtcactatgttctcttcatgttaaagttcacagaaatatgtatcatcaataagataagaaatctgtatcatcaaccagagaacaagttggaggtggaactaattttttttttgccctggaatagataatagttgtaatatataatagagattcactcaatattcaggaagctaagtattccaaagtatccacaaatgatcaatctctgaatttcctcattttttatcaaaattaaggaatcctagggatgctgctgctaacacccaaacattaaaatatagaaggcttgatatataagagtttattctaagaaaaatcagaaaaacctcattataagacattggtatttatagtagggtccaatatagagttcctgaataactagtatgggaaattaattatatatgttgacaatacagaaacatgcacgtggaaatttattatttaaaaggaggtatacattattgaccatactttctataacacatagaagaagaaattgagataatgtcaactaacagaaaataattaacaaattttgtatttaggcttcaattgaatattccatgatacaattcaaatatttgttggtttaaacatacttgcaattacctatcttaaaacaattcttgcttagataagcagggctgttatcctaaaagtgactttgatggatattacaagaacaagattatagtaattgatgtaattgttaatactccttttgccaatattagaattatttgaaattacccgatatttgctgtatagttcccggaaacagcaacatctctttctgtatatactgtacaaaagtcctatttgtcatttaacctaatttcatagtatcataaatcctattgctcagtgtctttctgtttcctttgaggattacataatatataccaatttagaacagtttttacctctaaatcaaaatgactaaatgaactgttgacaaaacagaacatttatagaaagttgttcttagaatactttacatctttacatgctacttttattccttgaacactaaaccatttaattctttttaggatctagtgaagaggaactcaaactttcatattgctgttacttttataagtatgataaaatatgatacacttactattttgtattttttgccctactttgataatttttggatatttcaggatgttcagtacacagacattgactacatggaaaggcagctagactttacaattggtgaagcattccaggaccttcctcagtttgttgacaaaataagaggagaaggaatgagatacattattatcctggtcagtacttggagtttayctgagtcttatttcttgtttccattaattcacctaaaatgagcaggtkggggggaagatgtttcaaaatagaaagtatataactttgagtaacactcccaaatctaaaactctcttcctttagcacttcattttatttgcatgggttgtgatcagctacctttgtatttaggtatatccctagagatttaaaaccaaagctgagttaaagggaagctgttttctagttatcatccaagctacaaattggcctctatttatgggagttatcaaaatgtaatggtagattttctatttttatacaattattagttcattctctgggattgcttctgatgtttttcatatttaaaaacttgccttcagattggtgattcagtgaagataattttttatcactatcttataggaagtaagctagttagccagatatctcaccatagaaataaaaacaaaataaaaacctctactaatctttcttgaaatgatagctgatgcatttccaagagtccttagaatttccttctaagaaatttggagggaaatctagctagaacactgatgtttgtatcatttgtcatttaatgtgagagcacattattatgataatgtagtaatgaaaacttatgcttcataatcactgtccaagtagttacgcttttttcatgtgtaccttgtttatatttcattttaattttaggatccagcaatttcaggaaatgaaacaaagacttaccctgcatttgaaagaggacagcagaatgatgtctttgtcaaatggccaaacaccaatgacatttgttgggcaaaggtactaaatcgatatcttgaaatagaataaatacaaaaattatatttcaatgaaagtttccatttaattagtaaaagttaaaaccgttcaggagagctatacagaaatgtaatgatttaataactaataaaataatgtatagtctttggttcaatccaaattagacacaaagaaagaattcatataagtcacatgtccaaatatgatttgtttcatctttaagacatattttattatatttattggtaccacttgtaatttattataagactaccattagtaagatggctactcattattctgtactgcaagttatttaaatgttcacttctcttgaaaacatatgttaatagtagcaacaacatgttttgacagctatacttatatttaaaacttagatcatgaagtataattcactgtattttatataaacaagtatattcagacctgatatattaatatattacaaaaatattttgatttggcttttatataaagcaatcaagaaaaaaatctcatagtaaaaactagaatgaacaacaatgataacaccatcaaaaaaatctatgatgagggccaggcgcggtggctcacgcctgtaatcccagctctttgggaggccaaggcgggcggatcatgagatcaggagatcgagaccatcctggctaacgtggtgaaaccccgtctctactaaaaatacaaaaaaattagaagggcatggtggcgggtgcctgtagtcccagctactcaggaggctgaggcaagagaatggagtgaacccgggaggcggagcttgcagtgagccaagatcgagccactgaactccagcctgggggacagagcgagactccgtctcaaaacaacaacaacaacaamaaaaaaaaatctatgatgagagacacaattaaatgaaatgtgagaggctttttgaatcttgggccaaaattaagacattagtgattaaatctgcaaaatgcaaacatgttcaataaatgttgattgtactgtatcaacattaatttcctggttttgataagttcactattgttatataacatgttaacattagagaaagctgagtgaagaatatagacagggctgggcacagtggcacatgcatgtaatgcttgcagtttgagtggctgaggtaggaggattgcttgagcccaggagttcgagatcaacctgggcaacatagggagattttgtatctacaaaaaatttaaaaattagctaggcatggtggtgcatgcctgtagccccagctacttgagaggcatattaatccagaggtttttttttaacttcctactttctcctcattctgtatttctacacattttgtcagatttctaccatttctccccttcctttagagcactattctctaccatcagctaatcccttgtaaataattcctttttggtggattatttatatttttatataggactttcaaacttctacaatatagatccaaatttccagagctttcagcaaattgaatttcagctctgttttgtgtgtttctggtcagagtagaaggaaaaaaatgttggtaggcaatgaggtcaggctgggaatagtggtgggatgaagggagaggaggatttagtactaattctgaaaatcactgggatgtttgattcagcatgacattattcaatcggatctttgcttcctttcaaacaaaaagatttattgtttttagtttttaaccctggagtaattctacaaataattctaatatactatattaaattaaatttaacttatatttttcatattagtttttgaccagaaccttttggttatatgtattattttcaaaattactaactaccataaaggttggcaatgctattttgtatttgccatattaaagaggagactaacatggaaaatgggaatagtttgcaaatggtatgtgtgtcaataataatgagatttgaagggattgcagatctgaagactttgagttaataataagcctctaatactccattacacttcatctacatagcaatcatatcatgctgactatgttttgatcagcttttccatgtcttgtctcttgtaggtttggccagatttgcccaacataacaatagataaaactctaacggaagatgaagctgttaatgtaagttttacacgggctaactatacaatgagaagaaattcaaaacttagacttgattattttaatcaataactaaatttgaatgcttttctttaaaaatagatggccattttaaattatcgatatcagaccatatttagataaaatttacctaattttcctaaataacaaagtaccagtcaccctattaagcaattttatattttgctttatttaatccaagcaatcattcctttatttaaaaagttatggcctggcacggtggctcatgcctgtaatcccagcactttgggaggccaaggtgggtggatcacgaggtcaggagattgagaccatcctggctaacatggtgaaactccatctctactaaaaatacaaaaaaaaataaccaggcgtggtggcgggagcctgtagacccagctactcggaaagctgaggcaggagaatggtgttaacccaggaggtggagcttgcagtgagcccagatcgcaccactgcactccagcctgggtgacagagcgagactccatctcaaaaaaacaaaacaaaacaacaacgacaaaaaattattacagtaataacatttaacattagatctaccctcttaataaatgtttattcatataataaatcatcgtaaactataggggcaatgttgtgctgcagatctctagaatttatttaccttgcgtaattgagattttgtgtctatttcttagcaagcccttattttctcccacttacagtcctgggcaactaccattctaccctatgcttttatgagtttaactgttttagatacttcatgtaagttgaatcatacaacatttgtctttctgttactggtttatttcactcagtataacatcctaaacattcactcatgaaagcaaaaggaatgaataagatattaaatgcaaatgataaacagaagggaacaggagtggctatagttctatcagagaaaatacattttaagacaatcactgtcacaaaagacaaaagaagtcattatataatgacaaaagggccaattcattaggaagatacgatgattataaatatttgctcccaacatgaaagcacttaaatatttaaagtaaacattaacagaactgaaatgagaaacagcaatgctgtttgaagactttgttgccacactttcaataataaatagaacaataataaataaataataataataaataataaataaataataacaataatgaataaataaataataaatgataatacataaatagaacaataataaataaataataacaataataaatagaacaaccagagagcaaatcaacaaagaaacagcagtttttaacaacaccgtaggccaaatggacttaacagacatacgtagaactttctacccaaaagcagccatatatacattcttctcaagtgcccatagaacattttctaagagtgatcacatgttaagtcacaagacaagccttaaaaattgtgagaagatagaaaacataccatttatctttcccagccacaatgaaattaaactagaaatcagaaaaagaggggaaataagtcaattcaaaaatacgtggaaattaaacaacccacttttgaacagccagtggaacaacaaaaagatcaaaagagaattagaaaatttcttcagacaaacaaaaataaaaatacaacttagcaaaacttctgggatgcagcaaaagcagtactaagagagaagtgtataacaagaaacacccacatgaagaataataaaaatctcaaataaataacattacctctcaatgaattagaaaaagaataaacttaaagttagtagagggaagaaaataaagattagaggagtaaaaattaaaagaaaaacacaaaataaatagaaaatatcaacaaaactaagagttggtgatccttcttttagccagatgaatttacaatcattaaattatacaagtttaggtaactgtgaaaaatttgggagcttaaaacttaccaaaactacttctaaaacagagtcagataattgaacctactgaactatgtcattgaggaaaaaagtgttatttcaacttgagttccacccactattcttgagaaccactagagagacaggcatggatttttatataggtgttggaggacagtgtcaatttacgtagaatggcttatgcagaattccctgggattctcttccacaaaaggtatcaacagtgttggattacatgtacctgattgattttctggatataatcaatgattttatttaagtgatagaagcagccagctaatagaataagttaaactaaaaaatgaattatgtaaagagcagaaaagtgaaaattaatgaaaaagatctggcactaccatttgttattaattatcatacgggagatccttgcatagaaaatattcaatataatcccaccaagccttctatccttatgagtaaaatgtaattaataggtaagatgataaaattaagtccctttctactcttgaagatattcatcataggccaggtgcggtggctcacgcctgtaatcccagcactttgggaggccgaggcgtgtggatcacctgaggtcaggagtttgagacaagcctgaccaacatggtgaaaccccgtctctactaaaaatacaaaaaattagccaggtgtggtggtggacatctgtaatcccacctactctggaggctgaggcaggagaatcccttgagcctgggagacagaggttgcagtgagccgaggttgtgccattgcactccagcctgggcaacaagagcaaaactctatcttaaaaaaaaaacaaaatccatcatatgtattttgtaaatctctatatttcctactctctgcattttctgtatgtcctccgatatcttgttcataaagaagactgttaaggccgttacaacagaatcttaacatgtgccaaaaaagcatccaggttgtcatgtcatttttttgagacatacccaattaacttagctgcaggtcaatcttttgctaaaacacggttactctgacactggaacttttatgtttcgactggcaagtagggaatattcttagtagagattggaataaaacacctcttctctgttgggatgagaagggctagatgtgagagacaaaaaaagaagcagttgatgagggtggtgagatggttctgggaaatgagaaagctatataaaaacaggctttatactatggccctttgctgtttcattgtgctccacaaaggtaaacctgaagtatgggctctgcagtaacagagaaaaaaagcttccccattactctaggaagcactaaaaataatgcttttgtgggttgtgaactgttcctttataattcacataggattccaaaatggctctattatctccaccgatgtccctctttactctattgaagtgttgaggaagaaaccacacacatttatgtaattaagattgatgtcaatttccttcattatcagtcatacatgacttgtggatctgtcaaatacattcagatttatatgtatataatctctcttaagactttccacatgtgagcctaaattttggttttacaggcttccagagctcatgtagctttcccagatttcttcaggacttccacagcagagtggtgggccagagaaattgtggacttttacaatgaaaagatgaagtttgatggtttgtggattgtaagtaagctttgaacaatctatgttttaagttatttattgtgcagtgattatgcaaaattagtacttggctcaaataatgtcaacaaaatattttatttgaaaactagtccacttttttcccccacagaactttcttacacaaacaactgctaaagtaaagtgttaaaaactaaatttatgtgtatggatgctatttcctggactttttcaatttgcaaaattcaaaaagcaaaatattctatatattaataaatccttgtaaatatttatttcacttttatttaatataggaataagtgtcaggcttaaataaccattagtcctttgtatgagagataaaaatttcttaaatttggtaacattgtcttttaaagtttcttttttgatgtaatcttaaaatgttagtagtaagatttttaataatatatttttttagatagcataaaaataatttactttgctacaagtaaatgcttaatacagaaaattttatgtaatatatttcaatttccggaggaaaaattttttactttgttgatttttccagtgtaaagcattaatttacttattttttaaattgaaaaaagctttatacagctgtcactatgtggaaactttgtagatataagattgtataaagcatatattttgtttaaaaattcatggaacatctatgtttattagatgtagcaattggtataccataagggattctcttaagtatattcctgagaatgtcatctggatccagagaaaattatctttttcaggtggaggcaatccattttaaatggtggctgacttatttatttagatcatgattcttttaaatatgactactgagattctgagatatgtactcaatagagatacttcttgaaattatctgcatttgtaaactattaatatatcttgtagttttagcaataaaagcaattgatatcaggctcagggcaggagtggaggggaaggagatgatagggcacatattattataatgctatgtcttaaagatatgaaaataaactatttttatgggtataatgcataatacagagaaaacaaaacattttatttttcaaaaggaaactgaaaaaagcaatcaatgagataaactaatatcattgagatgttttacaattttgtttgtttagaatagtgagtatatataacattgttcaaatatgttaacctacttactttttgaactagctcttttgagaatatatgttgtaaatttatcttttgtttacctttttctttcatctttttttaaggatatgaatgagccatcaagttttgtaaatggaacaactactaatcaatgcagaaatgacgaactaaattatccaccttatttcccaggtacaatattgttggtatgcctttgatattatcatgttattattatatattaataggtatataatataaactgatatatatcagttagctatacatagaatatatatatagaatatatatgtatatataaaaaatcagtttgatatatatagaaggtagggaataggattcacacacccaattttcactacccacccacacactggaccacaccttgacccattaccaatattatttaacactattttgagaaaaaaatcaaggaatatattttatctacatgaacacaattctaaatttgtttgaagttgttattttggtttgcttaataattttcccagattcaaaaaatgttaaatactctttaagataaaaaataaaattattttgaaaggaagtttttagaagtgtttctttactaaggataagggaaagaatgctaacacttatctgtttacctttgacatagaaggaaatgaagatgaatgtgatgtttcatattcatcatcattctcttatgcaggcagaaaacgtcacaaactattagcatattaagtgatggcaaaactctggaaaaaaatcttaaactgagaaaatgtggatcaaaaggcagtgttataacatttgcctagcccttaaactctgggctttatgataccaagtgaatttttaataaaactctaatcagtgttttccatctaaatgcactagaaagagtagacattgaggagtgtacttatttttcaggtttttattaattcatgtaattcagttacaatttcaggccattttaakttgataattaactcatacaaagtatacaaatggttaaaatatacataggttttataaaacactgattaatttctttgtcaaggaatacataattatgagttacacgtttcattgtagggcactgtataatatattaatattttttcattgattctttccagaactcacaaaaagaactgatggattacatttcagaacaatttgcatggaagctgagcagattcttagtgatggaacatcagttttgcattacgatgttcacaatctctatggatggtcacagatgaaacctactcatgagtaagcaatgttctgaattatcctctctgactcttttattctttggttcttacatttaatgttatcattttaacagtcccgacaatcttctcttgtatctctttacttcccaattgttctctgtaacttcttccttcatagcatttagaaaaaatgtgtttctttctatctaatttatctaaatatctttattgttattattctaatttctatactattccaaaataaatcctagaccatttttattttgtttctatgtgcccagcatagtgcctggccaattgtaggtgctcaataaataatattggattaatatttataaatgaattaataacatataatttgatatcattaagacataaagcatcaaacatttggcgaaatctgttatttgaattcattgtcagcccaggcacagtggctcacgcctgtaatcccagcactttgggaggctgaagcgggcggatcaattgagaccaggagttcaagatcagcctggccaaaatggtgaaacctcatctctactaaaaatacaaaaaattagccaggagtggtggtgcagagctgtggtcccagttactcgggaggctgaggcacaagaatcgcttggacctgggcggcagaggttgcagtgagccaagattgtgccattgcactccagcctggcaacagagcgagactctctgtttcaaaataaaaataaaaacataaaataaataaattcattattagtaaattagagcacttttaatgaacttctcaaatattaatgatcatagtaattatctgcatttttaacaaacttttatgtaaggccaatgatgatggaatacagaccattcactgaaaatcaattctttattagcactttccaatacaagttttgcagtgattgaaatcttctggccaggcacagcagcttatacttgtaatctcaacactttggcaggctgagatgggaggatcacttgggcccaggaggttgaggctgcagtgagctgtgctcctaccactgcattccagcctgggcaacaaaacaagaacctgtctgaaaaaataaataaatatatagaaatcatctataattctgggtgccaatgtggtacttaccagccatatatggccatggaacaatgtgtctagtgtgactcargaatggaattttaaagttatttaattttaagtagtagtatacaataattaaatatgaaataatagataattagtggctaccatattagacactgcagttgtagatccctggcttttgactacatattataatcacttggagattttctttttagggtttagattttttttaagtgtcatgtgcacatagtaggtgggtatatatattgggcaagtgagataccaagcatgcaatacacagtaatcacctcatagaaaacagaaggatttttcccctcaagatttatcctttgtgttacaaacaatccaattacacttttagggttttttttaagtatacaattaaactattattgactatcatcctgttgtgctatcaaatagtatatattattcattctttctaactatatatatagcacccattaaccatccctgctgtattagtctattttcactctttcataaagatactacctgagactgggtaatttaaagatgtttatttaaagactgggcaatttaaagaggttgaattgactcacagttctgcatggctggagagtcctcaggaaacatacaatcatggcagaatgtgaaggagaagcaaggtgcatcttacatgactttaggagacagagatagtgatgggagaactgccatactttaaaaccatcagctctcatgagaactaactcactattacaagaatagcgtaggggaaaccgcccccatgatggaatcacctcccaccaggtcgctcccttgacaggtggggattgcaatccctgatgagatttgggtgggatcacaaagcccaaccataacacttgctttcccctcacccccacacaacccttcctagcttctggtaaccatccttctcccgtctatattcatgagttcaatgttttgctttttcaaaatttttagcagccacaataagtgagaacatatgaagtttttctctgtgtcttacttaattcatttaacatttaatgacttccagtttcctacatgtcgttgcaaatgacaggattttattcttttttatagctgcataggactccgttgtatatatgtaccatatttactttatctaatcatctgttgatggacactaaaggtgcttccaaacttggctattgtgaacagtgctgcaataaacatgggagggcagatatctttttgatatatctttcttttggatgcatattcagcagcaggactgctgaatcatatagtagctctatttttattttttggggaaacttcaaactgctcttcatagtggttgtatgaatttacattcttaccaacagcgaaagagcattaccttttctccacagcttcaacagcatttgttactggctgtcttttggataaaagccattttaactagggcgagatgatgtctcattgtagttgtgatttgcatttctctgatgatcgatgatgttgagcacctcttcatatgcctgattgccatttgtatgtcttcttttgagaaatgcctattcaaatattttgcccatttttaaatcagattattagaagtttttcctatagagttgtttgagctccttatatattctggtcattaatcccttgtcaaatgattattttgcaaatattttctcccattctgtggtttgtcttttcactgcgtcttttgattggagtgtttaatccatttatattcaatttcattactgatgagtaaggacttactcccaccatttgttatttgttttctagttgtttaatggtcttctcattcctctttcatttcttcttatttcccttttctctggtgttatttgatttcttgctttttatattttgtatatctgttgtatgctttttcatttgcaatcaccataaggcttgtgatttttaaataaattattatttaattggtctcttttatagcctaagcatctgaatatttaaaactttccaggcagttctaatgagcagacagggttgaaaacttctgttctaacaaatagctgaagttgataaaagaataaaaagcattttgaagtaaagagtatggataaaatttctcgcttagtaaaacctacttatcttatttctatcaattaactcttaatcaactcagaatacatgaatgtatgaccaaaaactcacttgttcaccaaatccaaaaataaaacactaagttattttaagagtgaataaactggcattgaacaatgccttttcactggggcaaatgttacttttgattaaccctgctggaacacaatattggggcataattatccacagctaaatttactttaactaaaactgtagacattaaaaagaacaaaaatattgaaaattgagtgatgatcttattgacaaaaattatgtgctttgagttgaaagtatgtagcttaacaaaaattgaaaaaaaaattcctctccacagaagacaggaaataagtatacttctgaagcacattacagagtcaaacatgattcttgacacattgtggatgcttagtaaatttaaataaattcatcattatcctgttataatcacaggtatcaaagttgttttgataagttcaaggtagatacaggtaaatttccaaatagtccatatgcagagatatttaagcgtatgtaaagtccatttccacttttaagcaaaattatgaggaggaaatcagcacaatcttccatggaatatccttgaaaatgaaatcaatatacatatacttattagtgctaattttgctctcgttcataaaacttttcagtgcaagtttcaatcacattacttaaattgagtagattaattggattaagtattaagtagcctattttatacagtcttatatttttcatatgtttcagatactttcttaatattttaattttttcagttacaaaaaactgctgaactcggaaaattttagagattaaataattaattacatgtataaagaccttgacaaatgtaaaaaaacactataaataaggtacatgttacatttaagcaaattatgaagagtaaagtctttctgtttatcattgaggaaaactgaacaaattataaacacacgtttttttctcaagttatacagaccatagcattttgttttttagtgacttattttctgtcttacaaactgccacatatttgacatttagctatttcttgctactgtgttctttcacttaacatgaaacaaacaagaagcaacgaaagaatagcatgcatggattcagaaatgggatttaatcagcttgagaaattgcagatagttttacacaaagaatcatggacactaatggcaaataaaaaaagcttcatatagaaatcctgcacaaaaagttttgagtcttcaattgctctcatctcttgtaatttgaaattcaatgttgtattgaaataaagcctattcttcaaatgtagaaagaaatacattcaaaaatctacttcaaattatgggttcaaatttcggacaaatattcaaggattatgtaactacacatatattattttcatttttaccaaaagctttaaagatgttagggattagtacctactattcattagagaggacttagaaaattaaacatctttgactccctctgaatgcttaggttgtgttttaatatacaatttttaaataagtgcccaagagttttgtaatcataaaatggaatggaaaaagtcaatatttataaattatttttgcagatattcttataaactgggataatttgcaacttggaaaattatatttaatgtaactttctggaaaaataagagtgcctttttgaagtgggggcattgtaaactataggaagtggtctcttgtatattttttttaataaacaaaaactagtctatgaaaaaacaaacacagtatacctcacctcattcactaatttagaagttactttagttatagctgtaactttctattaatcagctgttcgtctcaagaccggatagtaaatgcatgtctttcagacattagattctgaatgatatagatgaatagaacattgatacaattggtatatcaaaatataaaatttgagatatgaatctataaaactctttccatgatatagtgtttcacattgtcttcttgctaaaggaaatttcaaatttcattaatttgttatacactaaaacataattaaaatattttagcctacaaaatacttatccaatttcaaaattaaaacagatattacattttctgatctaatggtgactatttgaaatgtgagttgggaaaatttatatttctaacaaatactaaatatattgccttcaaaaataattcaataaaatatctttgagttttcaaagagttgttttcatgaaaatgaggataacaattctgtaataactttcttttctctactatacagcagtctgtattctaaaataatttaacaccatccaatcatgagaacaccgtccagtcatgagatagaagtgtttggaaaatgtttataaattgatttcatcagtaattgaagataatagtcacattaattaatttaacattttcttttagaaactatgactaaaataaagatattaattattggaagattaaaaatatgttttaaatttttaaatttaatattctcttcacatatttcatttttgtaatatatatgtagagtttctggttttacttctataaaaaacttttttataataattgaagatatattctaatttttaaaatatatttcaagaaaatgctcctgtaggcaataataaacacacaacaaaaatatctctttcttataagctgaactctccaatgtcaagtggtaacaaagaacaaactcttctggcttaaagctgtttctcaagaataacttaaactaagttaattgtgactgaacaatttgtaaaattgaaacagtgttggaaataattagaatatatttaccgtgtttgaactttatatctttagtggcgtcaaatacatattctgtgtgagggtttacagaggagattcctcttatataagagtttagaattcccttaagagaaaattattatgaaaatacctcatttattttatagttttattttaatttacaattaacaatagtaaatatggagtacattgtgatgttttcatacattatacagtgtgaaatgatcaaataaggctaattagcttatttatcttctcagatatttatcatttatttgtagtgagaacatttaaaattctttcttttagctattctgaaatatacaatatattaactatggtcatcttgctaaatttattcttcctatctaactgtaactttgtgcccattgtgtgaaactactttatgtagaatccttatcaacctgataagcatatattcagctattaatttaaagtatcagtaaagaagtttttcaagtgtaagatatataatagagaaaaaaaagaaatcctccagaaacataattttctttcatgtgaacacgtgaagaatttgtgacaacactgtccttgtaaataatttttatattaaacaaaactaattttgtttgcaaatgaactgaactccaaaaatacattttcatatagatttatagaattatcaccaattattactcttcatatttatatatttatttcttattaaatttcaaaaaaatatatgtaatgtatatttaaaagattaatattcytaaatggccattttatatttgttatgaaaaaataaagcagtgaagatcattttcttttattggttttttaaaagagtgacaatttagaagtagaacattttaagttaactaacacaatattgcctttattagcaagtgatggttcaatatgttatgtctgtttaacacatttttagttgcttgcacttttgacttgagacatttgttaattccgaactttcttgagctactattacatgccaagcattgcattagatataagggatgcaaggaagattaaagtatagcacttgattttaggaatctcaaggtgtcatggaaggagctttatatacatacaaacactgggatcctgctgtaacaaggaaatgactcaatacttttgataatgtgttagtgtccagtaaagtctgcctaattatgtatttgtggtatcttcttctaagatagttctgtagctcttattcatattcaaattatttgagtaatataaaaataaaatttttatttccaactaatattagagtaaaactttattgatactcttataatataatctgtgttcagtcagagagaaaggcagagggaaaagaaagggagatagaagaaaacagatgaagatgatataaaaatacttattttttttctaaaactagaacatattttaacatgcatgtcattaaattcattctccaaagactgagaagggaaataaatcatatgatttcatttacacaacccattctgttgagaagaacttactcccaatagattctacacttgaaatggagcaattctttttagttttaagacccgagaatactttgctctcttcaaattaaacctttaaagcaaagagtatgatagtaggcattgtctgcacagtaatatgtacattaagtgttgatatgttacagttgagaggcgttggggcaatgaatagttagagcataagcctttattaaaaatacattaaagtaaaataaaaagctcaatgtgatgaatttgttgatttcattcaattaatagttgatttaacttgtattcattgaaggaatatataaaggcctcttaatatctgcatgtcactctggtaaatgttggaagggaaaaagacgtcctttatgttttgaggattttataatttaatgagagaagacaaacttatcaagagccagttgtaataaatgacaatataagcaccacaaatcactatttttttttacaaagtagtcgtaagtagatatatttggagaaaatatctcatgtaaaaactcaaaaatacttctctactatattagtgcattgcagaagacaactggaaaaagagggattgtaatttctcgttccacgtatcctactagtggacgatggggaggacactggcttggagacaactatgcacgatgggacaacatggacaaatcaatcattggtaagtgaaagtcaccatctttattattattttgtgttttctattagatactcacttttgctggtgctaggtcataacatttataagtcctcagaattttgttcttcacatcgtactttatgtcatatagcatcagaaaaagacagtgggccaggaagctggattgagggtgctgtgtagaaactaatgatcttcaattagtttattttgaggaaatggtgtcattgttattggcctgagtttccttactgaaaagggcagtagctggcaaagataaggtctagagctaatagagagaaatgaatagaaattctagatttcatrgctattattaaaaagtcaaaaaataacagatgctttcaagattgttgagaaaagttgacatatatactgttggtagtagtgtaaattaattaaactattgtgaaaagcagtatgatgattcctcaaacagctaaaaacagaatgaccattcaaccccaaaatcccattagtggttatatacccagaggaatagaaatgatcctaccataaagacatgcacaagaaggttcattacaacactattcacaaaagacactcttcgmcaaagacatggaattcgccagttcgctattcaccaaagacatggaatcagcctaaatgcccatgaatggtagactgaataaagaaaatgtggtacatatacaccatggaatatatacagccataaaaaatgagatcatgacctttcaagggacatggatggagctggaggccattatcttaagcaaactaacagaggaacagaaaacaaaataccacatattctaacttataactgggagctaaacactgtgtacacatggacacaaagaagggaacaacagacaccagggcctatatgaagttgtggcgtgggaggagggtgaggattgagtaacagcctrtcaagtactatgcttattatctgggtgacaaaataatctgtacacaaaacccctgtgacaagcaagttacctaaataatacacctgcaaatgtacttctgaaactgaaatttaaaagattctagattctagggaatataaatcactgatagatgctaaaaaaaaaaaagaaacatttcgaaccaaatttggaaagaaatttgtgacaatagtagaataagtgctaaataagacattaccattttaatagggaaatagatacttttgtgctctatatttagtcttaaaatttgttcaccattgataaataaattcaaggaaaacaattaattcttagaaatattcctttaaaataagagctcagaaatcatattcattgtattttatagaattgattactccttaaaggatttgtttaataagaatggttcagtttttttcaaatgatagactgaaaccagttgaacctatagttcaatcagacctatagttaagtaactgcagaaatagcatatttattttcaaaaatgaaactgtggacaccactttcttctcacactataatgtgtttataatgtatttgttgtctgaatatgtcaccttgcaagtgtcaaggaagcttatagtatcttatttttgtaaatatcataaatgctacaaagtcaaaatgtgtgagcattatgagaagcattatgagataattatattaataatctgaaaaatgtttcaggtttggaggttgatattaaaaacagaacatcatcataaatagaaataaaaaacaatattaaaatatatgaaataataactttctaagatattttttctaactttttcaggtatgatggaatttagtctgtttggaatrtcatatgtaagtagttttattccttttatcttcataaattataaacattcataaactattcaaatttaactaaatataacaatatattttagactggagcagacatctgtggttttttcaacaactcagaatatcatctctgtacccgctggatgcaacttggagcattttatccatactcaaggaatcacaacattgcaaatactagagtatgtaattactacatttactttcagtattttcttacttgggctatgcttcattatactttagtgtacatggcttggttagctggtatatttattgatgttatatataattttggagtagtgaggaaattgtctggaggaactttttttgagtatctggggagacattactaaaaattatggaagagtaggaacagttagagccaatatctaaataagcactaaatttcatgatgctgactttcagtgaagaaatgcagaaaaatgataaattagcaaaatgcgcatgatggacaggttaaagacagagctggcctttaaaagatgtgctctgcctatagtaagtaaatggcagagctcgtgatgtgctgtgaaatctacatggtccccgcactggaaacttgggtagaaatagagagtaggatttattttagaaaatgctgaaatacaaggattgtaggcagaacggaaccacgtttgaaagaatttgaaagctggacaatagagacataacttgatgaaacagtaatatctcaacaggaaaatttgctgtcaataatgcaatttagaaagctgtaatattgggaaagtagagcatgaatcaatgaaagcttggggagagattcattattgagaatatactatttcatatttacgaagtccttgctcaaatgatttatatattctaaaaagggatataaataatagaccattttatatgtaataggtcagatacaaataaatgtctataagggaaaatagattaaactaaagtgatggagttttatagagattctgctttaggaaaagtgctcagaaaggtattaaatgaaggaatactagagctgagatgggtgtggggaacagtaaccaatataaacgtatggagaattccacatgggagcaacaaagtaaaatacccaatgattgtaatgtggttggtgtttttaaggaaaattcaaatgcagaaggagggaaagactgaggaagtatttctaaataaaaatctagaggatagaaaactctacttaagtttaaatatgagttggtacaaatgaactattgaaatgtattactcgaattgtatagtttagaattagatgcttgtgtatcaacatgttaaaactaaaatcatattaatgaggtcaataagcaacagatatgatctttgccttttttcttcttatttaactttggaaataccagcaataggattacatacagcttaacagttcttggaccatttttactttcaagattttctgtattctaatactgcatataacagctatgacatgaaattttcattcaaactttcttactcttaaaatacagaaaaattggaatcatcatcgatatgacacaactataaagggccccagtcatgctgatgtcaacgaaaaacatttaaatgttacctcgagctttgtgatggccttgcttattcccctggtgcagatcaaaatacaaaatagtaataacttttcttgcctattattttttaactaatatgtgcaagaattttttttgtagacttttaatcttccactctaaactttagactaaaaattttagtcttttgagctggagtgtgcattccagagcatactcaggcacattatttcctttcattcatctttatgccttcccttctatctgtactatgtattctttagtattctttagtaccataatctgttcatttctcctgagaacccacaatgtgcatggtcaccatcatttgctctgcttgtctatgtttatttcaatcgactttggatagcctatcatttcatttatctcctacactgatcactctaacactgactatcacctaattgacaacatatttgtcatccattaaaatgtgaacttttctttgggtatgttcacttaaactaaatcaagccatggatttaatttgaatttctcttattaaaatgttgtgtaccttttctctttatcatgtgatagaaatattattgtgtaagattttgggaagaaagtacatagcacatgacaatcaattaatatcatgtcttactttttagttcttcaaatatgaatatgaatattatgacttaaacaaggaccaaagcttataactatgttattttgctttgtttcagagacaagatcccgcttcctggaatgaaacttttgctgaaatgtcaaggaatattctaaatattagatacaccttattgccctatttttacacacaaatgcatgaaattcatgctaatggtggcactgttatccgaccccttttgcatgagtaagtacaaagtttgttttctcttatcacagagagatacttttcacttaatttacccaatgatctcttatagtgcaatataaaatattttagattggcagtttttccattgttatattagcacacattttttattaataaagcatttacacaaatatgtccattaataaatagactagcataagccattaaagaatgaaccacattaattagttattaaaaagtaatgattctatttcagaataattactgtatacaaggtattgttctacatgctttgtatatgtgcttacattgactattctcaacatttccagggagataagtaatgcccctcatgatttaattaatcacggtttactgcagttacgtaaatctactatatacagatgtcttactggagaccattccaccttttccttgatgtatcccaatgagatacacaggaacagtttcaacattatccttataaatttgttttggattcacctcttaaagctcaaacttttatatgaccaaatcttaaaaattctatttcatggagcatatttgcaaaaattttcatccattttatttttaagttgaatacaatcaaattcttattgtagatattacaaaaagcaaagcatgcagtcaaacataaaaacaaaaaaaccccgaataatcacagtatatttagctttttgagcaccctatattaccagagtaattgaatgagattatttgttagatttcactattgataagcccatttaaaaaaggcaaatatttacccaaattaaaacaatacccaaagtaaatttaccaaaataagaagtgaattggtatgccttctcttttgatgataggataagcgatccagttttcctaaaacaacaacaaaagattctttctggattcaaattatgttctggttgctttattaatttatcatctaccataatcccttctttatttctgataacattttattgatctcctttttatttacagactttacccctttttgttattcttatttgcttcccaggataatggagtatcacctctgggctgagtcactagtcagaaatattattattaactatacagactgttgttctattgagattacctcggtttctactttcatgagtttatggaggtgtaagcccatctttccaattcagcattaatctcagcttttaataaggcaaaacaaaaccacaacaaaagaacaaacaaattttaagaaacagcttttctttttcatttcaattggagaagaaatgtgaacatttaatagtggctcttaagccattaaaaaacaaaacaaaacaaacaaaaaaaaaacctttgtttttcctagccatttgcatctcaaattcagaaatccattaacatgttacagagcctttaggaacatgtaaatctactatttagagagtttattaagtaagataagcaaactctttttaaaattaatgaattaaaattcttacagtatgtctcacaattttcttccagtgtttttaatatgttttttaatttgttgatcatatactaggcaaagttaatatttgtacctctattagttctcttccaaagtaatttctcatttagttgatgttacatgtccatcagaattctctattttctccggaaatttagtcatagtctagatttactcataaagtattatactgctgagcattgtactattacattccaactgatatattttttaatttttttacagttttgtttttattttaatccacaaaagtccatactacaaaatgtaatttgaataatgattttatggtattcagaagaaagttatttgttttaatttaattatttgtgataattttgtcgaggttctttgatgaaaaaccaacctgggatatattcaagcagttcttatggggtccagcatttatggttaccccagtactggaacctgtaagtcctaccacatatttttgtttacacaattttctttggtttatatacaactaatggstatttatttacattccagtatgttcaaactgtaaatgcctacgtccccaatgctcggtggtttgactaccatacagtaagtatttaaggaattctggggaattaactaaacagaaacgggtaattgtttggccctagccttttcattaacggtatgttggatttactttccacttaaaaagagtggaaagtaacatatttccggtaaattatagctgaattgaattaatccacagtgaaagagagttaatttattctgctacagtttgttatgtagtcattgatttattttagcaaataaacatggtaactacacattacatacaaaaagataattgtcttttattggatatataaaatgatcattaaaggtagtgcagtctttctaagaataatgtacatggcaagtcaagcagagcttttgtgacttttcaaaaatccacacactttaggcatgtgaactccacaaaaacaacgctataaatgattttcaaagctatcataaagacttatatttaactagattctaaagatatgcttttttaaaaagtaaatttcaccatgtatatttaaggtatacaacatcatgttatgagatatatatatagtaaaatggttactatagtgaaacaaattaagattttctgaataaatgtgaattttttaatctaaaagtgtatcatttgattttttaaaatgtatatcctcaactaccagtgttgctgatgattccatttcttgctccacctgttctttccatccctttcatttccagggcaaagatattggcgtcagaggacaatttcaaacatttaatgcttcttatgacacaataaacctacatgtccgtggtggtcacatcctaccatgtcaagagccagctcaaaacacattttacaggtaagtgaactgtttacaaagctcaggttaaattttgagatacatcatgctagcattgttaagaaatagaaagggtttgaaattttaacccatcgccaagctagtacattagcctgcctcagtaacatgaatgccaggtcagagacaaaagtgtttgtggtttatagcatagcaagaaacaggaactttatcttagcatcaggttttcttttccaccaagtcccatggggatgacatggagcgacccaggcagatgttgcacatgtaggaggtctgtgtcacaaataaggaaccccaggtttaggaaaaccctgtctttaataagactacaaacaaatctatccattatttgcttcaaaaaaaatattatcttttttatattggacagtcaaaagaaatattaagaatttttaaaaagaaaccctgccgtccaatgctattcatttttttttttactatactttaagttttagggtacatgtgcacaacgtgcaggttagttacatatgtatacatgtgccatgttggtgtgctgcacccattaacttgtctttttaacattaggtatatctcctaatgctatccctcccccatccccctaccacacaacaggccccggtgtgtgatgttccccttcctgtgtccatgtgttctcattgttcaattcccacctatgactgagaacatgcggtgtttggttttttgtccttgcgacagtttgctgagaatgatggtttccagcttcatctatgtccctacaaaggatatgaactcaattcatttttaaaacatccctgaaaatacagctcagaagacaggctgtcaatgcctctgcctatgacatacaaaaatgcaagagacccatggaaaactgtcttccaacaggatattccctcttaaagtaagaaagcttcccagataaaaatataaatgaaacctttatgatctctgtctataatatgcagaaagtaatgacaacttaatgtcttatattttgaatggctgcctcaacaagatttttaccctacttttctgtttctgacatgtggaagatctagtattatgaagatcactttacgaaaacatgaaatatttattaacctgtttttcaaagacttattttttagagcagttttatacagcaaaattgagaaggtccagagatttcccatttaccccctgctcgcccacacatgcatagcctctctcattttcaacaccccccgtaaaagtagcacatttgttacaatcattgaaccaacactaacacttatcacccaaagaccacagtttacattagggttcactgttgatgttgtaaattctctgggtctaaacaaatgtatgatgacccgcatccaccactggtgtcctttagaattgttttactgacctaaacatcctttgtgtgccacctattcattgctctttcaacccgtggcaaccactgatattttactatctctgtaatattgtattttccagaatgtcatatagttggaatcatacagtatgtaacattcaatttgactttttttacttagttatatgcatttaagattcctccatgagatacctgggttgtatctcatttctttttagcactgaataatattccatttgatgaagctttttataagctttaagtcagtattgcttggaggtgtctctttcctttccattaatttgctgtttccctttctctgcctctcttcatctgtcttgtgatatatttcctgactcattatagtacatgaaaatgtagacattcactggcagtatcactactccatcaaactactaagtgtcctgctgtccaagaggaaccagacctgtttctcttctcttctttctcttctcatttcttctcttctcttctcctctcttctcctctcctctcctctcttctttctttcctttctttctttcctttctttctttctttctttctttctttctttctttctttctttctttctttcttcctttctttctttctttcttctttctctcttttttttgacagagtcttgctctgttgctcaggctggagtgcactgccttggctcactgcaacctccacctcctgggttccagcgattcccctgccacagcctcccaagtatctgggattacaggtgcctgccagacgcctagctaatttttgtatttttagtagagacggagtttcatcatgttggccaggctggtctggaactccagacctgtttcttttttttttaattatgtatttatttatttatttattattattatactttaagttttagggtacatgtgcacaatgtgcaggttagttacatatgtatacatgtgccatcctggtgtgctgcacccattagctcatcatttaatgaccttgtcccatataaagatgaaggctatcccagatttctgtctatcaccatttttataactgattgtctggccaggcccttctcttatttgcctgagaacctctacctggatttctgtttctctccttcagcaatatgtccaatttaccagggacaatggatctgctctgtcttctcagactgacataggtgtaaatctcttattcctgtcacagtctttatttccattgcaaaattccttgctttgacattcaaattctagaggaccctgtctctgtttttcttctctttttatgctatatcatctctcttggtgatgtacatgctgacagcccctgttggcatgaacagaatcttctaatctactggacccacccaggtccatttctactaatattctatcctgacatcagttaaagaggagagacattattgcacctgaaaagtgagggcttcatggaggagaccattcataaggtgtgccttgaataatccttatttttttatgagagagaagacagatcattgtacagtatagaaagttgtaaaactctttctaatcacaagttttagtatatgttgggaaattgcaggttaagccatatttttgatgtttctaaattatatttaaaccccagtgactgtgaactgaaattcatatacatattcatggtaaggtatgttaatatatttcactggaaaatatctaattactgtggagatttgaactctagagattctggaaattttaggagacttccgtggctgtacattcttcaacatttgtgattagaaaaggcagacagctaaaacaattggtctggtaaattatttcaaacaatatgaggctgccaaatcaagttgcttctcaaggattgctggagatgtaacatggaagcaagtatttagttcacaagtagccctatgcaggaacatgcttgaaaggtattctctattacagagatagaacttagaacttggaggctactttatacattcttattaattataaccagtgataactccatgatttatgtatggaaatatgaggaaggcttaagtcagaaaagattttaaaatgctattaaaattgtttcatgtttaatggttaatgacaggattacccaagagaagcatgagtaaatatatgaataaaattaatgtggttttaattactttcaattaggccacttctgatttgttacattacatgaaaccttgagatcaaaagacatgcatcacatttcctattaaatgtgaagaattttttttttgatggagtcttgctctgtcaccaggctggagtgcagtggtgcaatctcggctcactggaacctccacctcccgggttcaagcaattgccctgcctcagcctcccaagtagctgggactacaggtatctgccaccacgcccagctaattttttgtactttagtagagacggagtttccccatgttgggtaggatggtctcgaactcctgacctcatgatccacccgccttggcctcccaaagtgctgggattacaggcgtgagccaccgcacccggcctaaatatgaagaattttattgttttatatcattcctgttaactaatttagaaaaatggaaatgctttaattttcttagtctaagtcagtttgcacactccttaatgcttgggttcctatagatccttatgtggatgtcatatcataactagacatatgctattctacaaacatgggtaaaattatatatttctttcttatagtcgacaaaaacacatgaagctcattgttgctgcagatgataatcagatggcacagggttctctgttttgggatgatggagagagtataggtgagtgctcgatttagtagataaatttaattgatgtcgtattctatcacattacttttacgttatctattattgttctttggaagctgagtacaaagctattaatattattcaaggctaaaagattttactaaattcactgaatcaacttaaagagataaacaatgtcgcaaacatttaaagacttctcttatcctaaatatagtcaatccctatggtaagtgtctaggtaagaaatttgtgtgggcagaattatgtatctattatctttgtactttcagaagctagcacagtgctattcacataatagacacttggcatatatgtaaagttaacttagctgaataaccacattattatatgtgcaaaatattgatactatagtgacaaaaaggagtgacacttttcctcatttatcataagggtcacagccaacacctctataacaaagcacamgttaacatgagaaaagcataacaaacatatgtaatcatagttttatgtaaaacaggaaccttcagaataaaggcccaaagatacagagaatgctctcaggctttattcttaggttcaatgaaacaggaactgccatgtagaaatgtgattggacaaaaagtgtataagctaatggaaacagattgagtgaggaaatctagtaaggcctgtccacattcttgttggcttattaattgtagcatttcttcctctcaggtatggggtaagacccctctggaaggaggttgttaacttcttcatggccagctgttacacagaaaagcaggaaaagagagtaacatttctaggctttatagctagctttgggggaaaaggattctagtttctgtgacttgcctttgggaaaaggaattctagtttctatcactagagagtaaggagcaagagacaggagggcaggagaaggtcagagagaaactttcttccagtgttgcttctgggacctttattctgagaaatcagtttttgagcccccaaaatgtacaagtggtgcctctacaacaaggaggtagtccagaaaccaatctcaagtaaatttgatttctgtgtttttatatctactcttttggcttgtttgcttgtttttggtagtatttagcatttttttacatgaggagatatattttaatttagatctaggcttattccattcataactgttcctcaagaccatactaaacttctaaactcctagccatgtgaaattcactaaccgttgttatcagaaacacctgggacagcttgctaagaatgcagattataggactcattcaagtttcattaattttaggagaaactcagaaatctcccataggagatttttattctgtatgtaaacactgatagaggataggtttactgactgctatttaatagtgtcagtactactagatgagcgttctgaacattttgttgacacaaactttaatcaaaaaaattgatatctgtgtgaagttgacagttctctgcaatttaaataacttatccgaagataatagttttttcattaatagcaaagacatgcatcttttatcttaaaggtaaatcatagttaatattctgcaaccataagaaataatccattagtaaataagtgtaataaagttgatataagaattatatgctagacagcaagacttttgggaaaaataaatccctctttttaacattttgtgacttagaaagtgaagatatcaacacaagttagtcctttgcttttagagctctgaccttcatcaccgcaatgactgagggtctatgaagttttcagcctttccctttgtgtccagcaggaaatttgcctacaatttcccaggggtgtaaagtttaagtatgcaacttgggatctttgaatctcataattaacaaattaagttaattcatttcatcagttaggcagacaaagcttctcttagaattttctccagctcctcctatccaactacagcatcgatgacaacatttggtgtggactttaccctattcaagtttcatggcagactttttgtaatcactggaaagtacctgagcataatccaaatatttctctatgatctcctcatgcaagtataaaaaattgttttttgccaattggatctacttattttgttatgtttcacaatatcagtatatttggtataatttagtataaatatttttaaatagtcccttgaaatttcctgagttaacagcgaaaaccatatatagcaaatgcttattctctggatttgttagatcagaatctccaaagaggttttctctcacagcaaacacaacaatctagttgatgggcatccaatctgaaatgatgtctttcttttaaacaaacatgttcaaattttgtgatatattataatgtggtaacaaattatcttgaaataattaaaggtaaatcaaaatgaacttctcctaaaacttgttaacattaagtaaattttaaccattcttgattaataaagttatagcttagtaaaatgttaatttttctacttatcttaatgaaatagttatatttgtgtccttgaccaagatcatatgtgagatctttcttcctcttattaaaaacaacaaagctacccatatcttcgtaatagctgtcacttttgctttttttaactcagaattctatacttaaaagattgttcatgaaaacttaagttgtaattgtatatttgaaaataagaactaaaatggttaaggaatattgacactaatatgtcttgtaatacatattaaattagccatacatatattagcatacataaaaaagtcttaggcagaatatccattttagtataggtaaaatcaatagcaaattaattttagtgggttaatgaatacagccctgatgtgtataagtagataagagaataaaaatatcctgctttttcaatgttaccccaatacttcttttatttgactctactttgctctatcttatgtatgcttatttgtttttttacataaaaacacaatcttagaagtcaaggaagactgggtttgattccagacattgacagtaattagcttttttgtttttttacttttggcaatttatttaactgctttgaaagtcactttactcttctatacggtgggaataataataaaatatcttttagagtaaagtgatacagtatttagaatttggcaaatagtcagcactaaacaagttttacctgtaggatgatcattaaaatgagttttaaatatggcaagattatactttaaactgatggtggtggctcatgactgtaatctcagttctttgggaggctaaggcagaaggatcatttgagtgtaggagttctagacaaacctgggcaacatagggagaacctgcctctacaaaattaaaaaaataaaaaagccaggcatggtagtgcatgcctgtagttccagccactcaggaggctgaggtgggaggattgcttgagcccaggaggtccaggctgtagtgagccatgattgtgttactgcacttcagctgggacaatagagccagactttgtcttaaaaaaataaaaactaaaaaataatgattataccttaaagaggtggctataaacctacattttgccagtttaattttagttgacctgcaacaatctctaactactgaatttgttttttcaaatgacactagaatgtattgctaccatgttcttttttcctttatattattttgtcagtcactaaggtgacaagtaagtgtcgattgctatcatcactgaattctgtttattcttgcattacttgtgcacttcttgccaccttcccactgttgtgtgtgaaaattattttaaacctgttactgttttatcattacccctacacacacatacaccacctagcttgtcctcttaggaccttacctggtgactcatccttcatttccaaggctccttggattgtatctgaattagttaaataggcttagagaaaaaataggtacatcttgataatatttgctactttttatactgggaaagagaagcaaagtatacaggtatttactatggttcttctttggaaataacaatatatcacattttttttctctctctacagacacctatgaaagagacctatatttatctgtacaatttaatttaaaccaggtatgtaagattatttatatgcaattctgttaaggaatatttgaagttcacagctrggtggggtggctcatgcctgtaatcctagttcattgggaggctgacatgggaggattgcttgaggccaggggttcaagacctgtctgggcaacataatgggaccccatctctataaaaacattagccagttatggtggcatgcaactgtagtcccagctgcataggaggctgaggctagagggtcactggaatctaggagttcgagatggcagtgagccatgactgcactattgcactccagcctggcagtaatggattcacctccccttctcttgcatatttggtgactgaatccaaactttctgagcctgggtggcagagggagaccctgtctcaataaatagatacataggaaaaaaggaagaaaatttgaagttttattcatgtttattatgtaaaataccttatatcaaatgcacaaataaacaatttattatactacgaaatacatttttggttaaccgacatatttttaaagttttaattgcttttgcaaataaagtgtttatgttattcctttttctttatttatagaccaccttaacaagcactatattgaagagaggttacataaataaaagtgaaacgaggcttggatcccttcatgtatgggggaaaggaactactcctgtcaatgcagttactctaacgtataacggaaataaaaattcgcttccttttaatgaagacactaccaacatggtaagtaatgtaagaaaatatttttcaaaagcgtacgtatttaaagcatctacatggacttcttatatccctcatctgtaagaaacataattatgagtcaattatgacattcttcatatattccttttcattaggcctccatatttatttccttattactatccttagtaaactgtcatacaaatcaatctaatgacatctattttattcttattatgatacaatcacagcaaaattaacttaaaactttaaataactgttatccctatatgataaagtgcctcagaaaatacttttttaaaaataagatatctgcatttaaacattgactatgtcttgaaaatgtatttgaaaattcttgcaaacttaataaaactgtcagcacccattaatacaggagtgtgatacatatgatacagataatacacaaggaatcaggattcttgcgttaaagcatcattgctgccagtatttagctctttactttgaacaaaaaattttaggcctattattctatccaattgaatagaaaaaaatgcaagtaaatgatcaatctcttaagctccttccagttctaaattctgtgaatctatggcttgcaaaggtgaatttcaaacacatgttctagaaaacagctaactgttttaggtgttcattttaagtttaagcctacttatgcactactaaaactgtgtaaatttgtgtgcacccacccttaatcgtttaaacttggataaaaacaaagagcctttaatcagtcactttagatgaacttaaattctaaaattgtcagatgttcgactaacttgaacctaaaaaaatatatatatatgcatttggacacagtcctaggtccttgtaggtgtcagaggatgtcagagttaaacagcacctgaaagtctgttccatctttttgaaactcaacacccatcctactgctactgctgttttgttgacaagtggggttttcctttaatatggaactatgtttttcttactgcttttgcactgcaactcgctatttttcttaaaactgtatcaagaataggaaatataaaataaaatttyccaactttgatatatttaatgtccttcctcggtaaaataaaagttaatatcttagtgccttacactcatatttttatttttataatttgactgatttataaaattccagaatacctgatctagtccagtagtcttatgtgggtgacaaagaaattaagtccccaaagaaggaaattaattccccaaaacaactactcaatagttatcaatcacaattagaaatcacttttttgcacggtccaatgttcaatcagataaagaaaagacggtttggcttagataatatcttaccttttatttactaaattacaatggcgaaaattaagctcacaacttttatggtaaaaataaagcaaataaacaatgccaaataagatattttaatattttggggtgttatttcaaggtcgttttgatcaaatatgtagcataaaaacaaaccattaaaaatcatttttttctattctctttaaaaacattcacaaagaattttaagtgttgagaacaaatatttgacagtgtttcattacctcagtgatgaagaaatatacatttactttaaccaacaactctgggcagttccttctaagtgcatttaaataaactcagtatttatgagtaatcactgttttccaagccttcatagatacataggaaaggaagagaggatggtcaatttctttctccaccctgcttgtcctttaatttatgcaagagattatttaattgctctagcaatataatttcaaaagcatttttctagtaacaattatgtccagctgatttatgtaaaaagtattaaaagctatgtggtgtatttttgctttctacctttaagttaaaaaaatagtttaagttttgttacaagatggatctgttttaaacctgtctaacgaatactcaattatttaactattactttttaaattaatttatcaaatgtggtaaattaatccaaatgtgctgtgctttaaggaagattaaattttataaagcccttatgaaaagacctggtatgtggtaggtagtaaaggattcacctccccttctcttgcgtatttgatgactgaatccaaactttctgagctaaagcacagaaaatcttatcagttcattggacaaaaaggagcaatggtaaagtctcctgaaatcgtcatatcataaaactatgacagaagatcatttgactacagcaacttaataatctccatgatagagataataatctctctagagtctactttagattatctccagtgaaataaagtaacacatgcaaaattgaatcattggcaataaatgaagcatcataaaatcttttttgattgagttaaaataacacttttaaatctaaactttggctgaaaatgactggataatacttgacaaagggatgcattgagattcatgcggtgcagttataaataactccatatttcaaaattatgtgaaaagagtaaagtcataraaatcaataaaattggctgagagttttgggtttttcagtatcttttgacagcaacttcacctttctgagatttattttaaccttaggtaaaatggataggttgggtgaaattgttgctgaaatggttgcaaactttctgagagtaaaaatttctcaagatataaaagaaaataaaggtatatactatttattagaaaacttttttgaaatagcattcatgaaaataagaaaaatgtggttgtgattaaacaactaattattattttacttttttagatattacgtattgatctgaccacacacaatgttactctagaagaaccaatagaaatcaactggtcatgaagatcaccatcaattttagttgtcaatgggaaaaaacaccaggatttaagtttcacagcacttacaattttccctcttcacttggttcttgtactctacaaaatatagctttcataacatcgaaaagttattttgtagcgtacatcaatgataatgctaattttattatagtaatgtgacttggattcaattttaaggcatatttaacaaaatttgaatagccctatttatccttgttaagtatcagctacaattgtaaactagttactaaacatgtatgtaaatagctaagatataatttaaacgtgatttttaaattaaataaaatttttatgtaattatatatactatatttttctcaatgtttagcagatttaagatatgtaacaacaattatttgaagatttaattacttcttagtatgtgcatttaattagaaaaagagaataaaaaatgtaagtgtataaaatgtgcattttgtctttattttcctaatggaaattgtcttagcttgcactgctataacaatttatcatggactgggtggcttaaacaacaaacatttatttattacagttctgaaagctgggatgcctgatatcaagacattagcagatccactgctgatggtggcagtctttatggcttacagacaattatctttttgtatcctcatatggcagagagagaggaagaaaactctctcatgtctctttttataagagcactaaggtgcaggatacaaaatcaacatgcaaaatttagtagaatatctatatgccaataatgaactatctgaaaaaggaaaacaatcccatttacaatagtcacacacacacataaaaatcacaccaccaccaccaacaaaaaatctctgggaataagtttactcaagcaggggtaaaatatgtataaggaacactagaaaacattgatgaaaaaaattgaggaaacacaaataagtggaaagatatcccatgcttataaattgaatacaaaaataagttaaaatattcatactacccaaagcgatctacatatttgatgcaatctctatcaaaatactagtaactttcttcacagaaatagataaagcattcctaaaatttgtattgaaccacaattgacccagaataaccaaagcaatcttgtgtaaaaagaataaagctagaggcattacactacctgacttcaaaatatactacaatgctatagtaaccaaaagagcatggtactgacattaaaaaaaaaaaaatacacacagaccaatggaccagaatagagtctggaaataaattcgtgcatttagagccaactgatctttggcaaaggcgccaagaacacacattgaggaaaagacagtctcttcagtaaatagtggtgggaacactggctatccacaggcagaagaataaaaccagattcatatctctcagcatatataaaaatgaactcaaaataattaaagacttaaagagttgaactatgaaactacttgaaggaaacataggaaaaatactttatgacattggtctgagtgagaaattttggatagaaccttcaaagcacagccaatgggagcaaaaagagacaaatataatggtatcaaactaaaaattatctttatagcagagaaagcaatcagtaaagtgaaaagatattccccaaaatgagggaaaatatttgcaaactatgcacctgacaagaggtccacatccaaaatatacaaggaattccaacaactcaataccaaaacaacaaataatccaatttacaaatgagcaaaaggcctgaatacacatttcttaaaagaatacatacaaatagccagcagatatatcacaaaatgtccaacattactaatcatcaggaaaatgcaaatgaaaaccacaaggagatattatctcacctgagttagaatgtctgttataaaaaagacaaaaaataacaaatcctggcaaggatacataataaagggacattttacattgttggtgggaatataaattagtatagcaattatggaaaacagtatggaaggtccttaaaagactaaaagtagaactacaaaatgatttggcaatttcattactggttgtccaaaaaaattgaaatcagtgtgtcgaaaagatatctgtacccctttgtttatggcatcactattcaaaatagccaagagaatgaatcaacctatatggccataatgggtgaatggataagaaaagatggtatatatatgcaactgaatatgattcagctatgaaaaagaatgaaatcctgtcatttgtgaaaacatgaatgaacctggaggacacaatgttaagtaaaataaatcaggcagagaaagacaaatactcgataatctcacttattaagataaaacaaacaaacaaaaagcttatctcataaaaatgaagagtaccatagtgggtatcagaggctaggaatgggagaaatgaagggggtatgaagggagataggacaacaggtacaaacttacagttagataggaagaataagttctagtgtgctatcaggtagtagagtgaatatagccaataataatcaactgcatgtttcaaggttgctagaaaagaagatcttgaaagttaccactacaaagaaataaaagtttgaggtgatgaacatgctaactatcctgattggatcactatacaatgtatatatgtattgaaatatctctctgtactccataaacatgtacaattattatggtgtgaattataaacacaattttaaatatcaattgaccataaattaatgggtttatttaaaaactctcaattctattcaactgaacagtatgtccacctttatgctagtaccacattattttgattactctggcattgtggttaagttttgaaatcagcaagtacaagtcctccaattctgttctttttcaaaatagttttgcctattctgtgtctcttgatttttttatgaatttgagaatcaacttgtaaaattctataaaaatagtaggtgggatttgacagagtatgtgttgatctttagctcagtagggggagtactgccatcttaacaatattaggcattcccgtccataaacataagatggatttcaacttatttaaaagtgttaaacttctttcaacagtgtttcgtagttttcagtatataaatcttcaatttatttttgttaattttagtctaagatattttattcactttaattctgctgtaaaatagtcttttaatttcattttcagattatgtactgctagtgtatatgaatacaattgatttttatatattattagttacaacagttttcttggaagtaatagagttttctacaaaaaaagattatgacttcggcaaatagagatacttttacttcatttcaatattgatagaagtggtaagaatatatatcattgtcttattcctcctgtgaagggaaaaatattcagactttcattattaagtatgataactattagcatttgttttgttttgtaggtgtcctttatcaggttgacaaatttcccttcttttcctaatttattgagtatttttccataaaagtttaagatatttttgtcaagtgaattttctgtatctgctcagattatcatatggtttctgttctttagtctattaatatggtgtactacattggttgtttatcagaggctaaacaatcgtattcctgggagaaacccaaattagtcatggtttataacagaatatctaaaactatgtaatttataaggaaaataaatttactacttccattcgtggaggcagacaactccaagatcaatgagcggcatattgttatagtcttctttctggtggggactctgaagttttgaggtagcacagagcatcacgtgggaagaggactaagcatgctggctcctgtctctcttctgcttatcaagccacaagtatcacacccatgataacccactaatccattactcgataaataggttaatccattctgagagctctgccttcatgatcaaatcacttcttaaaggtcctacttcaatattgctatatcgggaattaaattgcaacatgagtttggaatggaaaaacacacaaatgatagcagatttggtattatttgttcaaatgtttggtagaactcaccaatgaaaccatctaggcctgagcttttttttgagggcaacatttttattactatcttacttcttacttgttacagcttataggtctgttgtggtttggctgtgtacccacccaaatctcatcttgacttgtagttcccacaatcctgatgtgtcatgggatggacccagtgagaggtaattgaatcatgggagcagttacttccatgttgctgctacatgatagtgagtgagttctcatgagatttgatggttttataaggggcttgtcccccttttgctcgacacttctttctgccaccatgtgaagaaggatgtgtttgcatcccctttcaccatgactgtaagtttcctgaggcctccccagccatgctgaactgcgacccaattaagtttctttcctttataaattacccagtctcggttatgtctgtaatagcagcatgagaatgtactaatacgaggtctactctgattttctttttctttttgtgtcagcttttgtcacttttgtctttctagaaaattatccatttcatctaggttatcgagaggttggcaaatagtggagaaatagttgttcttagtatttccttttaattattttcttgctataatgtcagtagttatgccccctttttccttcttgagtttagtaattttgttacaggtagctaggcatgagcagggcaggaaagagctccctcccaacccactagaatgtcagatgatggttcggcaattatcaaattacctctctaaaaataatttggcagtgccagggagagacaatttcctgatggtccacacctgttaacatcaaaatgttaattgaatgcagacctcaggaagaagcaacttcctgggcacacatgttaagagacaaaaatagtaaagtatgatcttctggtggcacactccaccagaaaagggaagaaagcctcagatggggatttatgtaactccctaaacatgatgcacatgctcaattccaaagggtaaggaaggcttttctcaattccaaagcatgcggaaagcccatcctaaggaaagaatcatgggaaagaggcgagctcttaaaagtcctaggattatagttaaacagggcacttgaccttctctctttaacattcacgtgccaacttgggtctcttccaagcacgcctttctttcttttctgttctaaggccttttacaataaacttctattcctgctctggaactttcctcagtctctttctgctttatgcccctcacttgaattatttattctgtggaggcaagactgaagttatggatttgaaaggataggccgccaataacttgaaataactcatatatcttccactgataccaatttgagtcttctctatttctttcttggtcaatctagctatagattcgttaactttttgaagtttaaaagaagcagctttttaattttttcaaaacatttttctccattttttactctttattccacttacattccactcttcattatctctttattttggtatgctttgaggttagtttttctctcctttttcaacataataagatggaatgttagataatttattcaaagtatttattcttttcttaaaaataatatagatatttacaggtatcaattcccttctaatcatagttgtaacagactcccataagcataattttatattttgcctttattctcattcatctcaaagtattttctttttttaacttttattttaggttcaatggtacatgtgcaggtttgttatataggtaagctcatgtcatgggggtttgttgaatagattatttcatcatccagatattaaacttagtacccaatagttattttttctcattctctcatctcctgcctccttccaccctccaccctcaagatgggctcagtgtctgtcattcccttatttgtattaatgagttctcatcatttagctcccacttataagtgagaacacgtggtgtttgattttctgttcctgcattagtttgctaagtataatagcctctagctccatccatgttcctgcaaaagacataatctcattcataaaaaattgaatcaaactgaattacagacataaatctaagacctgaaataataaaactactaaaagaaaaaattggggaaattccctaggactttgggcatagatttcttgagcaatatcccacaatcacaggcaatcaaaataaaaaatagacaaatgggaccatgtcaagttagaaagattctgcacagcaaacaatcaacaaagagataattcatagaatgggacaaaatatttgcaaactatc

SEQ ID NO: 94102 - DNA, 38941 bp, Homo sapiens
cagctcacttcaacctctgcatcctggattcaagcgattctcttgcctcagcctcccgaatagctgagactacaggtgcttgtcacctcgcccagctaatttttgtatttttcatagagatggtttttagctatgttggccaggctgtctcgaactcctgacctcgggcaatacacccacctcggcctcccaaagtgctgggattacaggcatgagccaccgtgcctgactaaagatggttctttctatgcctagatttgataaaagatattttatcattaatggatattgaattacattgaatattttccacctactgagataatatgagtttctccatgaatatggtaaattggattaataaattttctagtgttaactaatcttgaatttcagtatctgaagtttttggttcaatttggtcacctatcgtttctgctggatctccctcacgggactttgtttccttgattgtttagcgatttatcagtctataaatatgtatggaatttaaggtctggtatcaatgaggactccttcaaaaagacatattttgctctgccaggcaccttggggctctatcagtcaagaaaacccttgaagttaaattatctacttaaggtttgtcaggtcactcaggtagtgcaactttgagctgccaaccagagcaagggccaacttatacttatgaattctcagggcagggtttttattagtcccttgtggtagattcagttagtggtcctacagaaagtagattagtggttgccagggactaggaatggggagtgactactcatggggctggggtccccgtgggtgatgaatccgttctggaattatgctacagtctggatatttgtgttcccccaaattcctatgttgaaacttaattctcaatgtaatggtattcagaagtggggccttttagaggtggggcctttgggattaaagaggcccacctctttgcaatgcaagcttgttttcccccttccaccatgtgagaattcagcaagagggcaccttctatgaggaacaggccctcagcagacacagaatctgctggcatcttaatcttgcacttccagcctctagaactgtgagcaataaatgcctgttgtttatgagctatccagtttgtggtattttgttatggcagcccaaacagactaagaccaattagatagtggtgatggttgcacaactctgtgaatatactaaaaagcactgaattgttcactttaagagtcttatgctctgctgactgagctagctgcacctgtgaattgctcactttaaatggatgaatttcacggtatgcaactgttatctcaatttttttaaaagtacttgtttcataggattgtcataagactaaatgaaagtatgtaaaatacacagtgactgtattcaatgaacagaagaaaaaaaaaagtgcacacccttgccctggcctcatggtaggtagagaatactttctcactccttgactgtgggcttagtcatgtgacttcctttggccatgactgtattcaagaatgtgttaatatattttaaccagcattttcagttgttttcagcaacagatcatccaggtacctggtctgccatggtgccagaaattgccttttttttgcattatttcaatctggatttcaaattaccagtttggttgaataacttgccatattttttttctgtacttttatttgtattcctttctatttctcattttttctattgcctgttcataagtctgttggtgcttttcattatttattttaaagagttctttttaaaatatttttattttttatttcaaaattatttgggtagaggtggtttttagttacatggataagttctttagtggtaatttctgagattttggtgcacccatcacctcagcagtgtacactgcacccaatgtgtagtcttttgtccctcatccccctcccaccctttcccccgagtccccaaagtccatagtataattcttatgccttttgtcctcatagcttagctcccacttataagtgagaacatacaatatttggttttccattcctgagttatttcacttagaatagtggtctccaactccatctgtgagttgccattattttgttcctttttatggctgagtagtgttccatggtgtatatataccatattttctttatccatttgttggttgatgggcatttagactggttccatatctttgcaattgcaaattgtgctgctataaacatgtatgtacaagtgtctttttcaaataatgacttcttttcctctgggtagatacccagtagtgggattgctggatcaaatggtagttctacttgtagttctttaagaaatctcggtactgttttccacagtggttgtactagtttccattcccaccagcagtgtcaaagtgttctcttttcaccacattcacaccaacatttattcttttttgatttttttttattatggccattcttgcaggagtaaggtggcatctcattgtggttttaatttgcatttccctgataattagtgatgttgaacagtttttcgtatgtttattggccatttgtatattttgagaattgtctattcattcctttgcccactttttgatggggttatttttttcttgctgatttgtttgagttccttgtagattctggatattagtcctttgtcatcagatgcatggtttgcaaatattttctctcattctgtgggttgtctgtttactctgctgattatttcttttgctgtgcagaggcttttcagtttaatcaggtcccacctatttatttttgtttttgttgcatttgcttttgggttcttggtcacgaactctttgcctaagccaatgtctagaatagctttgccagtgttatctcctagaatttttatggtttcaggtgttagatttaaatcttagatccatctggagttgatttttgtacaaggcgagggatgaggatccagtttcaattatctacatgtggcgtgccaattttcccagcaccattcgttgaacagggtgtcctttccccattttatgtttttgtttgttatgtcaaagatcagttgtttgtatttggctttatttctgtgttctgtattttgttccattggtctacatgcctatttttataccagtaccacgctgttttggtaactacggccttgtagtatagtttgaagtcgggtaatgtgaccttagattgtctatttgtgctgttttagactttttgatatgggcatttaatgctatgaatcttcctcttagcaccacttttgctgtatcccagaagttttgataagttgtgtcactattatcattcagctcaaagaaatttttgatttccatcttgatttcattgttgacccaaataccattcaagagcagattatttaatgtccatgtatttgtatagcaaaagtcctatcctgagggtctgttttctgaggccaccccatttctgacacctgttttcttagcctatgtttggtagaaagcaaagcctggagcaaaacatatgtggtaaatctttagtgaaggatgcaatcccatgggtgtaagagtgagggaataaatgaagtgaggtagggaaggatggaaacaaaatatactttggtgtgctactgagttcgccactgttactcaagaaaacacagcttatctcacagtcttcctgaatgcttccagaagagttgtatagaatcacaccatcttgaaatggttgaggaaaggaattgatctgcctacgggtgtttgtctcatttctgtcagtggtcaaagttcaccctattaggtgtttgttagtttcctcacacctctgagttgtgttaccttggtcctggtagtcagtaggaaagccagatcccacacaccacagttcaatcctgaatccaaaagtggtaggagtcatcagagcctccatggatctggtcaggatgagcttgagtgcagaagctcctgctgcagtgagtgcagtagaggtcatttcagaacctagccctcactttagaaaagtgaaggagtcagaagtgtcaggagatgtgaaaacgtcagtggcagtcagggatttccattgatcaagtgcctgatcgcctgggaagtagataaggctgagaaaatatggaaggagtataaattggagcaaggccatccatactatggttttcgtacctggacaaacaaggcaactctagtcctgaatattttgcagatgcacagagggagacctggaaggttacagaccaaactgggaatagttgttccctctaggagcagaattgctggctcagagggtagatgtatgttcaactgtaagagataatggaaacccgttttccttacaactggtaccaatttagactcccaccagcaatattcaataaatcatatggattcacatcctccccaacacttggtactgttagacttttaaatttttgacaactgaatgggtgaacagtggtatttcattgtagttttgctttgcattttcctgatcactaatgatgtcgaacatctctttatatgtatgtttattggccatatgcgtctctctgttggtgaaatgcctattcatgtgttttgcccacttctttactggattgtgtttttcttaataatttgtagtcctttatatattcgcaattggaattccttgccacttatctgtattgaaaatattttctcccaatgcacagctgtgttttttgctctttatggtgtcttcataaattaaaattcttaaagtcaaagttaccactattccattctatggtcaatggtttgtctacattgtttagaaatctgtatcccaaagtctaaaagttccttgcctatgtttcctgtcaagagctttaagggtatgtttttgacatttaattccttaatccatctggaatagattattattattttccatatcacatgaatgaggattccaatttcatcttttccaatataaataaccattttccagcgtcagttaataaaatgtccctgtttacttacctaacatgccacttctatcatataccacatttctatacttgcatggttgcgtttcggggttctctattctatgccattgctcaattaatctatccatgcctcaatatcacagtcttaatttcaatctctccccccccaccccacccccccctccccccccgttcgtttagagtgatcttgaggaagggaaccgtcattcacatgagttcggcctcttggtagagaaaactgggcaatgcagctctaaactgttgcccttggattttctcctcttggctatgagctcctccttcccaggaagctttgaggaaggtcagaataagattacatgtagtgatgaactgcttctaatactgtgaggctactagcttggggtaggggaccaagagccgtacaagcccattaaatgtttgttttgttcagaaagccttccatcgctgtgactggtgtttgaatgtctccaatgcgttaggatgctaaggaatcctcctctagggttactaaggaatgtttgctgcctttgctttcgctgagccggaaaaattttgtggcatttacagcaggagatctgccctaagtaaaaacagtttggttttgaaggcaataagatgtttcatcatcaaacagcacacaacaattaaatgacagggtgcagcagcacagcagccttaaaggcattttcgcaatgtccagatctcaaagggtaatgctgcgcccgcatcaatttatgggaagagtctagagttcacctacatcttttgaactccactaagccggccgattctgatttcccttgttgcctccctgcaatccccacgaatttggccagggcacccgggcggctcaggcccaacggggcgtgggccgtgtgctcaaccacccagaagctgggggccccctcccctttcttatctttctggcattcatctcacgcggccacctacagctacgacttcctcaggccctttaagggccgcttctcggagcgcagggagccgcggagtccggggcgtgggagacttccatgggcggagcgagggcaggagtgggcgggccgtaggcggagctccgtccgcgccctcccggcgcaccgcctgcggggcggtgactggcccagccgcaccgcgtctcccgccttctccgcagccccgcaggccccgggccctgtcattcccagcgctgccctgtcttgcgttccagtgttccagcttctgcgagatgaccctcaaggcgagcgagggcgagagtgggggcagcatgcacacggcgctctccgacctctacctggagcatttgctgcagaagcgtagtcggccagaggtgagcgggccccgctagtcccaagggcgctgggccggggctcggccattcatctcgggactttccctgtcccggtccctgtccccggggggcctgtccttgcgggtcctggccataggtcggagaccgcgatagccggcggggtgaggacaaggccagcgcgcggccgggttcgtaccgggctgctggtgcagtggatccttgcccccagcagtccttccagttggaaatcaggagaggcagcggcctggacagtgcgcttattaagggcaaggaaaacttcctcgtggacggaagtcagagtaacagaaagtctttaaggaacacatcaaggagtaggtctgcctggttgttgttgaagtgcttgtgtttgggtcagcagaaatgattgtaaaagccagcttctggttctaaagagctcactcactgttcctcttcatttaggcaggtccccttgtgctatggtgcaaagagggtggccagtgtatatttgcgggtggaacaaggaatccagattccagggatggatggctggtaaatagctattaacctccgtcctcaaagatgccctaagggtaggttgtgcttatctgttactggcaaatctctcccaaactcgctggtttacaacactgagcattttcttgtctctcatatttcgttttgattgggcccagcaaggtggtcgtcactcagggtctgtcaggtggggacacggctcacttactcatttggagccatgagccatgagccagaaaatcaaccagcagcctctccctgtggcttggtcttcctcacagcatgctggccaggtcccaaggggaaaatgtccagagagaaccagagagccaggcagaagctcagaagtcacagcatgaacctccttcctagactgcaaggtcttctagggcagggccgtgtcatactcacttctttaagtgcccaataagtgggtcctcagaaatgtttgctaaattaataaatgactgaagagatggacatttgggatttacagtaaccctccgatttcacagatgaaaaaactgaaggtccctgcaacataaggcaagcagtagagctgtagactctttgggctaagtggcattaactcaaggaaacaagtaatgggcatcagaactgaggctagattttgtgtctgctgcaccgcattgccttaccctttatattccactcgagtgaggcattcacacctgcctgtcatttcaaatcaggattgcaacagcctgagtttaaatgagtgcagaaataatacaggcatgaaagatgctattgttatacagatgatgagacaaaattacaagttctgttacctgattccccataaacttggacttgtgatttttttcttccccacaatcagtactcacttggctgagcctcaactatttttaaaaaatctatttatttctggaagtcttattgaggtacacttagcatacagtagaattcatgaaatttaattgtgtagtttgatgacatttgacagatgtatatagtcatgtaacgacaaccacaatcatgacaaagaataaacattttcaaggttccaggaagttcccctgtgacccttggcagtcagtcaccttcctccacctggaacatggcaaccactgatctgtcactatagatttgccttttctggaattttatataaatagaatcctacagtatgatgtattttgtgtcggggttcttatgtaaacctatgtgttcccttatgggcatgcttgaaagactgtgcctttttgaaaagaggccctgtcaccaccagtgttatgttgtgggcacaacctctgagtaaacagcacgttttgtggggctgtgagtttatactgtaatattggagatagtctaccagttagctaatttgtttggtttttactaacggatttgaagaagatcaaataagaaaacttactgaatccctgaatgaaatagtatccagctgtgccaaagtgagcatctgagggagactcttcacacgatgaagtgtggcttgactccacaacctgcggattcttatttctttaggttcaccttccctttggggctcttaccagtctttgctgcagcagcaagctctgcctttcacttgctgcatggttttgggcaagctgctgaagctctctgtgccttaggtttctctcctttatgaaactggcaagtttggaaggttgtggcaacatttacatgagataatgcttgacaaggaccttgagccacactgggacatccagggtaatgacccagtatctccctaggagctgcctgcccagtagtagcagtcagaaagttttcctataatggcaagatttgaagcaggaaaacctgtgaggaagttgttggcttcaatagaaattataaaattattttgctgaaagtttcatttaaaggtgtcactttatggaaaaaggctaccgattcaaaacaaagtttcacttccaattataatccacatttaatactgaaagaatattgtctaaaggtaattttgcaataggtttgaatgtagcctrtctcccctatttaagtatatctccttccttggataaactaattttttttttcttttcaatgtggtctaggcaggttaatggagaaactaattttattagctctctctggccttgttcttcacagcagtatccattaatgcacataaaagtagttgtaaaattcccaatactgcttttctcttcgggcctgtttgaagcaacactttccccaggacctgaagcaattggttgagaatccctgaaaattctcttgggcctatcccacatcaaaaaaaaatcacctaacagataagtcaggctccaggcaaatttccaccaagaaaacctgtttcttggttcttaggccatcacatgcagcattactccccgctggtggtcactgagtgtgacgcagtgttgtttgttgcctactccaggtctgctgctggaactaagaggcaaataaggaaggacgcagacatggaaacaaatacagtagtgtggtggtgatgtgatagaagcagctgtggagcgctgtggagcaaggaggggcacccagcacagtgggctcttgcatttcgcagtacctaggctgtaactggcaggtggtacctgggcagagggaacagcctgtgcacggacaccaaggtgcatgccgagtgcggcaccttctgcgatggcaggaggttgagtctacggtgtgcatgatcactgactctgcttctgactagttataatttcacctgagaaagaactttcgctgcagacttggatcttgctgtttcctttgcaaaggaaatggttccgttcaaggcttttcttttcacagaactgatactagaaagtaaagtgtaattttcaaattatttagtcctctgcccaatttccccagtatgtggtgtggtctcagccagtctgcctttcctgtccttcacttccaggaacttcatgacttttttctgtttttttttttttttttttttttttttttttttttgagacagagttttgctctgtcacccaggctggagtgtaggggtgtggtcttggctcactgcaacctctgcctcctaggttcaagcgattctcctgcctcagtctcccagctagctgggattacaggcgcctgccaacacgcctggctaatttttgtatttttgatagagacaggttttcgccatgttggccgggctggtctcgaactcctgatctcaggtgatccgcctgcctcggcctcccaaagtgctgggattacaggtatgatccagcgccctgggcctttcatgacttttttttcaaaactggaagggcttaggataccttgcagataagaatctgcttttattgtggctaagcagatttgagtttcatcatgaacgttctattcttttctaactcatttgttctccctacacaagacactgaagtataatagaataccaggaacagatatttcaggttaagatcaattcccttaaattggagtttgccaacctgggcactgttaacactttgggtctgataattctgttgtaaaaagtaatacctcgccgctaagttgtgacaatcaataatgtcctgagacagtgtcaagaggggagacaaaattagttgatgcagagatttttctcctaagcagtgagttgtctctaacctttcagtgttgctaaaaaagaactctgggtgtggagtgtagaaaggcaagactaaatagccatatttccaaaattggctggggtaggggaagtgacgccagaggaggggaagaggaactttcgtaacatagtcttgcttttctttttttctttcatatgaagaaatatacatgaacaaaacacataataggttttccctcaaaagttatcttccttgcgaggccttttctgctttattttcctccttagcacctgccatcatctctgaatattctgcacagtgcagaggcagcctttatgtgagggacacagcacctgcattctctccatgtacctgcacaaactccaaagtccatgcttatagtttaacttctggagtctgaggcttactcatcctttaagctcagacaggtttctgaaccatttcatgtcttcaaatattgaccacagaatggggatgagcatttgatttaacgagtgttgttatttgcacacagctccggcactggtttaatggcagtgtggggactcagtgccaggtatctgcagccctgtgtttctgctgtgtggaacggtgctacttgagtttcctgttgttttttttccccagtggaagcaaaagcctttgcatgtgtactgagagcatggggtagaaaaagctcgttgggaagggatctctagagacttggcctttaggttgatgtatgtgttcccagatggatttagtacctgagaagcaaagcacctggttaatgtatgattttaagacagtacctgccagaatatcctggctcttaggccttcctctctccctagttcctgtcatttgtggttaaacagtgctaatctctttctaatacttcagaatacccttggctttctcagtttctcttgttttttcccaaagtggaataggatactgcccatgcaaagagagggaatttgcgagcacctggggccagggcttgctgggcagctgtctggcatcatctcgccttcttggacttggctttctaagtctccacgtgggagcagttggcaaagagcctaacagtaggctgagcaaatatttgttctttcctatgttcactgtcacttaatctaattgtttggattagaaagccaacttcagttgcccctgctctattcacccccgccaccgcccgccccccgccaagtttgtttttcatctctttttaaattccagcttcctttgagcaactgcctctgccctttgaaccctgctgcagatgtttcctctgaaggggctttcagagcggcaggcattgccactccagcactttgtctgattaaaggccagaggctgcagaacaaaggccagacatggagtcctgggtgagtgtttattccctggctcctcctgaatcccagcagtcatccttaacagagccacttccgccctgccttgtcactggtcaggggcaggcctgccatagctctgtggcctcctatatccactacagatgatggtggctgctttgagaggatgatgtggaggttgtgaactgaactctgagaaatagaatctagtacctttgacctttattatttgttcagcattactcatgtcactgacagtatatgtctgcatatcttttctcctatgatgtgtcagtaatgaggagacatggggactagttgaaggagttctgtaagatgaggtcacagagagctgaccctccctttctgagagtctcatgaagacagggtggctcagggacaagttcacggtggagaaaattgtgctttgcttttggaaaacttactgttgcaagtgtgtactttagttaccacgttggaagtttccgtttttcttagtcatcatttgcaacttctgggtaagcgtgatagtgactcttagtcatcgtaaagaggaacgtcttgttggataagcacatctgaaagaccaacctttgggatggcaactcttgaacttttccagctggaatggttctgcctctagtaagctttgctgagtctttaatttaaaggctgacatgtaaaaagcaatcactgtaataaagctggataagaagaatatgacatagctaggcatggtggctcacacctgtaatcccagcactttgggaggccgaggcgggcggatcacctgaggttgggagttcaagaccagcctggccaatgcggagaaaccccatctctacaaaaaatacaaaattagccgggcgtggtggtgcatgcctgtaatctcagctactcgggaggctgaggcaggagaatcgcttgaatccaggaggcggaagttgtggtgagccgagatcgtgccattgcactccagcctgggcaataagagtgaaagtctgtctcaaaaaaataaaataaataaaataaaataaaattcctctagccaccaccacaatgaagatagagaactgttccatccccacaaaggcctctctcctgctgtcgctttatagtcacacttgtcttcctccctaccccatccccgcaactccttgcagtcactactctgttcaatgtctctatgattttgtcattttaggaatgttatataagtggaatcatatagtatgtgatgttttgaaatagattagctttctttcagtcaggataatgcctttgagctggatcccaagttgttttagtatcaatagtgttttttgttttaattgctgagaagtgttccatggtatggatgtaccacgctttaactgttcacctgtattttggttctttatagattttggctgttataaataaagctgttatgagcattcatgtacaggcttttgagtgaacataaatttccatttctctaggtgaatatccaggagtgtcatccctgggttttatggtagttgtgtgtttggttttttaataaagtgttcaactattttctatggaagccatatcacttacattcccaccagcaatgtatgagatgcccaattttccctcagcttcaccagttatgagtattgtcactatttttttatttcagctattctgatagatgtgtagtgatatatcattgttgttttaatttgcatttctccctgatggctaatgatgttgaatatctttttatatcctcatttgccatctttatatatcctctttggtgaaatatctgttcatgttttttgcccattttctaattagattgttcgtttttactgttgagtattgagcactctctttttatattctatataccagtcttttattggatatgtggtttgtaaatgtttctcccggtctgtagcttgtattttcacaatcttcatgtgggctttcacagaacaagagtttttcattttgatgaggtccaatttaccaatttttcctttaatggattctgcttttgatgtcatgtataggaactttttgcctagctctagatcctgacaagtttcttctatttttttcaaatatattttctagttttgcactttacatgtaagtccatatccattttagaaggtaaggttcaggtcagcatttccctttttggtgatgagtttccaattgctgcagcaccattgagttgcttttgcatctttgttaaaaatcaactgggcatatctctgtgggtctgtttctgggttccctatcctgttcccttgatctgcatgtctataccacatagtctttactgagactatactacagtaagttttgaaactgtgcagactgagtcttcctactctcttgtttttcaaaattattttagcttttcatgggtctgtacctttccatcatgtatacgtgcttttagtgtaacctacatggaccaagtgagtgaaagcactcgtgtatgagaaaaataacaccccagatatagggtgatcggtagccaacactggcttctggctgaggcatcagtaaggaatgtgagagctggggccacctggagagcgatgccagatcttctgatactttaaaaagaagttggagtcccctgatttttactaaacaaaacagagacatgtggtcgaaataaaacagtttgcaacttctgctttggagattttttcttttctttttccagagatagagtctcgctctgttgcccaggctagagtacagtggtgctatcatagctcactgcagccttgacctcctgggctcaaatgatcctcctgcctcagcctcacgagtagctaggactacaggcacatgccaccacacctggcttggaactttawgtaatgcattcactccttcatttattgtccaaccaatgcagatcctacttcttgactccccactttgtaacagaacaagattacaggcctcttcctttcgatttttctcccctttttacctgccaacttcctatcatggacatgtgtaccttaatattgtcatggtgctgatatttacagtctgttatttgtttcatgatttgtttctaagtgagttctaaaaagtaaaaatcaataagtggtttttagattattataactggttgccaatccaacatcccacttctcacttacatatccctgatcttgtttgggatggcaagatgctcaactaaactaatcttcccagcctctttggctggtgcctcctgtatgcacattctaggctctagctgtctcaactctccttggtcattcctccatctgctttctgtcttctggaaagctattgaaatcttggccgggcatggtggctcatgcctgtaatcccagcagatttgggaggccgaggcaggtggatcacttgcggtcaggagttccagaccagtctggccaacatggtaaaaccccgtctctactaaaaatacaaaacttagccaggtgtggtggcgcttgcctgtaatcccagctactcgggaggctgaggcaggagaatcgcttgaacccaggaggcggaggttgcagtgagccgagatcacgccactgcactctagactgggtgacagagtgagactctttctcaaaaaaagaaaaaagaaaagaaaagaaaaggaaaaaaaamaaagagaaagaaatccttcaacccygatgactttttgtgggtttctatttccctcctcccgtttactcttacttaaacagggtcaaggttgaggcaggacaagatccacacaagtacttgaacctgagtcccaatcactttggaaaattcttttactaatttattttattaaagtaacacaagcacataatacataatttaaaaggtataacttgatacacagtgaaaacaatttccttctcaccccatcttatagccacccagttcctctccctagaagcaaccactgtttcttatgtctccttccagacatagtttatgtattttcatttattttattttttgagacagggtctcactctgtcacccaggctagagtgcagtggtgtaatcacaactcactgcagccttgacctcccgggctcaagcaatccttctgcctcagcttcccgagtagctaggattacaggtgcacgccaccatgcccggctaaattttttattttttgtagagacgaggttttactatgttgcctaggctggtctcgaacccctgacctcaggtgatcctcccacctcagcctcccaaagtgctgggattacaggtgtgagccactgaacctggccagtttatggatttttaagcaaatatgaatataatcattctttcactgtttatgatgaagctagtatacccttcatcacattattattattttttgcttaacaataaatcttcaagatcaccctcagaacctccttttcctacctacatggtgtatcccgggtatcataagtcaattttttaaatataagcctatcttagacaattttgttataacagcaatgccatatgacttggtgtcatgtgagttttttgaagttctagttgctagagaaggcagtttctctttctcagtacttccctcatttgaggtcacctgatagcgaatactacttcaaacctcaccatgttttttgtttgtttgtttgtttgtttgtttttctgagacagggtcttcctctgttgcccaggttggagtgtagtggtgtgatcatggctcactgctgcctccaactcctgagctcaagcaatccccctgcctcagcctcctgagtagctgggaccacaggcttgcaccaccacactcagctaattttaaaatttcttacagaggcaggagtttcaccatgttgcccaggctggtctcaaactcctgggcttaagcgatctccccaccttggcctcccaaagtgctgggattacaggtgttagccactgcacctggcccaaacctcaccatcttatcaaagtttctacttagaaatcagagtcccttagaaatgatgtaagcctctactccagacttccttctctctcatcttctagtccttttctaggccttgggcaggccagtggacactgctcaggmataccatctattcccatctagggacccttctccttccccacacagtgaatggcacactcctcacagttctgcctattgggaagatcttccctccctactgtctttgagggtcacctctgggtgtgactggaatgcagctatcccctattttcagcagacccttccataagcccacttcaggcctattcctcctcctcgtcctcctcctcctcctccaggtggctatatcatttttgatttaatattttatctggggtgggcagggagcattttcagaggtttccatagtttttccccattgtgatwgctcttacccagatcagtaagatgaggaaagaacagcaaagcaaactgagaaggagcattttaaggagaagagagtgatcacctgtgagactgatccacaggtgatctaccatggagtggtgtagcagtagccattcattgccattgatgtagggtatccacttggatatgcttcagtttatccattctactgttgatggacttttgggctattttcaggtttgggcttttaagagtagtgttgttctggaaagggcacaccactactttcctggaattcctgccaaaaatgcaaaatcccagtctaatcttgaaaaaacatcagatgataaccccaaactgagagacatctacaaaataacaggtgtgtactcttcaagaatgtcaaggtcatgaaagaagaaaaagaaaggctgaggaaattttccaaattaaggaagagtaaggaaatgtgaaatgcatgattggattctggtcttagattggattctgggaccaaaaagtcctaggttggattctggactggggaagaaatatatagctataaaggacattcttgaaagggttggcagatgacaatattgtgtcaatgttaaattttcagttttgaaaatgctcgttcctaacatatagagacatctatgggtaaaggagaatgaagtcttcagattactctcaaatggttcaaaaattaaattttataatattttttaaagagtactggctgctcttggaatggcgccaaaaagatgaaagaattttatagtgacacccatatagccacacctcctagattctacagttaacatgttgctgtgtttgctttatcacatttctatccaaaaactgcccatctatccaccttctttttcctggtatttcaaaataagtttcagatatcagagcactttacccctgaaagcttcagcatgcatatcattggctcaagttcaggatttgtttatggttcttttcatcctgttattaaattgtaagagttctttatatgttctggatacaaatcctttgtcagatgtaaatattgcaaatgtttattctcaggctgtgtcatacctgtctagtttcttatgtaagatgtttgaatttgatgaagtcagttgtttgcttgtatgatgattgctccgtgtctcgtctactaaatctatgcttatctcagtggagttttttgatgaatagacttcttacttttaaagtgtttgtctttttagttttcattttatactcgggaccttttatgacatttatcgtgcagaccatttttccccgctgcactgcagtgtcacctgactataaatgtgtggctctgtttttgcactctctgttccattacatgggtcgtttgtctttcttcttaccacagtgccttaaattactttagatttataataaagaggccttgctgcctggtagagtaactcatttagctttgctgtctttgagatcaggggaagaagtcacagtggcaatgtattattgttatcaccgcggttcggggcccagtcctaagtgcctaattctacaggtagaagttctttgtagcctaaggggtgattcatgagaaactgatgctaacctgaattacctttattgctgtgtgaccgagagcatcaggttgttcaaggaaatacaaaggagaagagaacatgccagaaacccttggagcctgaggtgccgcaggattcagaatctttctaattttgttatatrttatgtaataccccaagcaggatccaggagagcaccatgtaaatcaaggcacattaatatttctgcagcaacctagataaacatgtctattttatttatttttagagacagggtctcactctgttgccctgggactgtagctgggactacaggtgcacaccaccacacttggctgacatgtctattaagttggagaaataaagcttacaaacagcttcatgtcaattcaaataagaatgaggccaaacttatgaaataagttttcagagcctcttgaatgttagaattgcagattgtggactggctgtgggccttgctcctgatttcatacgttgctttgttgttttggcttggcaggctgtatcgcatccattgaatactgtgaccgaggacatgtacaccaacgggtctcctgccccaggtagccctgcccaggtcaagggacaggaggtgcggaaagtgcgactcatacagtttgagaaggtcacagaagagcccatggtaatcccccgtcatattgtcgcccaccagttactctctgccccatgagtcactgggccagaagagtcaatgcaagaggctgctcatggagttagggaattggccaaccccaaaattgtcttttcattcttatctcaaattcctcctcaaagcaggcttcatgcctgttctagttgaggactatcctgggtataaatggaaaatattttcctgagaaattaccgtaagttctttctaaaataacctcagaaagagcttaaaataaagcttattgtgccgtcgcctttatttcagggaatcackctgaagctgaatgaaaaacagtcctgtacggtggccagaattcttcatggtggcatgatccatagacaaggtactctgtgggagctctgggtggggtttgattcagggattaataatttactccctgttcagtggtgtggggcatgaagcttataatcctccaaactggtagcatttttgtgagtgtgccaagagactttttgtggcttaataactggctctgtagaatcagtacatgataagatctctatgtgaattgcccagtgccaccatctccctatctgagccttctttcacacctatttataccaatatttttctagtaagttaatatttgagcaattgccacatgccacccattgcattagacttggaaaggacagcagtaccacttggtagcattttggggtttgagctaaacaacaaagaaacatggagcttgytggtgaaagaggagtactgagttctttgccttgctttgttattctttttagtgtatacatctgtgtcatagtctggagtcagtagccactctagttccaggaatttgaggacaaggtgttttattgtgctgttggactactgaggccaaggaggatgagaccatcttaaactgtcaagtcaaatgttttcaatcctgagtatttgacacaatctgtttcataacatgctgtaaatcctggtttctcttctatggtatcttgagttacattgacagctcctgtttgaacttttgttcttttgtggattgatttttcatttcatggcaggctcccttcacgtgggggatgagatcctagaaatcaatggcacaaatgtgacaaatcattcagtggatcagctgcagaaggcgatggtgggtattttctatgctagatgaagaccttccattgtctccataagtgttgatccacattggtatcagtgacctcatctctctgtcaaagtatttgtaccttcttgagggggctcttttcactgctagtctttaatctgtgtaagaaatgataattttctgcctttatttagtraaattctaaagcagggcaaataacccagagcatcaatctggtgttccatgaagtaatgccaaatgaagtaaagcaagctataacgtatatagtagaatcccatttttgttaaaaacaaacaatacatatgtatgcataatgtatgtaaatatttgtaatgcttttgttggtatggggaaaggcgtggatatatatgcgccatagttcatttttaggaacttcttcaggactttttggggtaaagaatggggaagaaaagtcttttttttttttttttgagatggagtttcgctctgtcacccaggctggagtacaatggcgtgatctcggctcactgcaacctccgcctcctgggttcaagcgattctcctgcctcaacctcccaagtagctgggattacaggtacccaccatcacgctggctaatttttgtatttttagtagagacagggtttcaccatgttggccaggctagtcttgaactcctgacctcagacgatgcgcccacctcagcctcccaaagagctgggattacaacaggcgtgagccaccgtgcccagctcggaaaagtctttagttagcttttctttgttactctttgcatgtcttcatattgttatgctgatttatggggcacatgacacttttgtattaaaggaggaattgtcctacaaaatctcaaaatgtaaagatggttgttggggaaaaaaacctgggactttgaatgaatgatcacatcattcaacttagttttctgtacaattttatgtccattttttttaatagaaagaaaccaaaggaatgatctcattaaaagtaattcccaaccagcaaagccgtcttcctgcactacaggtgggtggcaccattttctctgttgtcatgatggcaggagtcgggccatgttgtcttatattctttgaaatttgattataagggatgtgagtctaactttaagttctaagtatctcgcaagtgtgtagctgcttggctcagggtcccattattccctgcctggtataaaatacaggagctcattcccctttcctcaatggagaacatagtgacgacaggagtagagaatgaatgagcctttgctgctagtggtcaggtaggaagggagagggtaattttattctacagatggtaaggaatcaatacagctccaagaggaaaatgggtaaagggaatgaagagatcattcacaggaggaaaactacaaatgagcattgaacatatgaaaaaatattttatcttaccgatcatcaaagaaatgcaaattaaaatatgcatgagacaccagttttcaccaagcaaattggcaaatactttttaaaatagcaataataaagccccgtgattgatagtggcaaagtaaagaaagaaacaaaagatagatagaatctgttgagcacttattcacaatttattgagggtctaccatgtacaaagtactgtgctagaacatggaggtgatataaagagaaatggttcccagttcacacatagctcatcagccagtagaggaatagattggacagggccatggcaagtcaatgtggaagaaggagatatttaaaagaataaatctgaagtttctattgcaggttacttgtagtgtgacggtataattttcttaagtaaacttttaaattgcagttttggcatatatgggcatatattcaacaaagggcacaaatcacaagtataaaactggatgaattttcacaaactgagtacacccatgcctaagaccgccgccccctcaccatgcgtgtttcctcaaggcccaccataaccctgacttctaacagcagggatgagttttgcccccttttgaaatgtattaacgttgaattatacagtatgaattctttggtgtcttattttattcgctcagtattatgtttatgggaatcatctatattgcttcattctcattcattcattgtatgaacatgctacaatttaatctattctgtcagcttttttggtcttacattgaatggctgccattcaccaaacaggatctaattcagcaataygagaagatttactgcctgaagggcaataaattcaccacgttaacagaaaaatggagaaaaatcatatgatttttgtgcatgtgttttgtggatacatctatgcctttcttttgagagtagaattgccaggttgtaggatatatgtgtcttcatctttaggtgatattgccaaatagtattccaaagttggtgaaccatgttacatccccaactgcacagtatgacagttctggttgttctgtattctcaccaatacttagcattgtctgatttgttgggttttttttcaccctttggccatcctgatggtggtatcacattgtgattctaaaaattctctaatgactaatgagggtaaactcctttttatatgtttttttccacttggatatcctcttttgtaagataccaattcaaggcttttcttactgatttgtagcagttcctcatatattctggataagagtcctttgtcatatgcatcccaagtatgttctcttcttctgtggcttattttcttcatggttcctgttaatgactagaaactcttaattttaatgaaatccaatctaccacttttttctgattagcactttttatgtcttgttttaaaagtttttacttaccacaaggtcaacaagatattctcctgtgttttcttctaaatgcttacttgtttgatttttcacatttggatccacaacccatctgggattgattgttatatacattgtaaggtaagaggtcaagattccagtttttccatatggataccaattgaaccagtatcatttactgtacactgtcacttttgtcatggtaatatttacaggtctattttggaactttttattcttttcttttggactgtttgtttatccctgtgtcaaacctacatatcagtttggataaaagaggcatcttcacagtatcccagtggaagtgatgatagcagacatctttgtttatttttccatcttaaagggaaagctggccaggtgtggtggcatgcgcctgtaatcctagcactttgggaggccgaggcgggtggattgcttgagcccaggagttcgagaccaacctgggtaacatagcaagacccatgtcctttgaaaaaggcagggaaagcttttaatctttcactgagaagtatgacgttggatgtagggtttctgtaggtattctttctcacagtaaagaacctcccttctattccaagtttgctaagaattttaatcttgaatgggttttgaatgttatcacaggctttttctgcatctattgaggggatcatatgatctttttccatttttatgttaacgtggtgaatttattgcccttcaggtagtaaaccttcttatattgctgaactagatcctgtttggttgtgatttattatactttttatacataactaaatttgacttgctgatattttgtttggggtttttacatctctgttgcagagagaaattataagattcttgtcagatttgggtatcatgcttataatgagttgggaagtgccatcatttyctataatctgttttcgtatgagattagccttctttcttcaaatgatgcttggaaaatttgtcaatgaagtaatgaggtaggtgtgtgtgtgtgtgtgtgtgtgtgtgtgtgtgtgtgtttgggagcaggagaggagaattttcaataataaattcaagttctttgatagatatgagtgtccatattttcaattgtgaaaacagttgttcaaagagtagctgccctgtactgagacagacgacccagatccagcagtaactgtggacacgttgacgtggaaagatatctcatgccttcttttttttttttttttttttttttttttgagacggagtctcactctgtcgcccaggctggagtgcagtggcacaatctcggctcactgcaagctccacctcccgggttcaagcgattctcccgcctcagcctcccgagtagctgggactacaggtgcacgccaccacacccagctaatttttgtatttttagtagagacggagtttcaccatgttagccaggctggtctccaactcctagcctcatgtgttccacccgcctcggcctcccaaagtgctgggattacaggcgtgagccactgcgcctggcttctcatgccttcttgttaaagggattcattctgacccctccgcaaacacaatcacttcagcgtttcaatttctctttcttgggtgctcccccaccattcttacctccctgttgttcattccatcctgaccccatttgtctacagcaggacatgctctgatgctggtgtttcttttgaagctgccgcctgcagttccttttaccttctttttagatgttcatgagagcgcagtttgactatgatcccaaaaaggacaatctgatcccttgcaaggaggcgggactgaagtttgctactggggacattatccagattatcaacaaggatgacagcaattggtggcagggacgggtggaaggctyctccaaggagtcagcaggattgatcccttcccctgagctgcaggaatggtgagccatttttgtgcaggtggaagggccatgtgcctgccacaaataacttagcttcagaaaatctgtcattttgtttgtagtttctgtttctcaaccaaggagacctcctagatttcctggcataatgggtgggggagggttaaccatgcgttgataagctggactgagaggcaaccacaggcaagggagcccaaatagctcttcattcttatgtgggcctcttgcttccttaaacgttttccccatagttaccaagcacgtgacagtgctgggactgagccctccctggtctcctgtttcccaagctagtgcgcttctaccagccatgctgtttctgggatttccttggagtcctgcagaaaacagtcgcatttaagtatgtgtcctttaggcacattcctggtacatggaagaaataattcctgtccccgagtcagattgctcacttagtcctggttacatcataggaatggcagaaaaattcacaaaacagttccaactgataagacatccaacactgagcctccctctgcctgtgcaaacttaccccagtgtaaagattacaaccattgtggggttgacactgaatagaaatattagaatatattacatgtagtaatacaagttattgttttgtgaagcagttgttttagatatatatgtggggtgtgtgtatgtgttttgtttatagatgtatgtgcaataatggcttgcaatgtacagtgtatttcttagagtgaggtagggtcataaaggtttgagacctttatggtctagaccaaagaaagagagttgtttgtgggttgtgtccagaatgtgctgacaggtactagatgacacagactcaaggagccaggtccctgactgagggcagggcacagtgcaagatgcaccaaacagtgtatggggtgctttgcacacattatctcccactgtaatggacactcagagagtgaagggggtgccattagagactgagtggctgggggggggtatgaggggagggggaggaaagctgaccccttgattgtcttttcctaccaggcgagtggcaagtatggctcagtcagctcctagcgaagccccgagctgcagtccctttgggaagaagaagaagtacaaagacaaatatctggccaagcacagctcgagtaagctttctgagccttcttgccccaggttcctggcagcattcacgtgtttcccagtctctgtaaccagcagaaaaggggaggtggtgcagtgcgcagcagaaggcgcattctacagaaagcatgtcatttcttctggtttctttttattgaatccatcttcacaagcttgctgcagtcaggccagtggatgtaaaggaggactagtggtgagcccacacctgctcatcaccccacccctcacacagaagtagatgtggtgggagaggggaagtgaggcaagaacacaggccagagggagaggccagggccaggtcatagggagcttcgtgcaccctccctagcgttttaaattttgcactatagactgtggagctggtgaagggttttgagcagagaattcgcacggtcagctttccatctgcatttctcttttctgagacgtcacgtgcacaccaccagccagggaatgatcgtggcagtcttgggttgtaggcaggtaagggggtggagagtcaggatgacaccaggtctctatcttgagcagctgggtcaatagcaccaccatcttctaagataagggacattcaggcagaaccgagatagcattggcattcttcagctctaagtgccaagggaacatctgatactgaaactatggagaagagatgaggacaggagacaagaaaagttggctcagagagatagggcaaggaggaagagagggtgcaaaagttagataaactcccttgctcaaaattccctcaccacactaaaaatacagtccaaagtccttcctccacaccaacctccctcgtctcatctctagtcacttcctccctgcttgttgagatgtcgcgaggctgtttcccatttcagagtgtggaccactgttctccctagctctggaaatgaacactgcttggttttctttgtctctagtttttgatcagttggatgttgtttcctacgaggaagtcgttcggctccctgcattcaagaggaagaccctggtgctgatcggtatcttctcattgccccatttgcacatttctgtctttgttttcctgcctgcatcacgtgcccacccccaaaaaaggcagtgaggaagaaaagaactgaggtctcttgggttctccatatagagcaggtgtaaggaattttctgaatcctcacgtgcaccccacctgggtccacctcacaartgaaactaaaccttacaagtttctctactatttagcaacgaattatttttggttaggtttcatgctgtctgctggcagtgatacgctttgtaaatctcccttcccccaagcagtgactctgacctgaaacagagtaagtccttgcttcaaacccaggtatgtaggctttgcctctggcggactgctcaccttcctgtctttagagttgaccccagcccagatgcaaccccaactcatgttcacctgttggcagttttgagtgccgagagaggaaaatccgtatcttatcctcgctcctctcccccctttccaaaagatgttcttctctctctacacaggagccagtggggtgggtcgcagccacattaagaatgccctgctcagccagaatccggagaagtttgtgtaccctgtcccatgtaagtagctcttaggcaccttggaggggaggtgacaggctggtaccactcgccatctgaaataccatagtgttattttattattttttaaattattttattttaaatgattattaaaactaaacaaaatatggaaagataaaaatttgtgcccacaattcctccacctaacagaataactgttttcttattgttattcgtgctgtttgtctacataacagaagctatagtaaacattttgatactgccttaaaaattactaagtattaaagtttatacatataactttgtcattttactttttaaacattttctcatgttcctctgcaatttgcctaattctctttgagaactatcccactcttgatgttcaggctgcctctcattttcatggaatgtcttctaaatcaaagcagtgcctaggaaaggcccaaacgatctcaacagcagtcctagatatggagaagagtagcgccagtgatcaggtggagaatttgataactcttccattcccagaagtgatgctgcatggtatagttgtgtatgttcccagaaagaaatacggtgattcctcacttaatattgtcaataggctcttcgaagactgtgactttaagtgaaatgacatataacaagaaccagtttttttactcatcaacaatacaatgaaatgaagttgaactaaaccatgttagtcaacgaccagctgcatgtgatttcacttaaagtcacattttctaagaacctactgataataatattaagtgaggaattactgtactgctaagcaaaatagaaaaccagattctaaacctcatattactattttttaattctttcttcattttgcttttttacacatggatcattgagagttgtctcgttgctggagggacataagagttattccagtgtcacattaggagcagaaagagatggccccaggagtgagtggggaagcagaaataaccagtacaggctcctccttcaagagaatcacatgtggttgtagattgaggggaaggggccagttgagagacaagtgtgatccggaaggcaaaggagacagtcaatggaagatggaaagaggggaggttgggaggattgtgtttcaagctacaatatctggagcatattttactgattagacaatttatatgagtaatagaaaatagtccaacttttaacaacatgagctgaaactaaaccaaagtactcttctttccaagtcatgaaaaggaaaccttaaatatatttccaagaaatcctgaccatagtctgtagatctgtttttaaaatattttccgctatcttcatttctaagtttcaatattcctagatttggtagtttgagagatgtaacttcatttagggaaaatgataataggaattttctatgttaggctttgccccttaaaaattaaatgtgtcctgggcagatggagggatttcctggtgtgcatcactttctagcatcagctcttcaggagcccacgggaggaacccctgtattaaagtcaatgcaccaaaggcagctagggtttccatacagacaccatggtccaagccctcatgaaagggtgaggacctggagtttgtcggggatttgggttcttgtacacagatacaacacggccgccaaggaagagtgaggaagatgggaaggagtaccactttatctcaacggaggagatgacgaggaacatctctgccaatgagttcttggagtttggcagctaccaaggcaacatgtttggcaccaaatttgaaacagtgcaccagatccataagcagaacaagattgccatccttgacattgagccccaggtgggtaggcatggaagggcagggacagatgggctcagccacacaagggatggcgaagacagtgctccttgggaatcttctgggggctcaggattgcttcagccttttaatggggtcagcctggaacaagaacagtagtactgggaatgatggaaagttgtattggggtaaagctcaaagctgcttattagaaggaatccattatgacagctatgtaggtttttttttttcactttccttttcttccttcccccccctccccgccgcccttcttttttttttctagaccctgaaaattgttcggacagcagaactttcgcctttcattgtgttcattgcacctactgaccagggcactcaggtgaggagaggttgtgcgcgatgggtagttcactttctccgggcctgcccatactgggacctcagtccaggtcattggccagagtgctggctggaggtcacagctccagctgggcttcttcctccagggccaagaagccaaagggtatgcacattcgttccagctcytaagccactagctaggccagtgcccatgctasctaacagggacaaaacaaaccagacccagtcatcgtcctggaggcacacagttccaggggcagagatggacagttgagcagatcctgatactggtgggatgcaggctctggcaggggaagctgtgatggacagaggtggcactgaacccgccctggggtgcagtatggctgtggggaaagacagagaggccaggaatatatcaaaaagcctaccctgctcctctgcccagccctacccatgcactttgctgcactgtgcttttgcattgaacaatggacacctttccctatcagggtgtgaggaactctttttctctatagctgcttggtcttctgctgcatgcatgtgtaatactgcagtcaatagccctgtgcatatagcacatgtgtgcaaatatatctgtaggaaaaactccaagtaggatcactgggtccaagagcacacacacttagaatttggacagggaccrccaaccacctgtgagactgcttgtttctctttgcctgcagcatgttgtcaaaattttctttttttgccagtctactggagggaaaaatagtatctcatatttcttttttactaaaagagatgatcaggtactttttcatatgaagagcaatttgtattgccttttctgagaattatctggtcatacccttagctcatttttctgctgagttattgacctttgatttataggaagtctatattagggtaattagccctttgtaatatcagctgcaatttttttccaatttggcatgtctttttgctatgcagacatttttacttttatgtagttacatgatttgtctttcatggctgcttggttttaggtcaaagacagagtcctgagatatatatacacacacatttttaaattttgttttttgtagaaatggggtctcactgtgttgccaggctggtcttgaactcctgtgctcaagcaatcatcctgccttggccttccaaagtgctgggattacaggtgtgatctgggattagaagtcacctttatctgactgggtgcagtggctcacacctgtaatcccagcactttgagaggccgaggcgggcggatcacctgaggtctaaagttccagaccagcctggccaacatggcaaaaccctgtctctactaaaaatacaaaaattagccagatgtggtggcgcatgcctgtaatcccagctactcgggaggctgagacacgagaattgcttgaacccgggaggcggaggttgcagtgagccgagattgtgccactgcactccagcctgggccacagagcaagacactgtctcaaaacaaaacaaaacaacaaaatcacctttatcttcgttttaggattgcagctctggtggttgttgaaatggctcttccatgttcaaagggcattaagtgggagatgctggtgaagtccatgctgtctctgcatagctattggtcctccagaggactctgattagtcagggttagcttgagatcctctgagaattgccatggtcttttgagattgcctcttcatgccctacattaacattctttcacaatgtcttctgaatttgactcgtcaagtatgatgcacagctgagcaacgctaacaattgctgtttaaaatctgtcactggcctctctgggctgggggtggtgcagcttgcttcatctgtggctttcttctttgcagacagaagccctgcagcagctgcagaaggactctgaggccatccgcagccagtacgctcactactttgacctctcactggtcaataatggtgttgatgaaacccttaagaaattacaasaagccttcgaccaagcgtgcagttctccacagtgggtgcctgtctcctgggtttactaagcttgtagaatgggggaacccactgtatgcccctctccagcatttggaattccacccgccttgctttaagacaaacagggctgctccaactagttttgtgtcagcttccagctctctgcagctatcctaattcagccagtaaggttcagtcttcttgctcaggctcctgaagggttgattctcctgatagatggggccccactgatctggatttgaaaaggatttctagaaattgggggtaagaagtactaccaaaatgtaactgctaatcaagggtgatgcacagcaaaagcaatggrccccatccctytaaagcctgccctcctttgccytcaactgtatatgctgggtatttcatttgtctttttattttggagaaagcgtttttaactgcaactttctataatgccaaaatgacacatctgtgcaatagaatgatgtctgctctagggaaaccttcaaaagcaataaaaatgctgtgttgaaatgccaatgaccttgtaactctgggtttccacacaaaaagaaatgtggcccatttcacttaagctcctggacaacagcattaacacaagatgcctctcttgtgttcagatgataaacactggtgccctggaagagtccccattctctgcccccactgcagggctctactggctagtgcccatgtagaaaaacacccttaaggttgttgtagctagtggagcgctcattgtgggcacatatttagaacgagagaaaatccaagcctggggtcccgtggtacagtggaggccggtcgctgagccagggctggggcccaccctgcatgcctggctcatgatatggctacagctcagggcctcgcctcgctgcatccaagagcgcttttttttttttttttttttttttttttttgagacagtctgttttgccaggctggagtgcagtggcaggatctcggctcactgcaacctccacctcccaggttccaggggattctcctgcctcagcctcccgagtagctgggattacaggcacacgccaccacacctggctaatttttgtatttgtagtagagatgggttttgccatgttggcccaggctggtctcagactcctgacctcgggtgatctgcccgcctcagcctcccaaagcactgggattataggtgtgagccattgcacccggcctctttcttggttcttaataccaaatcggaagcaaccctagacctttcttccactaatctgtcaccaaggccttcagattcctgcatgtccccaccctcagcttcgttctcccgactcaccctgccccccgctcctgccaggcccactatgtataaatacattaaccctctccttctctgttcttctagagatcagtggttttgtggtaatcactgcctctgagtacttgatctcacatcagatgacagggcccaaggtggattgtgtaagatacagaacaaaaatgtaaaaaccagaaaacaaacataaaagcatcacatttcaaataggacataaaggtccctagatttttaatcaaaatattttacaatttttgctctgctagcatgagatcaacaagaaaacccaacaggaatacataaaaaacttaacaagttgactttaataagtaaaaattacaacattcttctcccagcaatgaacaatttcattttttaaaagtaaacgaggcctaaaacaagagggcacaggaacaagtagtcagatggatttaggtgagcactgtacacaagctttgaggaagtgcaaaggactgacctctaggccagaacaagatggaaaactaccaggcccatcaggcctataacccagacaccagcatggacaaaactcagttatactgaattcagagacaaaattcagtgacactcttctaccacttatttagggttctacagcatttcactgagcagacttagttttttgtttttgttttacaaaccttttaaacagaggggatttaaaaaatgcaaactaggactacgatgttaagacaaccactagcagacagctgcggacagttactgggtctgaaggtgaggcttcccaactcaaacagagaagtcattgggataaactctgcctctttcatctttcaccacccatatccttaaaacaggacaagatgggatgaccacaccaggtaacatcaccgaggtctcaaagtagcagctaaaatgtgccagaactcttcaccctgtctaggacctatgttccactctctcagcaacaaaaggatctataacatgttttctcaataaggctttagtttctcctccagcttcaagtggycttcactactcagaaaccaattctacctcttttgctttcttcttcttcttcttcttcttggtggtatcactgtcctagaaagaaagagaatgaaagctcacagataccatccactaacaaagctatgactctcccagaaggaaatctggtaaaggtccacagtcaagcaagcctttttcaggacctgtaaggatattttgggttaaatgctgcatgtgacacaaagttctgtaaacctttcagtgacaccctagtggtctacttttggaagtggaaacattcagatcaccatcctacacatcctctccacccaccatcaatagagctctaagtataagtggtagaggtcgggtgcctctatctgtccattccacagggagggcaaaagcactccaggaacatggggaagcactaaaggcactcggtggcatcccacccccaggccacagctcctccaagaagagtaacaaagctggtaccacctgggtaattctttccccacgcagggactaagccagcccaaggaacctgaacgtgtttccacacaccccatctccaggctcggccccgctctccagaccagctttggccttcttgtccttcttactcttcttcttttccttcttgatcaactgaggagctgctggaggagtctcgtcactttcactctcactctctcgcttccgctgagatgaaagcaattggttaagtgttagatcttgggcaataatggacaagaaaggttcagtgagtcaaaaggtagcaaggcaccaagaaagatcccaactgaatctaacaggacgttttctgactacaaacccggacagggccttagtttactgaggatttgaagacagtctcatcccccaaatccaagaagccttgaggcaggcacaagagaaggagcacagcagcagcacggggcttggggtggaaaggcccggaggagctgtttctctcatgactgcaaggacctctcacagaaagcaggcaaagcaggaattcacatctgacaagtcagaagctcctcccacacagcctgtgcaggatactcagtaccgcccccggtttctgagtgcagacctgtcattctgtgctctaatgccagcagctccatggggtggagttgccaacccatgcttgactgactctttcaacactgggtggtgccaggttaagatgcaattctgctctctgctgaattttgtatggcctcgaatgtccaacagccatggcctctgatttcaacacatctgtcctaccatttgacccagggcgggggccagaattgacacacacaccaccacccattccatcactgtgttgctgccatagctgaggtaggagtcgaggcccatctgattcctgagcccacattcctcctcccagcagataggacagagaatacaaatcagaggagcctgcagagcccaaacaagcaccccagggtatgaggcagcattacctgtgtatgcgctgcacctctgatgctagcgtatatggctggactgcggacagtcacaaagtaagacgaatgccagtgcctcttaggattatctccctaagcacattccaaactgaggacagcatgccactcaccttcgcagtttttgctgcttcggcaactacctgcggggcttttaccacttcagcaaccacctcttttttggcagactcactgaaaaagaggtagcaataggtcaaattcactgaatggctttccagggcagtactgatgttatgtagtgttatctggcaagtctaaagccaccatcaaaatactgacgctggacagaagaactcaccacttactgttgcagactgactccctctagagtcccacgagccagactagaaagggataactgtctgccgtgcaggcccacacccctaactggcctgggcagccaaaatctcacgggagctgaagagctggttcctgtggtcctgcatttagcaagtttgccccaaaccaagtgactccccctcccctgggctctacaacctccatgctcacctgttcctcacctgttgtccatgtactcctgcgtccagatggcaagtgggctctaccttcccatcctcacctgttgttgacatactcctgcatcaaggcagcaagtgtgccgtctctacccaccccggctctgaaacatcctgccctcacctgtagtcaacatactcctgcttccaggtggcaggtgtgctgtctgtgggcttcyyatgcttgtccagaaggccctgcttgatcatcagcttcttctgacttgcctggtggaacatcaaggtgtcaacattagaatggtgtcaatgctggaagcgggcatggtgactacaaagaatagaacaaggttcctccctggtgtattctcagcagggcctcaaactcctctccagagcattcagaatttgcccactaactccaacacacacaggacttgttgaagatcacaaagcttattagtgagagcctctgcagacataacgtccccaccgcagccactctacttttttgcctttgcacatgctgcttgctcccaatgccctgaactctcccctcccctcttcacttcaccaacacctaacccactcttcacaccggtgtggcttaacagacaatcccttgaccagactccttgaccactgtggacactccaggtgacagacacctctctgcactccttggtagccactaacgtgcatgaaattcgccattccactgtgtgattacgtgagtaatgcccaactgtttcccctcattagactgaaatctctaaggcccaagacagggcctgtttccactcatcgacaacccagagcccagcacaatacaaggctgtggtggtgaaacacaccaagagctgcccaagtattcaacaatgccaaacaaaagaacctggcaggagccgccccatccgggagggaggtgggggggggtcagcccccccgcccggccagccgccccgtccgggaggtgaggggcgcctctgcccggccgcccctactgggaagtgaggagcccctctgcccggccgccaccccgtctgggaggtgtgcccaacagctcattgagaacgggccaggatggcaatggcggttttgtggaatagaaaggcgggaaaggtggggaaaagattgagaaatcggatggttgccgtgtctgtgtggagagaagtagacatgggagacttttcattttgttctgcactaagaaaaactcttctgccttgggatcctgttgatctgtgaccttacccccaaccctgtgctctctgaaacatgtgctgtgtccactcagggttaaatggattaagggcggtgcaagatgtgctttgttaaacagatgcttgaaggcagcatgctccttaagagtcatcaccactccctaatctcaagtaatcagggacacagacactgcggaaggccgcagggtcctctgcctaggaaaaccagagacctttgttcacttgtttatctgctgaccttccctccactattgtcccatgaccctgccaaatccccctctgtgagaaacacccaagaattatcaataaaaaaataaatttaaaaaaaaaaaaaaaaaaaaaagaacctggcagggcacgcaacccagtaccacttacctttrgrcctaaaccccacttccgagggtaagtgtctctctccatgatcactctcttgatcttggctactataccatggtcgcaggtagagatgaccgctgtggtyrttaatgcaatagctacaggcattgaataaagaaaagaattatttgaagggtgaaagaattgataattgatgagccccaattctactgttgtatgccactttaaaacttttaaaactctgagctactactttaattggggttacctttgctcaggatgtgcatatggaggaaatactccattatgagaaggaggcctttgaaatgacgttaaacttctgaagttaaaaaacacctaaccaaagcacctaacgatacacataacaggcttgcagctcaagacgtctataagaacggcatgcacactccctttggggccacagaacctttgaagttttaaggattccttttctgctgctgtccataagccgtggctgccttgcctgctcacagagctaaggaatcctgatgacatgcttacttctggtacaaattagacccattaaatgaatagctctaaggttca

SEQ ID NO: 94103 - DNA, 59940 bp, Homo sapiens
actcttccaatagaaacaaacttccttctcttgcaatgacttgactttttgtatgcaaccccaaatgtcagctgcctgtcagggactcctgtccctgaagctttgcagaggggagaaagggaatgtaatcttagggtctgttgacttacttgggaatagagaattggcatattctgattttgtgattggatgtaggaaaggagtatggtgatgggattctaccttgggcagcaaatgccttttctcctggtaaataaaaagtaaaatatataaatatacagaaaaagtgtaatttccttcaaaattccccttctaacatgcataaaaattatttctctttttaccttaataaccaaatgctattccttttggcctgttacctcaaacctaatatgctaaaagagcatcctcatcctctacggcttgaattccttaacaaattattataacttatctggcaacaaattatatcaaacccaggtaccatctctccacaactctcccttattggagtcaagagagaggtgagggccaagggaggaaggaaatttactttatgccaatgcattggaattaagaaatatcaaggtgatttgaactgatccaggaggcttgtattagtcttgttcttatgctgctaataaagacatacccaagactgggtaacttaaaaaggaaaaaggtttaattgactcacagttccacatggctggggaggcctcacaattatagcagaaggcgaatgaggagcaaagtcacatcttacatggtggcaggtaagaagaacttgtgtaggggaactccaatttataaaaccatcagatctcatgagacgtattcactaccacaagagcagtatgaggaaaaccaccaccatgattcaattatctccacctggtccaatccttgacatgtggggattattataattcaaggtgagatttgggtggggacaccgccaaaccatatcaagactccatgggagactagggtcttcagttgggctggaggggatttggagagggggaagaaaatcatattagaagatacaaagactttcacaggtgggaaactgactgtggtatgatcagaggaaaataagagatctgagtttttttttaaaataagtgacgtattctatttccatatttctaaaattataaggtgttcattgaatagaacgttctttgtatgaaggtctggtagctagaattaatattcttattatttttcttaccaatagaaaattgtaaattgttaataggtattctacctcttgtttttgtgatatgatgcctctaatgacattgtcatagtttaggatctggataattgacacaatgtggcttaataaaagtcagggctgggcatggtggttcctgcctataagcccagcactacagtaggctgaagaaggaggattgcttgagtctaggagttcgagaacagcctgggcaacatagtaagacctcatctctccaaaaaataaaataaaataaaataaaagccagacatgatgaaacatgcctgtagtccgagatattcaggaggctgaggtggaaggatcacttgagcctgggaggttgaggctgcagtgagccatgattgcaccactgtgatccagcctggacaacagaacaagaccctgtctcaaaagacaaaaatatccctggcctggtggctcatgcgtgtaatcccagcactttgggaggccgagacaggaggattgcttgagttcaggagttcaattgcagcctaggcaacatagtgaaacccccatctctatataaaacaaaaacaaaataaaagtcaattagaagaaaatcgtaataaatgtttcaacagatgaagagtatgatcattatagcactggttgcaatagcaaaatttgggagcaatcttcattgtccaacagtaattgacagattaaatccttacaaagggatatcaggcagccattaaaataatactgtaaaataaatttattgacatttaattatatgtcaagtagaaaactctggctacaaaacaagtccccagaatgatctagtttttattttacaaacctgtctctgtatccctctatgttccccattccatgccgtgcctcctgccaactttttcaataaaaaaaatctgcaaagatacatgatagaaagggtctgatagcactgattcatcttggtataaggaattctgagtatttcaaagctagtttctttgcagttatgtgtattttctgatttctctgtaatgaatattaatttcttttcaatttaaagaaacatgttacagaaaaagagaaatcaatttaggaaaagagtgagtgagggatactcgagtacatcactgaggtcaacatcatgcaagactatcaccatagttttccacaaaatattctttggtgccactgtcagaatttagagccagttagattgaatattattctgactcagcatgacatttctttttgctcttatgctaatgcttaaaagcttgaaacaatgcactctattcaatacatttcatcaaatatttattgagtgcctactatgtgccaagtactaagaatacaagattagcaagacatagttttgttgtaatctaagtcaacccctcatagtatgtgaaccactttgaaaatctgagatgattgttctgagattctacagggggaagaatcatataaaacaatgtccaaaaaagttcatactaaaataacctatttatattttccctgttttaacttgcaatattttaaacacaatgtagaattatgttggatcattatttaaaaaatacccacgtgtttgtggctcttcactgtgataccacctctattctctgcttgaatcaatagcatttcaacacttttactgctttgagaagaaattattccagtctgttcagtctttgagccaaatctctcagtctgactttgagatcctcactaaaagctctagttccctcatgaggcaaaactgtttctagagtatgtttcaaagcaaagttgtgtaaccaacaattaaacaattaacaaactaaaatagtttaaagttaggcttagtaactttacacatttacttgttacattatatattacaactattttttatgaattaaaatttcgatctcagctaaataatttcagtttcttcatctttgctgtcccattaattattattgctatatccagaaggtttcatttatttatttatttatttgcccaattctcttggcatagagtttatatgaatcagaatgtaaagaagcctgtagatcatcttgtaccactattttgttttgtggaagagaatatttaagccagatgtaaagtaatttgtaggagtgtaagttgttttgcgtagtgtcttttgaaatgtaggtatgtgaaagctggtagctattgttcttagaactttgcaattcagattaccagtctaatgttcttatctgccttggattatttgtcattactgttgggtaaaaccattctttagacctgtaaattgctcaagacactaggcattttttttatggtacttgatgggtcaatttattcatttaacacatatttattaagtacctactaagtgccaggtgctggtcttggcattaatttaaatgttaacagaaagtattaaggagtgagtattgtttcaaatccatgcaaatgagcattttgtggctagtcgtgtgtgtgtgtgtgtgtgtgtgtgtgtgtgtgtgtgtaataagtacgtgtgtgtgtgtgagagagagagagagagaatgtttgtttccttcctgtgtaaaatctgcccagttttctatcttaactgtcattatatgtcaaacatatactattaaaattagcttatttctgaagcatgtctacactaaggttcctggattttatttatgatgaaatgctaatttctctttatgaaacaaattctttatttcataattttgaataggatggtactttcaaaaacctgcatctgattagatttggggcattaaatatttcaatatgataatatttttttcttgggcctgcagcattttaattttattgtcacatagaaaattttttattaatattaagactttgctttcagaatgctttgaaatagtacaagcaacgttgtgtaaaatagtacaggtggagcatccctaatccacagatccaaaatctgaaatgttccaaaattcaaaactttttgagcaccaacatgacaccacaagttgaaaattccacacataagtactttacacaaactttgtttcatgcataaaattatttacaatgttttataaaattaccttaaggctatgtgtataaggtgtatatgaaacataaatgaattttgtgtttagacaggtctcatccccaagatatctctctctctctctctctcactctctctcactctctctctttctctctctctatatatatgacactcaacgtgcacaagtaatgccacactcagaaaaactgcttccttctttaaattgtctgtctccattgtaaaactgacagtcaaattttagtaactcctgatcttttttgtttcttctgttctttttagactcctcatccagcattttggtcctgtttgctggctctctcttttaataggtctaccctagcttctcttttcagttgttatttgacgttactagtcttgctgtcaatgcatctcagtccttggattccagattgttattctatatccatctgctctgtcctgattgtcagtgaaaagtgttgctcttcgcctggtgggacatcaaaactctgacaatctttggctcttcattcagagatgggtggtgcgtgcaaaagggtacaggtttcttggttatacatttaggataccttacaaattttccaaagactaacattaacctctggttacgggtaaacgacaaagtggcacaacgaagaagaaggagaaggagaagagaatttcagtagttagtattttcagttctggacctggacctaaggaaaaacactgccaagttagtatatcaatacacacaagtatctcctgaactatttttttgtttgtttgtttttggagggaaagggagcttggcaattgcttgtaggtactgatattaaaatgttgcaaatacatggaggttccttggtgctcgcaaaataaccatgacatgtaaaacaagcaaagaactacctagtttactaaagtcttaaaccctaactcatagatgtcctagtataaaatagcactatggatgctaaaaccaatgtcttagagtagtcaaatactaaagatacacttgttgatactatactaaactgtattttaaaccttatttttaggtcacgcatagcactaataaaacagtgaataagcaccataagagcatgtcaaaatgtaggaggaaggccacaactaaacttcatagtaaaacctaccaccatgtgattaaacacgacaccaaaaagtttttagctagttttctatttatatccctagatatctttgggatagggccaaagaaatgagttcatagaaaggtataaaggccattttaagtcctggttttgggtgtgtcaatgtttgttgcagcagcagaaggaaggctgaaacagaaagttgtgtcataaatggaacaaatactgtttaacaatttttttttgtcttaaaaacagcaaaacccaccatcttcctggagtctgcgttgttctcttccagaatagatgttgagcttttaaacaaacctgcagtagaagcaagccctctccaggaaatcccaatctctttccaaacagggacagcaaaggttctctctgttgtggctgtttttccctctcttctgggaattggtttgccttctgagagcatcccaggaaggggaggtgcgccccaaattggcgaggctctgccaaataccaaaggctcttctttggaagaagactcctcctttggacgtgaggcgcccctaccagagcgcccgcgtacagaaacggaaaccactagctgcgctgaagtgagtcaagtgatgaaatcaagactacacgggaaggaagctcacgaaacctaactggtgacagaagctgctgaaccctgcccgaagaaaccacatgagccagcagttgctgccctcccgaagtggtcctcggaggcagcgcaccccttcattttggcgaaccgaggaggaagggaggaaccgtgtgggggaaatctagaacttctggttccccaaggacccagcagactgtgttctggctacaaggtgatcactgccaccaggtcagtgcaggattcctccaatgtagatgggccgggagccacaacttgcgcggagcagcagcctcgccgaccactcagagagaagccgcgcgacagccaggcttggcccggacggcgcccccaccctgcgcgcgcgatccaaggttctcacctggagcgctcaggtagggctggggcggggcgggaggctggcgcgcaggcgcggaagtggggcctcgcccctgccgacgtcgcaggctggagctcacctgggagactccaagtggaagccgagcctcggttctgcctctccaggcaacgcgggaggcccagcgggaaggcaggaggcggcggcggaggaggagctctactgagccgcaactgtggcgacagcaaccggagtcgcagccgccgccacctgcacctggcgcctagcccacgtccagcgcctgcccggccgccgcttcccgccaccctgccctgcccacccgccaggtaagccggcggcaggcggagggagacgcggtacccctgggctgcgttagagcaggcgggaggacggccgcaggggttcacgtgttggggacagggctacggtccaggtggccggttggagacggtctcgagagcagtgtgtcggttgcccctggagagatcccgaaaggggcgccctgggccaaggggcaggtggcgcytcgggggggagcccggtcacaccctctcgcccacggtgcccccgccagtccctatggggcggcccctgaggagctggacggagaccaaagacctggtggccccggacttgcccttgggagggtcgcagcgtggggaccctgagagggagggcccggcgggaggcgggcgcgcttccactccggctagcaggttgcctgtctcctccagcctctctgcccgagaggacatcccgcgacagcgaaagacatggctttgccaggcaactttcctagccggggaccccaaacagttctaggctgcaaaccgcggccgccgagccatttaaatggtttccgagtggtttggaaagggctctgtggccgggacgcggacacccctctctctctgtttcgactctgcacttttccgggtgcgctctccaggccagagttgggcccactttcctgatcaatggagaagagttcttttcttccgtggcgggaagaaatccaactgccacgcaccaaccactcaccatctcgttagaggacctgttgacttaaggacctgcatatcgcggctatggtttgcctgtggcatatgactcaaaggttcaaaaaaacattgtttcaggatcctgccacgtctaagcttgggtgtgccaggcccagattcctttccctgcctaattaggcttttctgaagcctaagaattgagggtgaaactggcgcttaccttagacttttatttccttctctttccaactcatcaaagaaactatttctgttttaagaaccccatcgagttaccaatatttccgattcttgaaaacgttaacataacttgctatagaagttacactacataatgaagacatttacagtcaaattctrtagctaaaaaatattaaagtgacagcattttaattagaaaatctctgcttgtgggaaaatctgttgcttcttttattgtatatatttttctttgcgtttgtggctaaaatccatgaggttaaagtcacacgctgccattagattcttttttttaatttaacttttaatatctgaaatctagtgcacatgttaaactttccaagcaatttgtaccgagaatcaatctttatatattgctttaaccaacatttttacgtagaagtttctgataataataacaattccattgttttgttctatctccacacattttaaaaatattttttaaattgcacgttttacttaaaatgcctgatgcaacatgtagtggggttatttttcttcttctttttaagattagatggaaatctaaaagccaaccacagcataacatgatgtaattattaattcaatcaccacttttctacatttcttaaaaggatctcacctgacctcttaatcttgtctccatacagagaaacaaatgtgctaaatactgtttaaatatgagatataggagttgttccctgaattttgaatattagtcttcattacttactaggcagatgttaccagactgtctttcctcttaacctctagtgagaaatgtaacatgtttkcattagctagagtaacagtgtaacttaatctatctgttaaataggaaaaataatactttcctagattaagataacaaaaccttaaaaacaatcaggagtatcttccagccctagcattctygagatccctttctcactttggagattcaatactcaaaccatccatttatgaaaaattgaagccaagagaggtattctaacttcatttcactcagagatggcatgatcattccagtggcttgactcatgactcctgtatcttacttttcaccacccacatcctcacttaccataagatgtttatcttttttctttcatataatttgtaaggcctttgtaattacagaattgtccattgctctttcttcactctgatttaccctcatttctacttgtccaaatattgcctgacttcgtggaaactacccagtgaaggcatcatgctcctctcattgtggaatagcatgcatattgatgatgccatgtcagttgagacttttagttccttcttggtatttccaagccacagttaattttttaagtcaatgtggataacattatttagtcttctgatctttttattatattggcttaaaatatattttatgaggcagctacccagtgcctttcatccatttgcaacactccagattttttatttcaagcacacttccttaacactaagtttctttaaacttttttttccttttactgcaatcctcaataactaatttattctctgcctcaactctgtaaactccaatgtgagtgtatataaatgaaacaagttttattaatataaaacagtgcttaaccttacaacatgtatgttctttattattttatttttaaaaacgttggtctaaacaattagactgctttatgaccacgaaagtgctggagccctcaatgtgaaaatagcactattctgttgaatttttgttcttttaaaggctgatttttctaccagctttctttttctctgtctcatacatgcgtatmcacacacacacacacacacacacaggcacacacccactcacatgaaagaaaataaattatttcttaaaaactttactgtaatcctaattaaacatgtattrtagggcttgaggctccaggaccttggtgctagattaaatctttcaaatattaagaactacatgaaaccttgttcattatacatattttgtgttaaatgggttctcatcatgctgtagtgtatttgggaacaggaaaaactagaaatatttttttctgaggggattttgatgataagaattcagtgaaattttgagggagaaaccttctgtccagctctattctgaactcttaaagttttatgactgagttagagttctgggtggagtctgaaaatttattagagaaaacatagccagtttattatttggtttatattctgttaatatttaatgcttttcttttttactatgaaacaagtatgagacaaattgtaggaattacactccccctctccacaaaaagactacattgagagattaaaatagatccctcaatgatttgtaggaatgtagtcttggaagctctgattggataattaagccttccgtagacactttcaattttaacctgcctttacattcttggtgggtgaaatatttctcctaaggaaaatattatcatatttaggattttagaaatgatcagtgcctgaatcatcttcacatgtattcagttctttagtccatcaagtgcaaaaatacatttggaatgatagatactttatagatataaaatcctattgaaaaggaaggtgttttcagttagctgttcaattatgcatttagttagtatcaaaataattcatactatgtaatttgggtgaaatttaacacaactcrtgtacactaagggggaaaactgaattcaaatcaattccagcagtggcaagagacaaaagtacattcacttattgcaaagcaaagacaagtaggactctgaattctaggtcattagagactactgacaattatatgacacttccttgggtcattctcagagttgggctcttatttttggcactaaagagagaatattcccccaagtacaccttttccctataattgtttcagtttcaaactgtccaaactaattttcttttctatatgattgcctattggacatctttaacatttgttcatcactggagattatatatgttcaaaccagaaccttcatctcatcaaaaaacaaatgaacaaacaacctgctcactctctgtattctatttatagatagtagtacattgtaccatttcttatctataattcaaaaatcatcctctgaaaacaaagcaaaacaaaatttaactcatttgttagcaaaacttgaactcagttggagcaaagcctgagtgaactgtcaggaggctattgtgattgtgtattcaacttagtggattatgtccakctgcagaaatagtgctgtttgattacataatactgcccaggccctgctggggtacacttttacattgattatgtaaaccatatcacctttctaacatccaaaaaaatcagatttttttttttttatgagacaaggtctcactatgttgcccaggctgatcttgaactcctggactcaagtgatccttccatgtcagccttccaagtagctgagactacaggctgtcaaatcctgaattttgaaatatattttgctgcagagatttgggagagtgaatcataaatgtgtactaccatccaggtgccataccagaaatccagaggtaattttaaactctttttcttagcctctacaactgctatggtctgaatgtttgtgtttttccaaaattcatatgttgaaatcaaatccaatgtattggtattaggagtagggtctttgggaggtcatcaggtcacgagggccttggcctcgtgtgtttttgtaaaagataaygtccttataaaagaggactgagaaagcttgttagccttttgcccttcctccatgtgaggatacctaggaggccatctatgagggatgtgccctcgccagacattgaatctgccagcagcttgatattggacttcccagctttctggctgtgagtggtatatttgtgttgtttaaattacccagtctaaggtattttgttatagcatgaactaagacaacaaccattagaamactgaatccacttaacattttatacctttctcccagccataaattctttcacttctactgatctagtttaaggtcttaacatctctcaaccaaggtatcatagctgcctcctacctggtatctcagcagatagtgttgtcaacctcaagtccaccatctggaggatgaggatgatctttttagaaatgcaaattctctctctcacttaaaatccttcaacaattttctgttgcttaccggatagaacccacagcccttaaaatggtcccatgggatctgagacttgcttaactctggagtgatactccataagccgaaattttatttcccagcaatagacttcttattgttttttttttcttgtgtgcttttcttttgcacttcccactgcagagagtgcctttccttctatctttacatctatctatagctcttaatggctcttaaaactcaaagaaggtcttgcttcatttgggaaactgtgtcccctcacccacacctccacatatacctgagcagggtgaggtgtcctgtgtatacttctattatttgcttgatacgatataaatatagtctgcttttgctcttgtctgtatacacacacacacacacacacacacacacacacacacacacccttttggattatttgcaaaacatgcaaaatttctctttccattaagccttttgtggaataaaaattttggggtagaaatgtcacagaaaggggagaggcatcggcaggcaatataagtcaatctgccttttttttttttttttttttttgaggtgatgtcttgctctatcgcccaggctggagtgcagtggcgtgatcttggctcactgcaagctctgcctcctaggttcatgccattctcctgcctcagcctcccaagtagccgggactacaggtgcctggctaatttttttgtatttttaatagagacggggtttcaccgtgttagccaggttggtcttgatctcctgaccttgtgaatctcccgcctcggcctcccaaagtgctgggattataggtgtgagccaccgcgcctggcccaatctgcctttttaatgggaagtaaccaaagaaactggggagtagcgaacttgtttcactgacttaattagtctatttaatttggattgctgttacttctatctttttactttgaattctattttattttgggaccttttggttctgttccaagatcttggggttttatcatttaaaagtgaaaagttaactttgtaattgaaatgtcttgcagcttttgcttatacatattccacaattgagtatattattattgttgaggagcttaaagggagcagcctttacttaaaaaatataattgagttagactagaccaaacaaagaaaaacaaaaataaaatgaggcaaaagatttcttggaattagcagtcctttcatctctttttggctagtcctatgccaagttctgtaagttttaccttctaaatattcctcaaatccatctacttttattcattcctatctctatcatcatctcttgcctggacttttgccatggcctcgctgtttgtctatctgagctcattctggcttcttgcttgttagttcctcaccctgcacccagagtgatcttttcaaaatatgtggttatgttataccctgcataaagcccttcatggcccttaagataaggcaaactccttaacatgcccaaaggcctggcatgatttggctcccatcaaacatatagcacactcatcattgctccagctccaccaatctttttatattgctctgttccttctgcctctaggtctttgcaagtgggcttcctggcctggaaggctcttccctcccattttggcataactacttaacatgcagtcttcaaattccagtttgagctcccactttttcatcactaactgtaacttggaatttttcaacagtctcaccacatccttccccctaactatgggttagagtgaaggctgtaggctaaagaaataaagtcctatttagtacctgggagcattaacttataaaaacaaaagtttccccacgaaggaggcagacattaatatatggcccatatttttaacaatagattttagttattaatgcctttatatttttatcaagtaataatagtttatatttattctcataataagtactggtccttatttactattgaacacttacatggcaggcatattttaagcaatttacatgagtttacttatttagtcttcaaagcaaccctatgaggtgcatactattttcctccctattttaaagataggaaaattgagagattaagtattttgcctctatttacaaggttagtgaaagattagagccaagactcaagtcgaagcagtacaattccaaatcctgcacagttcgccttctgtttccatgagttctgtgtccatagattcaaacaaccttagattgaaaatattcaggaaaaaagtaacacaacaataaaaaataatataaaaaagcacagtataacaactatttacacaatatttacattgaattaggcattaaaagtaatctagagatgatttaaagtaattgggatgatgtgcataggttaaatccaagtactgcatcattttataaaagcgacatgaacatctgcagatgctggtgtccacaggggttgtggaaccaatctcctgcagataccaggacatgactgtacatttatcctacttacatgtaaataaagtaaaatagggttattaaaagacttccaacaacaataaaaatccagtcaactctgcccctcctttctcgtctccccagtcctgttgcctaaaagcaactactttcatttatttaaatgtttcttctagcccttaccttttcaaataatatgcttatactgctgtttcttaawgtatcaatatttggcaatatctactgacttcctattatggtagataaatatttagctgtttcatacacagccacctctactctccctccttgacctcccaacataattctcacattgtttgtttgcattttagtatttatttactgtgattacatagatattgtttactacagagtcaagcaagcatattacgagtaggattccttacttgtagaatttttttttaatcctagaagtaataatgaactcatttaagaaaacacttggcttagtgtttccatatatctattggagtacaatttctatgtactctaacatcttttcagcttggttttccatgtagtctaacataacagatttatttgtcccttactggagcaatctgtcctcttgcccctgttcggactgttgctctctaggcctgttccgtggtggttgttcggaatttctttttgctgacatctctgatagagcctctgttccttagatactatgacttttgttttttattcaccccctcatttggatgaaacacatatccaccactagcttgctggaaaatggtgcatggaatgaagaaatgtgagatattgaatgtctaaaactctttattctaccttcatacattttcctttctgttttatttaattattaaaaatgtgttagtagttgcagttgtttgtgaactccagttgtttgaagttcacaattttcaaaagttaggagaggtatatgataaatcttcctttcactgttgccctctgacaccagttttcttccccagaggtaaccgatgctattttttaaaaatataaaaacaatatgtatgttttttccctctttttaaaatacaaataattcttgctttttttgttcccatttaactatattgggatcatttcatatcagcatataaattggccttgttttttactttgcataatatttaatcatattactccatcataatttatctctttccctattggtagagttctcggttgtttcaaccctttgatattagaacaatgctttaatgtgcaagttacaggtgtgccatttcactagtgcattagcgtatctatgggatttctagaagtcatccccacatctgattgatgcttttatagagactacagtagtaagcagccctgcaagtttgataattctgagtcaaatgagataaggagaaagggggaaaaacacctgatagtaaatacttaatggcagagggggctcatttctagaggacaattaataaagcagacagggtttctcatagaaattattgttttctttgagctttttgaacatgacctttgttttttcagatgtgacccatcattttgaactggataaaacttgtttctgttgttacctcagtctccttcttgtactctaccctctatcattgcctctgttagtttcactggcctcttgtctcatatttttgagttctaggtctaccactgaagataatgcagaagagagagcattccatctgctagcacctttctttttcaggatggggtcttgatgtgtttcctaggctggtcttgaactcctgggctcaagcaatcctcttgcctcagcctcccgagtagctgggattacaagcacctagctagctagcacctttcaacaagtccagaacacatccttaacaccygtcacaacttaacaacctctgtagcctccacattgactcatttgctgagttcagctaactctacttccaaaatctgtttctaagcttccatgccccttatatttatctcttgcctggactacttttaagggtatcctaattgcctttagcctcctatcaggtttttctacctccccaaaaattccatattcagcacaacttcaacgacaatcattctaaacttccgttctcattaggtcatcaccttgctgaaaactcatcagggcctctccctttgcctaaagaattaaatataaatcccactgaattaagcaccccaccctcccctatttggagcttggcatccagtgtgtgtttagtaggcctcactgtgtatggtaattgactatgcatggttctgggtaaaattaccctacttgaggccagctgttgatagaagaattaaagtttaggctgakwcyggtttatttccaacccaaattttacattaaaggagcttttcttgtgccttaaccatgaagagtggataatgcaggaatttcagatggtagttggagaagtggagggatattgttcgcttcaaattaggcacatatatagcctaatcttaaaggtagacacagattttatgtataataaaaaatgatgttatggaagacttgaaaaaaattctgttttatatctggggaggtggcagctaatggggaaggggtaaatatggggagacttacaaatattgagattgaagtcttttaraatttctagagcaggggttagtaaactatagttcttagaccaaatttgatccactacctgtttttgaaaacaaagtttaattggaatgcagctatgattattcatttacaaattgtcttttttgtactacaacagaattgaatagttgcagtagagaccatatggccagcaaagcaaaaaaaaatttgttatctagtcctttataaaaagtttgttgacactttttctagagggtaatggaagctgagagatggaggaggagtgtctatcacatcagcattggtaaacctgtagaaaggtgaatgcaaaatgataacaattgagcaagcaatcttctttattccttcaccccctattccttaatatttttggggcctcaaaggaagaatgaatggagagaaattgcctactgcttgtgtgtgtttggactccttcaaaaaaggaatggttggttgaattaattgaatgcaacctgcccatcctccaaatacatgccatgaaaaggcccagtagacactcctttcactaaagtattaagaagtacattagtgaagggattccctgcatccatgaaaaaatctgtgcctgctctcctttgtagaccattgaaattggctctctgattttactggagatgatgaaattccatagtagcaaaagccaagtggcagtaagcccttatacaccaaatacaaagtatatacatctcccacaatgaaaagctgggccatagaggtatcagaaaacattggcttgcagatgtttctgacagctgagataatgtctttggtatatgcctagtggtagctaatgaatgaaatacgtaagcagtactatagcatcccttcatctatataataggaaaatctctagctctggtagcaaaaaagttaactttagttgctgcaatcaagagtcacagcatctcactcagttttcagacctaagtcaattcacactcccagagcttttccccaaagggacctgtagccatttaccagagactatgctttggggaaaaggaaataatcagacctttcatactaattcctagggggacccaaaaatactgtggccaactgttcaaagtggagacttaaaagtgctcaggtaacaaatggagtcttagctccagttgtactcatagtgggtccagggggtcagcagatctagcctgtgcttatttccccagttctttaatgaataattggaatagacatactgggtaactggcagaatctctatattgactctctaaaccaagcttgtttaacctgtggcccatgggccacatgcgaccctggatggctttgaatgtggcccaacgcaaatttgtaaactgtcttaaaacattatgagatttttttttttttgtaattcttttttttcccccagctcatcagctatcgtgttagtgtgttttatgtgtggcccaagacaatccttcttcttctaatgtggcccagggaaacccaaagattggacacccctgctaacccatagagagaggaccatgtgataggagagctgagtagaaggctttagaatttcccctttcttcaaagatagtaaatcagaagtaataacatatccctgaggaaactctcaagattgatgtcactatcaaagatttgaaataagacttgtgatatctatcacatccccacttagctcacttattttgcctcggcagaagttaaatggatcttagagaatggctgtagactcccctaaacttaattattgggtgactccaaatgtagttgctgacccagatgtaatatctttatcaaaccacatggcccctggcatttggtatgtagctattgacttagttaatatctttttctgccaatttacaaggaccaccaaaaacaatttgtttttatctagcagagccaacaatatggcttcacagtcttgcctcagggctagatcaattcttaatcttaatcatcgtaacatttcacaagtcatcacactgatccactacattgatgataatatgctgattgtctctgatgagaagaaagtagcaaatactttagatatccttgtagagcatataagaattagaaggtgataaatcagccccacaaaaattcagcaaaacttctgggcattcagtagccactatgctcgataggctttttttttttttcttttttgagagggagtatcattctgttgcccaggatggaacgcagtggtgggatctgggggtcactgcaacctctgcctcctgggctcaagcaatgttcttacctcagcctcttgagtaactgggaccataggtgagctccaccacacccggctaatttatgtattttttttgtggagatggggttttgccatattacccaggctggtcttgcactcctgggctcaagcaattcgcctacctcagtagtgctgtaattacaggcatgagccactgcacccagcctcaatagtcatttttgaatttgggggcaacatttacaacatttgaatatgctacctcaacctgtttacagagtaactcataaggctgccagtttttaatgatgatcaaagtagaagaaggctctgcagcaagcccagcagtacaggctatgctaccacttcagctttatgatctagcaaactcaacgactctcttrgtatctgtgccaaagaggaatgctctatggagcctctggaaagtgccaatagcagaatcacaatacagacatctagggttttgaaataaatattttcttcagataactgtttactttttgataaacaccttctgacttgctactaggtagatattgaatgcataattatggagtgtcaggttatcatgtggaccaagtttcccatcattatctgggtaaaatctgacctatctttccataaggttagcgatgtacaacagcaatatatcattgagtggaaatagtacatgagacagaactagagcagatctggataggacaaataagttgcatgaaccagggactcagacttctttggtagcaactctaatggcattgccttgtctctttcaactcatgcctgtggcttcttggcgattcccttagtccatttgttagaagaaaaaacaacaacaacaacaacaacaacaacaamaaaaaaacccctcaaacctgatttgcagatgaatctgaacaatacactagtactacccaagattaatgactgtgtagcactatagccctactcatgagtaactgtgaataatactggataaggaaaacttttctgtaggcagagatttgaacagtaaatatggttgtccacyatgttgggaatgagacatgcctagaaatacagatctatattggtcatcgatgggtagttgttaatggtttttatggtcagagttggaaggaacaggattggaagattggtgacaaggtagttagtttgaggaagaggtatgtgaatgaacctttcaaaatgaaaagaccctgaaagaatttgtatcccctctgagtgcccacaaaagcacatccattgcagaggaggctcttaataatcaagtggacaaaatgacacattctgcatgtcagtcagcctatctctccagctgtctcagtgggcccataaacaggagtcttggtggcaagactggagctgtgtatgcatgggctcagcaacatggcttcccctttgtaaagttgactgggatagcgctgctgctgagttcctaatctgcagaatccagcattgagcccctgcggggatcagccagcctctgggtggcaggttcattatactggatttcttccttcattgagggggcagagacttctcctcactagaatagacaagtattctacatatggatttgcccttccttgacatcaccaacatctgtggactcctagaatgcttaagggcatggtgaatacagagtagtagttagtgtaagaaagaagccatagatattcattatggcctcgcagccaattatgtaagtgaggattattgtaggtttgcgtattttttctttaaaaattttttttcaatcagctttctcaggttcaatgcacattttttctttgcctcttatatctaggttttttttgtatatgttaacaattttcttctctcattttcattttaaaaatgttaaatagaagccgttggagatcaactttccaatttaggtaacagaatatttagtgggactgtgacagaatttaaggagtaactcagagtcacagcaatgactacaatagctgttaggactctatgtctctcgtttttgaggagatagaacttcttcacttataaagaaggacagttagactttgttaggtgaaatatagaattgtgttgttattgtacaggagtttcagtgtgtgggagagggtgcatgtggaagctgagtagtgaaaagtgtagactttgctgcttatcagtttactgtctcttagttccaaatttactgtattagcctgctctgtaataatggagctgggccttgtaaatttcttttttgctggctcgtacaatgttaagccttgtcagtagagggcactggagggacactgaagtggctgaggcttctctttctggtttctgtgatgctcactggctaagctccttttgagcatagttttcctccactgctcactccccagtatgattttctccagtactaggtatctgcagaacacagctttttctagagttggtgttccccacacactgcactttctttagagcttgatttaggcagcagtgktgtacccttgagacacagacaccatggacctgctctgtcacctaagtcactgctccccaaactctctcctcagatccacacatgccaactcggggccccacaagactgggtgtctagggagccagctgcccaacctttgtcccaggcagccagcccagagccgttgttacctgtgtggcacatgaaagttcactaaactcctgcaggggacaacctctgtgattccagattccctcagcagccagcagttttcctcagcacctagctagttctagggttctgtcccccggctgtgaatggcctcttctggaacttcaggggcagatttctggtaagtcccatgaatgaagtacttctatgactttttaccaggtagtcaaagctagggcatctccatagacatctctggatctcagccctggtgagaggagagcccttccttgaacacttatttcagccatagggggagtggttgccccttatactgtatttacaactcctgtattctttagaattctccttaactcccactaggcaatttcctgttactccaatcctcttttaataccagattgtattaaactttctctgttcaaattagcatgtggtttctatctccttactaatccaaaagccaacaactatgtttacaaggtaaatagatggacaaatgttttaaaatgcagtgcctctacctggggggcagggaataccagttacatgaataatctctggatccacctaaatcactcctcagaattcctctactctgtagtatgccataagtaatcaatgcatatctttcatatgtaatgtaaaagtcattcacaggtgtagatgtggcaggaaagagcatgtgagcccctgagtttgtgactcccttgacagataatgtagtatcataattacttgtttgtgtcaaactgtcaagatagagttggctagctcacaaatcaagattctatcagcaacctttcacattcagagatgacgatgagggagatgtctacctgaccaggggtagctgagaagttggatgtctgaccctgtccttctcagtattgaaacctgtgcctcacggttgctgatggttaactctgtcactgagctttttgtctcacagcctgcagatatcttggttcagaaagctgttcttagtttataacaattgcaagtagtttagtcatccactggtggcattgcccagccacccagagtaactctactttgcctttagctgagatctttgaggtatgtctactgctgccccctctgagacagaatgtggctgtcttcatgcagtttgctttgcatcagtgtttgtctcttgtcatacatccacatgccacttcctgctcagaagaaatgctgccaagaatgtaaacatgaacttaaacataatcaaaactaacaaactacagcagcaaaacaccatgagatttgacccaccaataaatgcaagcagaaatgactttctgccactcctctgttccctaacactttaaccagtagatgaggggcacataataaaacttctacccaagcacttaaaggtttattatcagggcaaggtctttaaattttgtttttctttgttttgttttgaattcaattaggaaatacagatgatagataatgtgtggcaaagatccaatgagttttataataattcacaatagtgtacttttcttaatctataatctatattaggatattgggatgtaattttgttttttttctgcttagtgtggttacccctaactctttacagcatgccttaactcagtagtaaggaagttttgtataycaaattagacatcacagcaattaaattcatcaggaaccagactttaaacttctggagttgtaatggtttattgtcacaaacatggaaacaagaagtgagaggaaccactatcttcttatttcattaaatgttactttcatgtaaaattataatgttctgctttccactacttcagaaaattgctacagttggaatttttaggttaaatgaacaactaatatttctgcaacctatgcttcttcacctagagggacaatcatgatggatcttaccttgatattttcccttctcaatttgtgtttaaacaagatccccaggtgattcatagtcactttaaagtttgagaagctgtagtctagataactggaagctaccacttgttagttagattattttaaatttgtaagatttcagatggaagcatatttttacccctgagaataatccattgattttaacatagcgagtgtcacaaccagttaaaattgtgtatattgctttagcttttcactttatgaatatttttattaatgactttttgcaatggctacatatataccaggttacagattaataactttttaaaaccaggtctctgaatttcactcttaggaattcataagaatttagaatttagaagatctctgaatttttcttttcttttttttctttttttttagtttttaaaaactatttcatgatttttgacttctcttcctctgtgaatctgatctttggtaattagcaaatagccatcttggataggtgtgtttaaaggttttagaaagagtacaagaagaacaaaccctttatctgctaatcatttctaatgtgcaaatatgacatgttatatcctgagtttgctgttgtgctgatttttttcttatcaattctcaaacttctgagtccaactggaagttgactgtaggagagatttgttttgtttcacgagctgtttttacgtagggcttccaatttggcaggtagtactgacaaggaacatggcattattcccrgaaaaaggcattaaaaatcctggtttcattttactcatttatttattgtgtatcttttggcttatgtcttttattgttcaggtatcaattttcccatttttatgattggaataaaatatttataaaattattttacagaaacataatttgcagtaaaacctcagtgcctcatttatatcagcgtaaatccctgagtctttttggaaaactgtgggtcattcttgccttggattttatcgtgtatctccatgtctaaataacttctattcatttacatcaagaatctattttgaaacacccatctttggcttattagaaattagtaatgtggttgcctttggacagatacaacccttatcagatgctagttttgatttgcccaaaatattgtgatctagacaagtaattcttaacccttgctgcttgttagaattatctggagagcttaaagtaacaacaaaagcagagtatatgccctgcccccacatcaattaaatcagaggtgaagcctaaggcactttatttttttaagagcttttcactaatgtatatccagaattgaagacagctgatggagatgcttagtgttgagtgtcattcagcattaatggaagcctaatattgcacattaacagcaaagtacagaaaagtcataatgaaaatcccatcaatgttggaatctttaagtgatcagggttgataagagaagattaatcccttcagaaatagtctgaaaagatcaaaacatcatcttcctacttctaggctctgcctctgtaaggttctcaacctcttaatcttccattttaagatctacaatcttattttcaatctttattactgaaawggtgctttgaaaagtttttaaaaatcatttatttgtaaaatattacccaatgataggaagctatttgtagtttttatggtttttcctcagttttttttcttatcgccttttatttaggatakcagttcttgactcttaaacattttattttagataatttcagttaaaagctcaggattttacattgaacttgagtttgaacagagttagaaaaatgctggtcttaaactgaactggcatggccaagccacttaatctctttgactctccctgtctgtcagtaaaattggaattacaaaggctaggcgcagtagctcatggctgtaatcccagcacgttgggaggctgagacaggaggatcccttgagtttgggagttcaagatcagcctggctgggcagcatagtgagacctcatctctacaaaaaaaaaaaaaaaaaaaaaagagagaagaagaagaatacttcacaatattgctgggagaatgagaacttatgtattaaatgttatttaataccagagacctagtcaacatttaacacaagttaagttttgtttttgttgttgtttctgatgaaatcttggtcctctttcttcctttttccagtcaataaatttttctgggtgcctactatgttatcaacattgtggtaagggccagaaaaacagccatgaataagatgctatccatgtctctcatgagctttccttgactcctttatcagaagcatcccaaactaaaacctactaattgaatgggtctttacatagatacacatgcactcacaatgataggattactgtcattctgatgaacaattcctctagtttatgatttattctaaaaagaactatcttctatctgcgtcattaattctatccttcttttcaattcccaccctatccacaagtatgatttctgacataaaatgttttgggaaaactatcactactgtagaagaatctagttctgtcatatcttcctattctgtgctttctctgaactctttttccatgttctgtcaaaatagggagtccagctcaattcttctcaaattcctaatttagcctacttctagctgcagaaaaattgactgtcactcgatagccctggggaaggggatttttggtagtcccctcaggaacagaaaggaggtgaacacaggttgatgaatatctaccttttgtcaagatacagttagaggggatgaggttgtagttcatcaactgggaaccactttcctgtgagaccccaacattttgaccattcttatcttccggaaccccataggtgaggttgctgccctattattctggaagtgccctgaatcctaagccttaggatcttgaaggcatgactacaactactctctctgccaaggttctcttctcatttttcactaaagcccattaggccaggtctaatgaagttcagttttaaaggtcaaccaactgttgcacatttaacatctctcaagagtgagataagattgtaaaattacttccacttgacgtggataatttatctgtgttttcatttgtcttttttttttttttaccacccctccttcataggattggaaaaattggactttccagtcagtctctttttttctactcttaaatgtaggtatttctctatcctctttgttttacatttaccccaagactgactcaaattttcatctctactgcagaactttttcctaatttccagtcccatatatctttttgctcttggaaactcactttggaagttccattagcatattacatttgctatgtccaaaactgaacaaattatctccttaattcctaccctgaatctatccttcctgtgtttcttgcctttgttaatgttatcactttactcatttgtattagtttgttctcatgctgctaataaagacttaccagagactggataatttataaagaaaaagaggtttaatggactcacaatttaacatggctggggagacctcacaataatggcagaaggtgaaagaagagcaaaggcacgtcttacatgatggcaggcaagagaacatgtgcaggggaactcccatttataaaaccatcaggtctcgtgagacttatccatgaccatgaaaaatagtatgggggaaaccacccccatgattcattatctccatctgcccctgcccttgacacatggggattattacaatttaaggtgagagttgggtggggacacagccaaaccatatcaccattcatctcccattcttccctttctctcaccaagtcctgttgtttgattccacttcctggactctcttgaaatcattccactccatcctttgacccacctcatctcattaatatctatcacctttactggggctgaaaaacttgtgatttttctaaaacataaatttgattgtggtcttttcttaaaaacagtcctctccattccatctattttggaaaaaattggtaatttccaaattcactgaaagatgcacaagggtttttatgaactgatctttaactgaccttcaagccacatcagttgtcattctctccctgtgccttccacttatgctgtactcaaggactgaccatgccttttcttgcttttatggttttgcatctgacattccctattttccctcctgtctaactgcctaaaatgtacttgtatttcaagattttgctcaacagtgtcatctctaggaaactttccttaacatttctcctgaccttctacattgttttcccttttttttttttttttttttttttttgagacagagtcttgtcctgctacccaggctggagtgcagtggcacaatcatagcccaatgcagccttaacctcttgagctcaagccatcctcccacctcagccacctgagtagctgggactacaggcgtgcaccaccacatttgactaatttttgtatttttttgtaggatggggtcttgctatgttgcccaggctggtctcgaactcctggtctcaagtgatcctctggcctcagcttcctaaagtgttgggattataggcatgagccactgttccaagcctgtgtagctttcttagtctcctgtcgtagcacatatcacactgctttgtgactgtcctctggcttcctatatttcaattctgcttcttgaaggtaagggctatctttaatttcttaaccatagcctaccacaacatttgacacataattaattacacaactgtcatagtgtggttctataacttcttatattcttttcaaaagcttaagaggtcatttcattttttacctgaagttcttaaagcaaccaaacctcagaaagattggaatctcacttttatgagcaatatatgtcagaattggggttatcttttggagcagaagtatccactccatactgaaaagaatatagagcactccaattagaaatagtatatagaactaagttctgcctattttgtttattcagcttaaaatttcctgccaaaagccagagaatccatcttagaacctggttttcttattttaaatttagggagaactttggaagagaagttaaagaaggtgtcaaaagttaattttcattgctataaatgatattttctttaaaatatgtttagaccttaggaagaacaggcattttccctccccttcgtccctgcaaatttcttgactggctatcgcggctcatagtatgtaatcgtttcctaaaaagtcctatttttcttttcctttgctcctgttgtcccatattagggtttaataaacttgctgtcctgttcttagggtcaattgcaagcaatattttatcaaaccaaattctgcttttttaactttatgacttctataggctccctacagacacttcaagtaaagctaatgaattctctttttactattagatcttgtatttctgtgagctattaaaactagctgttatataacaacaaattaaatgctgttgattttcttgtttttaggggttccttcaggagtcacaagtactattgggttggaaaatctgggagaataatagtttacttactgatgaaactgctgtattatcattcattaagctggagcagatcacagtttgagggtaaactacataaaatgaaggccactattttagatggatgcctaatagtacttatcagtatacccttacttccttatggagctctcttttttgtaatttatttaatgaggtcctttgattccttggttatcaagtgaagatattcttttttaactcaaaatatatttataaaattaattttatacatagtatatagtggatattagagtttaaaaagaatgtattttttaatggagaggaatatcaatatttttgcaacyccaataaattgtagtaaattgtaacaattattttcttccaaaagtgtaattttcttgaggacaagatatctttgtattctcattaaccataagagtacattggtagcttatgttcagttgttggttaaatgaatgaattgagccatgcctgtaggactgaatagctactaataccatcgatcatttctgtttataggtactaccattaaagataccttcttctcagcaaatctatgataaaaaatataagtaacagaagaagaaataactgttatttgtcaagtgacaagcttttaatgtcagaatggctcacctaaagcgactagtaaaattacacattaaaagacattaccataaaaagttctggaagcttggtgcagtaatttttttctttataatagttttggttttaatgcaaagagaagtaagtgttcaatattccaaagaggaatcaaggatggaaaggaacatgaaaaacaaaaacaagatgttggatttaatgctagaagctgtaaacaatattaaggatgccatgccaaaaatgcaaataggagcacctgtcaggcaaaacattgatgctggtgagagaccttgtttgcaaggatattatacagcagcagaattgaagcctgtccttgaccgtccacctcaggattcaaatgcacctggtgcttctggtaaagcattcaagacaaccaatttaagtgttgaagagcaaaaggaaaaggaacgtggggaagctaaacactgctttaatgctttcgcaagtgacaggatttctttgcaccgagatcttggaccagacactcgacctcctgagtatgttgaagaatatttattgtttattctttatcaccaggctttgcaggggagagaggggtgagctaaggaagttatctgttttttagytactctaaggcagaaaatcagcaaatactgtttatttaacctgttgtatttattttttgcttataatgattgaggctacatatccctatttatgcttggtgaggcagtgcagatatgaaaagttattagcttggaaattagaaaactgaattctagatctgactgctatccacaaggaaattctttattcctaaatactgtggttttctcatctatttagggggaattattggacaatttgtataggaagtagaaggtagaggaattgtttccatttctctgtatttctttagaataaaaatgtttaaaaacatgccaagattttggaactgttggataatattttatatatgtgtaaagcaattcacagactttgtgattactttgactcaaagtttttgagtacctaattatatttcagaatgccctattttttgtaaacaatcccaagtagctgggattacaggcgcccgccaccacagctggctaattttgtgtatttttagtagaaacggggtttcaccatgttgcccaggctggtcttgaactcctgacctcaggtgatccatctgccttggcctcccaaagtgctgggagtacaggcatgagccattgcacctggcccaccctcaacagattatttatttatttatttattattattattattattattattattattattttgagatggagtctttctctttcactgaggctggagtgcagtagtgtgatctcggctcactgcaacctctgcctcctgggttcaagcgattctccagtgtcaggctcccgagcagctgggactacaggcatgtggcaccacgtccggctaatttttgtatttttaatagagacagggtttcaccatgttggccaggctggtctcgaactcctgacctcaagtgatccgcccacctcagcctcccaaagtgctgggattacaggcgtgagccactgcacccagcccctcagtaagtttttaagtgtacaagataggccaggtttggtggctcacacctgtaatcccagcactttgggaggccgaggagggcagatcagctgaggtcaggagtttgagagcagcctggccaacatggtgaaaccccgtctctattaaaaatacaaaaattagccggacagggtgccgtgtgcctgtagtcccagctactggggagcctgacgctggagaattgcttgaacctgggggcagaggttgaagtgagcggagatctgtgccgttgcactccagcctgggcgacaagaacgaaactccatctccaaaaaaaaaaaaaaaagagtacaagataagcaaactggaagcaaacaatgcctgtgtattttgctttgctttctggatattagagaattacatttggcagtgaacttgaagataacttttggtctattgtttcactcaggtttttctagatttaggattatcaatactggatccaagtatatgagtcccttaacattgaaactgtgtagcttagatttctgttgagctattctaatctgattgattcaagtttaagttgctcataatttttaaatgaatgtgtaaagaaactaatatctataaaatattctagctgatataacaaggcacattatagttcctttcatacagtaatagattagaatgcagtattgcactttactgacttgaagagaggttttgattgaaaagtaatctacattaaaaatcaataatcatgatttttattcttttgacatgacaatcagtgacagctcaaaatgagcttttttctcccaatatagcattaagaagctgcaataattttcaataatgttaatcgctaagtaagtgaaaaacaagtaagcacattaacaacattttttggttggagtgaagatttaattatttcttactttggacagggttttgtacaggtggtaaagatttgttttttgacttcgtgatctgcccgccttggcctcccaaagtgctgggattaaaggcatgagctactgtgcctggcctggccaacatggtgaaacctcatttctactaaaaatacataaattaggtgggcatggtgatgtgygcctgtagtcccagctacttgggaggctgaggcaggagaatcacttgaacccgggaagcggaggttgcagtgagccgagattgcaccattgcactccagcctggtgacagagcaagactctgtctcaaaaaaaaaaaaaaaaaaaaaaagatttgttttttactttgaatgtaaccagtatcagcaaataacacattttctgaagaactgctaatgttttccatgctcattagaaatatagacctagtttctyccaaagccagatggtcatgtgactgataatttaagcatgtttctatgtgccaggtttttcaaatggtttgactggaatgatacagtcactttggcaagttattttaattgcactattttaaatatgtaaaacaattttcaaagcatacatttaacatgttgtttcaaaatgaatggggtttatgaaattatattgtgaaattttattacttgtattgatatgacatttktacttgatattggtaattatcagttaagcaaataaatcctagtttaaactgacggaaaatcttgcaagattaaagtgataacattttactagtatgaatttttgtgaaattttatactttaaatcttcaaaaccattttataattatcgattaatactatattaattaaccacatagcaaataaaggtaggaaaaaaatcttatactcagaatttcactttctcctcaaaatgcttataacaaatcataggtttcctcttttttttttctttaaaaataaaataccacaatatggaatttttcataatttttacttctagtttatgttggttataaacttttatgggttcaaaatataagcttatatttagtcatttatttctgtgtagttgtggttcaagtgtgtatattaatagtttgtgtttgagcttttttattaattggtagtttatccaaaattcaatttagaataaataatttgtttttatttatgaatgatgaagaaggtgcttattttttccgcccatgcacctgtatcatgctttgaaatcatgaagaaactgaagagcaatgccactttcactcagaatccatcctctcctttttctaatctgttgttgacatcttctcttgatattttaccccaatccaactcctttttttaatcactacaaataatccattctaaagacttgctgttaaaaaagggtatcagagacattcctattgaggtatgactatgaaagtaattaatgggataatttgtgtatctttttttagggcagttttctcaggcccctaatatcacactggaggctacagtttccccattggccctggcagaggaactgaagggtgatgggcttttatctccaatttatggtttttaagtgaccttaaagatatagttgctttatttgcttatctttcccataaacctcacacagttttattttatgtcccagtgacttgaagccctctcctatatgttctttcatttaatcctcacctccattcagcaggcttggcactgtggttatctctacatctctagcctcaaaggctggagactatgcagactctcctgcaccccagtggcttaatatgaagatatttttcattgaggaaagacattcctatacaaatgaatttgagatcaatttataagtaatgtttttaactaatggatagtagtaccactaatcagtcaagggcacttagggtctctctccctgtgcccaatcaatgttttagatggtgacatgagcacaggacttttaacatggatttaggtctttatttagatctttatttctacgtatttttaaagggtttttttaaacgctagtcttatttgatagtagatcaaattattggagcaaaatctttaacacatggcaaatggcagtacttaataagtatttgctgaatgatgaacatcataaaaasataggtttaggctggacatgatggctcacccctataatcccaccactatgggaggcttaggcaggaagattgcttgaggtcaggagttcaagaccagcctgggcaacatcacagactgtctctattttaaataaaaataagaagaacataggttttacaataaagctattttttcccttttgattctgtgtatagattaagtaaattgattcaataaacctaggaaatacttaagaaacctatattacatacttaggtaaatatctaattaaagataatctttataaaaatgatttaatattgtgggcgcagtggcacacgtgtgtaatcccagcactttgggaggcctaggcgggtggatcacaaggtcaggtgatcgagaccatcctggctaacatggtaaaaccccgtctctactaaaaataccaaaaattagccgggtgtggtggygggcgcctgtagtcccagctactcgggagctgaggcagragaaatgcgtgaacctgggaggtgaagcttgcagtgagccgagatcgtgccactgcactccagcctgggcgacagagagagactccataaaaaaaaaaaaattaataaagtggtacaatttttaaagttgcaaatatgaaaaatgaatgatttctgcatgaaataagaaaaatttggtttttatttgagcaattataagggtttgtcatttttacatgctgcctcattgtaggttattttcattatttaaaatgttatttgcatttaaaattacattgttgagaaagctataataacatgttgtaatccttgatatgttgtcatctctgttggtagacatcatctctgggtgagtgatttgcttgtaaaaaaattgttttgatttatttacattttatatagcattgagattatatcacatacaagaaaactatcctttttcagtgataaagattcaataatgataatgttagcaatggtatagctgtgaaataaaataataaaatttgtaattgtttttctacttctctgacttcttctagatgtattgaacaaaaatttaagcgctgccctcccctgcccaccaccagtgtcataatagtttttcataatgaagcgtggtccacgttgcttagaactgtccacagtgtgctctattcttcacctgcaatactgctgaaggaaatcattttggtggatgatgctagtgtaratggtaagaaagcacatgcwaattagattgtttcccaaatccrtattgtggtatctacagtstacttggttatgtggtactctytgtatgccatctcagagcttgaatataatagtttggatagtgggtatggtgaatgaaattagaatccaaggatggacatattcaaatattttcaaatgcagaaatgtatgaaacaccattattcataactatgtagtcctcaatgtgagactgttacagtaaggcatagaggttaagagcacagacttgagcctttgagtcaggctgccttgatttgaatcccagctcttttcctaaccaactatatgacttgggcaagttactcaacctctctgctgtgatttatcagcaaaatgggaataatgccatatttcattaaatatattatgtgttgttaatttataaatcactagagaaaacccacagctaattaaacttaacatgccattgattataagaaattgattataagaagaatccaattgtgtagcttaaaattgaggaaatacagaactagtacataatttctagagttgttttaaagactgaatgagttaatataaatatcaataaataatataaatgaatagttaaaaagagtcaccatgttctattttatttcggtgttcttaaatattccaatattacttacaatgttagtcaaattctttagtacatttccacttaaaattggaagtcaaatactaaattacacattttaaattggaatcacaaggctaatttaacaaatactctaacttgtaaattttcaaacatcataagtattttaaatattgtgtcaaacagatacatattatttcaatgattacaaaatttattccttaataaatccaagtttggagttagattcctgaaggtcagatatctcattttatcctcccagcaatgtcttgtgatggtgagtccgattatcctcatcttaaagaaactgaggcgcagaaaaggtaaaattccttgcccaaggtcacacagctaaaagtaattgtgccataaagtgaaatcagggcatctgatttcatgtagctttctgttcttaacctcccaaataaagggtgtgcatgggagctaaatttagggtgcagatataaatttacgggaagttcatatgttgtgggtaagtaaatttttttttaacaaattccaacagtgagagggtatattgaagcaatctgtagtaactccatttaaaataattctaaccaagaatgttgaaatttttacaagcctcttaaaacagaaaatgtttatgattatatatttaagatgagttacaattctgcttgtctttctgagaattatttctgaggtagttagaaggtgttaaaagcttaatctgagaattattttgaggtagttagaaggtgttaaaaagttaatctattactctgagacaacagtgtttagatagatttatttttctacaagggttgttcctgcactttcctctcttatgaatgtttaagctttaaataagcagctctcttaactgaaccactggagaattgaaaaaaaggttatattatcacagataaagtcaaagtcatctgcatttccttctaaaatctggcagaagcaaacttttgccccaggacatttattgattttcttaacattcccaaatttttttgaggctatgttttgggcccaagaaggctgcttgaagaactgcattttgtactcaataagaaatcaaaaatttaattgagaaaaacaggcttaagaagttgtttcagaatatgaacagctgggcgcagtggctcaacctgtaatcccagcattttgggaggctgaggcctgcaaatagcttgagttcaggagttccagaccagcctgggcaacatgatgaaaccccgtctctaaaaaaaaaaaaaagaaaagaaaagaaaaattagctgggcctgttggagcatgcctgtggtcccagctacttgggaagctgaggaaaactgcttgcagcccagaggcggaggttgcagtgagttgtgccactgcactccaccctgggcgacagagcaagaccttgtctcaaaacaaaaccagacaaaaaaacaacactggattgacatttgttaataacttttttaaaacctatgatctcaaattttgcttattacaaaccttatccaatttggtatattgaatatcttaaagtatatacccaatactaaaatttgcctgtttcatattttactaaataaaactgtcaggagactccaaagctttcgcaaatttttctgctgactctgtgtaggaatcgtcccaaactgctatagctgtggactttctgacgtggctcaacattttggtgttaaattattttgatccttgcttaaatatcagaggtctttagatatttgacatttttctttaagatttccagatttaaataccaatttcaaagcattgaatatctttttggccaaattccatatctttcactcttgtagtcagtcttctcagacctctaaatgagtcttttgaacggctagggttgactccatttgaagtttctcacttccctccaaayacattatatttattgataggaagtgtacagaataagtatgcattacagtgttttgtgttacagtagtgataatttgcatagctagcctttttccccagtaaggagttaaagataaaattttcattttgctggaaggacacatgcaactgttaagattatgaatttggaaggatcattgctctgtggtttcattagctttcataagctatatatgaaaatgcatttagaaagaattaaccctgattttttttccttacagagtacttacatgataaactagatgaatatgtaaaacaattttctatagtaaaaatagtcagacaaagagaaagaaaaggtctgatcactgctcggttgctaggagcaacagtcgcaacagctgaaacgctcacatttttagatgctcactgtaagtatatatgtatggatatggttgtaacattttccctccctctccctctaatttaaaaggtaaggaagtcttttcttttctaaatgcctaattgcattttctttaacagcgttttcaactggcgattatagcaatgacagcccaagcagrtaacagctctgtggagaaaattcctttcacttatgcagaattcttatctccttttgtgtttaagtttcctcaacttcagtgttctccagttactagctgttccagccagttatccttgcctcttttttttttttccatgtttcttttctgttaaaaaaaaaagtgtttgtttgtttgtttgtttgttttcttgattcccacactttaaagtgaatgaaagcttatytactatttaaatgtagccgggcgtggtggctcattcctgtaatcccagcactttgggaggccggcgttggtgaatcatttgaggtcaggagttcaagatcagcctggccaacaaggtgaaaccctgtctctactaaaaatacaaaaattagccaggcatggtgacatgtgcctataattccagctactagggagactgaggaatgggaatcgcttgaacctgggaggcagaggttgcagtgagctgagattgtgccactgcactctagcctgggcagcagagtgacactccgtttcaaaatgaatgaatgaatgaatgagtgagtgaatataatccaccctatcattaaacttcgtcctagtactgctgctttttttayattttagtttgtgtgtgtgtttttttttttaaatttgcagactccttggcataaaaaggagtctgcgaattttcaataaaaaccacaaaaccaaaatatgtttatatatatactttttatgccaggttaggggtgccccatcccatcttctttggtatcccttacataaacattgtcaatttttgtttgactttgctgctgttggtttttctttgtactttaattattttcagagtcaaagtttttgaagtatttagaaagcatttttagagtcaatgtgtcatatgcatgctagttattactaaaatgtcattttgtcccttgagctctgagtttagtgggctatactttgtatgagtgtctagctttgaattggccagtgcttaggttatgtttcacccaattactagttttgagcacacaccgattattacagaagggcttttggatgtgcttgtgttgcttagagccatcacattcagttctcttttaataccagacatttagaaaatgaagagaacactaaaggtaatgctagagaggtgctttaaaaaggaaaataccatcctctggtatttcttctcgttgttcaaaattacaataagatcatactggacattcttacccactacccactgggtggatatgtctgacggtcctcccggaccatgactgccaaatactgctttgtggggagcccagaataggacagcacatgcattggctgaacttgctgtgtgttacataaaacagcctggcctgtgaccagggcttagacctatcatgacatgaaactccttggccctccctttatattaggtctggggcagctttgaatggtccttcttctccagttgctaaaatcggaatttatactgactccttattttctcctaagacccagtcagataaatgaaaatttcaattactgtaccttattcagggagatacgagtttaaataaatcagaacacttttagggccaggtaatgtggaacagcaaaaagctacctttgactcataggccattttaacacatcatctaaactttaaatacactggtgttattttgcatcttttgtagaagaaagaaggtcatcatctgtaggggaatttttctaactgtagtgaatcttttttcacctttttcatcctaccctcatctcatcacaataaacctttaaaaaatctccccttctggagatctattgtacaacgtggtgactgtaattaataataatatattgtctactcaaaaattgctaagagtagatcttagatgttcttaccacccgctccataagccgataaggtgatggatatgttaattagcttgattgcaataatcattttacaatgtatacatatataaacactatgatatacactgcaaatgtatagaatttttatttgttatatctcaataaatctgaggaagaaagaaatctccattatatacatgttcaaaacacaaattgactctgttattctcatttctctgtaaaccttcacctaaataactaaagaaaaaaacttcaatgtttttattgaattaattaaaattctgttccctccaggtgagtgtttctatggttggctagaacctctgttggccagaatagctgagaactacacggctgtcgtaagtccagatattgcatccatagatctgaacacgtttgaattcaacaaaccttctccttatggaagtaaccataaccgtggaaattttgactggagtctttcatttggctgggagtcgcttcctgatcatgagaagcaaagaaggaaagatgaaacctacccaattaagtaagatgattgctctcagagtcttatatttacaccctataccatacattgaatatgtacacactgtttgctttatagcaattgcctctgaggtaattgataaagaacacacatattctatataaagagaatctaaaagtcattcatttgtgtacttgcttatacatgatgttgctgagtaagaggtagcagtgagtgagctcttatgtcttcctcatcaatcattacttaaaaatcgtaaagcatggttaggagaagacatttaagtttactccaatgggagaggacacraagtactccccccgaccccaaaaatcttgactttgaagatagcatttctagtttttattaatctgaataaaagctttgaaaatgtgatatggctttaattttttaacttcagttcttaaaatatgctgttttatcttgtttagtttttataacaaaatttgacaatggattatttttcagaacacccacttttgcaggaggacttttttccatatcaaaagaatattttgagtatattggaagctatgatgaagaaatggaaatctggggaggtgaaaatatagaaatgtctttcagagtaagtttatggaaattaaatatagcagatatattaaacaatgaaatatattgtgttctaatcggctggtacatatgattacagatgtgtgcactctactttttgtgctttctgaaacttaattgctggaaattttggaatawgaatattttcttttaatatgtaacttaatatatttattcattgtcgccagtgtaacaagaggaatcagttaaactcctgtgtccaggcagtaacaccaattaatgcacttgtagctactgaattccagccaagataaatataattaaatctagtgcttcaggaaatgagttgatcatcaagggagttagaatggaaaaacatttatgaataattttaaaggrcattggacttaactgtttggaatgaatgagcttgattttttctatacatattataagttaatataaaaaaaggctttgggtagactccgtatgtaccttatgtatttgatttcatgagtttcattttctgcagtaactttatcattcatttttcatctcttaggctggaatgtagtggaaaaagaactgaactaggagttagaagatttaagttttggctctggctccatcacatactggcagtgatgatcttagccaagtttgaactgcttatggcggggtcttgtttattcatttcagtatttccaacccctagcacgtgttgggtcacaagcacagtttgttgaattgaacatatcactgagtcttctcatttgttcaagaaagaaaggagagaaagagatttgtaatcacttgctctactacaagcacatagtattaaatatgacttattttctgattctttgcttggtaactatggcagagtcaattattaagatatttaagtgaaaaggcattgatttcatgatttgccattttatttagcattaatgccaataaggattttttttgacgttttctctctaaattggcatgaatttttaaataatcatcctctactttgcaagttcagtagaatgatcattggtaataatagccatctggaattgttttcttggttacaaaattgaatatacaagagataaatagggtctgagtccacttatatccaaactttgaagagaaactctagtttaagtgaagtgactatgtcagtagttcagacagaagtcaaatgcataagagcctttagttttctgtgcatattagagaacttacataattatttgcaaaaacaaaagcctggaattcatttttatgaaaaatctgaaatcaccattttgttaacttactgaaaatgcacttctgttgtctttagtgtctatgccatttaataaaataattccttacacttaagaacttaagttgaaatggcaggggacagagactatttgtaatattgtaatctcttctctaattttgtttttcataataccttaaaggtgaacttaaaagcaacactttgatttttctaaaatactgtaaatttaaacaaatatcattaattatcaggtatggcaatgtggtgggcagttggagattatgccttgctctgttgttggacatgtttttcgcagcaaaagccctcatagctttccaaaaggcactcaggtgattgctagaaaccaagttcgccttgcagaagtctggatggatgaatacaaggaaatattttataggagaaatacagatgcagcaaaaattgttaaacaagtaagttaaagctaagtagttaaattgcaataaaatctataacaagttcacacgtccttttgcgtcgattcatctcaagtacaaaacatcaaaaaatttgaaagtaggtttttaactcttaaagtacatgacttatgaatccaagtttccttttttaagaaaaaaactaagtaaactgctttttaaaaatcaggaattctacttgatgtttttaatatgaaagatagttcatttttgttgctgccctggttcaatattttactcgaagaaaattaagtagaactgtttttactggttttaggagatataacacmtaaataaaggttctaagtgactttttgcactggagatagagacagtgtcttaatgtggcatgagaataaaccaggagtgccaagcctttttttttcaagctctagtttcactacttactggagatgttactttggcaaagcctttgagaatgtaaaatagggaagacacttcatagagtggctgcaaggtggctggacatggagtgcatgcttaacatatttcttttctctccttccctgttttaagagatgaaatacgcatgctgtctctctcccagagtagctgtgaaataagaaagtgataagtgctaacaaatatatggtactcttgttattaacctgccataaatagattctgctctgcagaatcatgaaacctaatatattagaagtgagttccaatagtcttaataatattagataaggtaaattaactagatagtttaagaccatgcttcagtgtatagtactcatctctttgtaggaaatagatagtgctaatttgcagggtgagggaaggtggagtatttattgggagtcaagggtatcaatattttggctgttgcggtgaagaacgatttggttacctctttccctttttctctggtctccagtatctccctgttaggatgcaaattaagagcactactgagttagattgctatctttttacccaaggccatgaagacaaattgggcagattgtgtactgtacaatagtacttggctaagcaggcargtgggcactaaatgaagcttatgctctgcttgtcccccacaaaggggcacataaatcagcaaatacctgttggttaccacaggacacatagatctacatggtaaatgtaataagctagccagaagtcctaaagactcatactttttgctaaaacgcctgggttcaagacatcaaagttggcataagaaaatattttctttagttgaactgataagattgagtatttacttttgcatacatttagatattacatgtactttttctctaatattttgcctgtaggtcaaataccttgaagtttaataatggttttttaaaaaagttattttcttagtacgttaaaatgaaggaaagcaaaattcatttaacttgaaaattgcctttttctactaaaggttcagttggggatattgttaagaacaagcaacatcctgaaactagaaaaattactcccagtgggttatttcttgctggtggttttctgtgatcttgatggagaagagatagaagttgcattgtgtattggcactgtttgtctatacctgatttctgacacctcactttgcagatcatttttaggtataaagttgggaccaattttggatgctcctaccaccattcctttgcccacagcattttactagaaatctttgtcttgtagggaatgtttgtggcacaaatgaagaataaaatagcatcattttagtattttaatcagcactgaagtggtcttgactctcttttaaagccagaaatgaacaggcaggcatggtttttacttgaatgaatgatgaaggctgttgaattgcctcttgaatttttagcatggatttttaaaaatacctaaatagaaatacaaataagagtattttaagtgctttatcaatgttgttttaattaagcattcccttcatttctcatgtttctacagaaagcatttggtgatctttcaaaaagatttgaaataaaacaccgccttcagtgtaaaaattttacatggtatctgaacaacatttatccagaggtgtatgtgccagaccttaatcctgttatatctggatacgtgagtattttcctgttccttttttaattaatatactccttgccaccaacctttatgtggttctaagaaaattgctgaaatactttctttattgcttttgagattttacattataatcattaacattactttctaaattattttaaaaatatataaatcacatggattaaaaaacttttcataacttgaaaattttcctttagattaaaagcgttggtcagcctctatgtctggatgttggagaaaacaatcaaggaggcaaaccattaattatgtatacatgtcatggacttgggggaaaccaggtgagcactgcattaaaaatccttcacttgtaaagcatttacaagcacaagtgagatgttgcctatttttcagaagtcccacagcagctttatacttgggtaagctgtgtgtgaaatgttttcagactgagtttggcaattgatattgatgagtatttttttttggtttttactctggctctgaaaacaatttgagtagcttawccmttaaaaaaaaaaaaaaaaaaaaaaaggaggccgagctgagtggctcacgcctgtaatcccagcactttgggaggctgaggtgggtggatcacttgaggccgggagttcaaggccagcctggcgaatatggtgaaacctcatctctactaaaaatacaaaaatttgtcgggcgtggtggtgcatgcctgtgttcccagctacttgggaggctgaggctggagaattgcttgaaccacggaggtggaggttgcagtgagccgagatcacacaattgcggtccagcctgggtgacagagtgagactctgtctcaaaaacaaacaaacaaattaaaaaaaaaaaaaggaaaatgagaaaataatagaataatgccatttgaaattttttttaaaaagaaacttctatgtagctctttgatgctttaacttttgcatgactattggcatggtgattttgcaagtttacacataaaggccacatataactggattgaatcacaaattacatcaagtgttaataacaaaatagagcattataaattaattttgtgggccacaatattatttcaatatgttcctccttctccaacaaaagaggaagattctccttgattagtgacatacctgctttactaccttttgactattttactgattaagattcacatgtcaaatattactatttacttgcctatgggtagagaacatgttatatacaaagtttctgtttttttaagcttcctttccttaccttttgcagcttaactcctggaaagattagactatttccctcatttgttcattcaacaaattcattgagtgagccctgcatgccagatactctgatgagttcaagctatttagactctaactcctttaggaaatctataaactagcagttccttaggataaagcattcagagtgttctgggggtatagaaaagggcattgaatgagactgggtgtccacacattttcctgagaaagatgatatttgaaaacattaaaaaaaaaaaaagtaggtaggagctagtgaggtggctgtggggaatggcaacagaataagaagagtgtgaaggaaagtgaaatgaagagaagagcctggagtatctcttctgggcattgcaggtattttggtgtagagtccaagatgtgtgtggaggatttttgcaataattaatatccatgatgtcctattttaatgggacgaaactttgagatgtcagttttaggaaaaaagagccagtttatctcctggtccatcctcttctatatttcttcctacccattaggctcagcttaatctagttctaatccttattaacctaaaccaatcaatctactgagggcagatgatacagatgcccagaagccagagctggtgaactggatctattgctggatggttaaggtgtaattctgaaataggatggagatatatatggatgcatatagacagacatacatctatacctatatctatatacatatatatctgtacatatatgtgtatgtgcataaatctatatgcatctttttaagaattttcttaccctccatatattagaagaaaaatagttacataaataattgcattctttggaaataacactgatctatgcttgtaaaaattaagattttgagcaaagggaaatatttctgcatttgttaaaatcttactagtaaatgtaaatccctataaatttctcttaggcttcttctagcattacatttattttatcttaaaagctgaagatatattgtacacattgcttttttccatttttctgttatcattttcataaagataataacagctttatgatagctctgtatcaaaaatatgtttacattttaaatagaatatagctatcttttagaaattgggggatgggaaaacattcacatattctttcaataagtgtttgtttagaacctataaagtagcttgtactgactgttaccgtagtaaaaagacaaagctcctgatcttgtggagcttatgttccacaggaacaaagaaaaaaatatgtagttttgggcatgaagaaaaatatagcaggtaagggaatagtgtgtttcggggtagggtggttattttaagaggtgagggaagacctttttggaaaagcgatcttagagggaggcctgaatactgtgagagagtgttccaggagaagatgctcatcttggaggaaggatttccaagagtggaggcccagaggcagatacatggagaaagcagatagccagtgtacctagagcagagtggtctagcaaagaggactaggaaatgaggtcggggcattgatagggacctgatcatgtagggcttaactggccccattaagaaacttggacttaattctgactttgacagaaacaattgaagagttttgagcagaagaataaatattatctggtgtatatactaaatagaaacttcagcttttgttaccctaacacagctattgattttattttgctttatttccttgacattttatttttaatcaagcattgcacttaaaccgttttgcaaattttagttccctgagtgctaaaatttttagatattatataacttgatcattttttcatgtttccttctacttttgatcagataatatttttatagcataaaacttcatgtatgccaaataaaaataaatattttggttatgtgactaagctggccaatattactagtgtaatgcagtttgagtcattataacttgattatatttactgctttgcctcttctctactcgttctaagtaatgggtctctccaacattcacagttatccaattatgtgctcttttttgttaccaaagtactttcaatattttccattttttgtaatttttattttaatgactttttaataatgggtaaaatactcgacagcctttgttaccatttttgagatcttaaggcttatctttcttagccaagtatagctagaatgctattttcatcatctaaactcagtttcttcctgtgtttccatctgaagaactactagttctaaaaatgactgatgttttgcttgtgggcggagataaattaagcatgagactaagagtagggaaactcaagatatatggctctgtgaattcagcgaatgtttgtagagtgcctactgtaatacacataaagagtttaacacagtgcctgcctaacatgtaataaggacttaacaaatattagtgctcctactaattatttcattattgaaaatcaattatgttaacttattttatctttataatgtcaatattatgaaatattggatttgtgatgggtgttatgactcgataaattgcctgacttcagtctatggggaagccaggtctacacaccacacacaattctaatagagtgctagaaaagttatctctgatgtactatgggaaccttgaaaagattgtaattttgtgcagcagggcaaattcaggcaaagccaaagaaggaaggtagtatttgagttggctcttgaaggattaaaaaggagttagccaggcagaaaagggtcaaaagtgtattccaggcagaggacagactgtaaagcaaagtcttagagttatagatacatatgttctgattggtagaattgtgtgaaagaagcataatatataactggggcaatgattgatgcaagatcaaaaagaaagatttcatgtaccaattaaggagtgtggactttatcttagcaacagtagtgattcacttaagcaagggcagtcagggatcaaaccaatgctttaaaagactatctggcagcagattggattgctggatgataggaacagaaattggaagtagctgtaggtgtttcagtaaaaattctgagagtctgagtaacagaagtgagtacacggaagtgagaatggatgggatgttaacatctgagaggaatagtgcagctaagggamgaattacttggatatgtggagaaagagaagcatcagtagtaacaatagctaaaatgtatgaaaactcaccgtgtgccagtcattgttctaaatgtattatgcgtattaacccacttatcttcataaccctgtggggtaggaactattaaattacccattttctagtgagaaaactgaggcatggtgaacaccctgaagtccctagtttagtgaaaacacctttgattgagatgaagaagagagatggaacacttgtgggagagaggcaattaatgttcttgttataactcttcattcccttttctgaggaatgcctgggatagcctccactctccttgataacttccaacttctggtatggggaggaagacagtaccttgttaatgaagtaaccacctgttgatgaaggaaggctattgtatcgtctatcacaaaaactcagcttatgtttctaataactatttttattgtattattttgttgaaatagaaatgactttattatttaacgagttgctgatttatttatttattttgcaactgagcacrtgggttgcttttgtcagtaacagtgctattccttccatagtactttgaatactctgctcaacatgaaattcggcacaacatccagaaggaattatgtcttcatgctgctcaaggtctcgttcagctgaaggcatgtacctacaaaggtcacaagacagttgtcactggagagcagatatgggagatccagaaggtacctcagtgcaattaattcatctatttaactatttttcttagctctacttgcttatctgggaaaatgagtggaacatggtacattaatattatctatcagaatttctctccctttattaactttgttattatgtgtttctacccatgtgataagagaatatatctatgaattaagtactcttagtaacaaaaaattaagttgcttggttgaaccgtgatatatgcagatgagcacttctgtgaattattaatattagtcgcttgttttttactatttagggtttcttataatgcttttagcaacagtcatattttttttctgkcagagagaagaaaaattattatatcttctcacttgaagtgattaatttttttctaccctgttttagcactttttcacaaacctagaattgagagaatacataacaggtctcttctgtttttaaacaygtttaaggcttagctgtatcatagcaattcttacctgaacattgttttgtgcagtactagaaaacgttaacactggcttttataatttatgatgtttttaagagtttgtcacttatggatatatcaagggaatacttcttgtttgaaaatgtgattcaaaccttgttctgtctgcctctcttcattatgtaatatcttactaattgaagagtagtagcttaaaaggtggcatttacactagaagccaaaaagagtttatcagacatggctcaccttagaaagatttgctattaggtttgcttcaatgaaaccataaaatctttttcatatttgtcacttaactatgagtcttggaatttaatgtctgttgtttccttttattctaggatcaacttctatacaatccattcttaaaaatgtgcctttcagcaaatggagagcatccaagtttagtgtcatgcaacccatcagatccactccaaaaatggatacttagccaaaatgattaagtgttccttaaaattaagttgaaaaaggaaatattctttctcataaaactgtgactaggcatacactgtagtttttgaaaattatgcaaaagcagctaaatgtaacttattccaagtgcatttttcttatttatatctttatgtagcactactacagaaattctgcaagtttctgtttcaaagcacaataactagtaataccaaagactatttcaaaatgtccagatgtaggggaagagatgtttacagtatgatgaaaataattttccaagtaaagtgawgtttgtgtgttttgtacacttagggatatatatatatagctacattcacacactcacaatttaaaatatttcccctagttttttggggggataggaagaaagatttgttactgtatttttttaactacataaaaatagatcaataaatgtcagcattggcctctgtgtacaaaccaagagcttttacagatccagaatttattagtttaaaatgcaggtgaacttttttttgcgtttggtttacttgtctgtcaaatgtttccttaaacatgaaactgaataaggrgaagagtatttttaacacttaaatttcttggcaaattttaaaacattttttagtctgtaatacactccacttgaagcacttaagtcttccttaaatgacttttcttaagtaatgatactgtgtgttttcccaaagcacttttaaaaaaatttttataaattactatctgttgaaaaggtgtccttttcctttcttctagtatttttttcttaccaaaattcactaatcttgaatgtttgtgatattaaatttcaaatgcagaatacttgactcatttaaagctaaattttgttactgattcaattataattgtaatggatttttgactttgtaatggattcttttcatcaaaaagccttatttttttatctatgtggaaaacacaataaaaaatcctcaacactattgtaatcatttggttaagtttttttcctcttttgggtaaaatctgtaattgataataggtgggggaaaatgaattttgtatgctgaatttctaagcgcctattgtttgtaaaaccatcagatatttcttatggcacaaaaaatgaggaatagcaaaattcctgtgttcaatatttagaaaattttgtattaatttctgataaagttccttaagcatctgatagaatgatgttttaaaaaaatttgacgcttgcttaggagatttaccactttttttttttgtttttcgtcattttatatttagatctcctgtattcttgttcccgaagtaaaatacgatcggtttcatattttaaatctggcagagcctcagctgtacgaaaaagagcatatactggttattgaccctatcttctcattgtttgtttgtaagtttgaatttgtattaaaaagcctgcattctgagctggacatggtggctcagcttctaatcccagcactttggtaggcaaaggtgggaggatcatttgagctcaggagttccagaccagcctgggcaacatagcaaaatctcatctctacaaaaagtaaaaattaaaaaatgaaattaaaaataaaattacctaggtgtggtggcacgcatctgtagttccagctatacaggaaggtgaggcagaagcattgcttgagcttgggagatcgaggctacagtgagctatgattacaccactgcacttcagtctgtgtgactgagcaagactctttcaaaaaaaaaaaaaaagcctacattctccagttgattatttcaactaatgtgtattatgtgcctaattttctatcagaagttgtattagcccgttttcacactgctgttaaagacatacctgagactgggtaatttataaagaaaaataggttcgatggactcacaggtccgcgtggctggggaggcttcacaatcatggcggaaggtgaaaggcatgtcttacgtggagggagacaagacwgaatgagaaccaagtgaaagtggtttccccttataaaaccgttaggtctcgtgagacttactcactaccacaagaacagtgtggggaaaaccacccccattattcaattatctactactgggcccctctcacaacacgtgagatttatgggagctacaattcaagatgacatttggtgggaacacagccaaaccatatcagaagtgatggtaggcagagtaagacttgttattacttttgagctatgtctcatgggtcagaaagaaaggcaaataattttaaagtagaaggtaagtaccactaggcatgaatatctatgagcatatatttctcttagagcttattatatctctaaacacaaaattatttctcaaaaatatttcataaatgaacttaaacatattttcaaaaaaaccaaagtgagtgccctgcatgtatcactcatatgttgatatatcatgatccaactgaaatctacttagagtaggttgatattattatgggaaagtccttcttacctgatttggcagcctcaggctattgctcaagtgtcatacaaatcatgtcattaaggactggacctttagggtaggtagtgccttttaaaagtcttgagttttggaacaatgataaccgagagttatttatggaacctggctgccatccacctgagacttaactgcactcaagtgtgaaattgtggaattcttgctcaatttgaagctgccatggcaaatggtctggttgctacagaagacctggcatgctgccttcattccagagcaccaagtcctaagaactctcggttggtaagctgcactgccaaatccactagggttaacctgatgggcaagttcactgaaatctgagaggggatcacagagttaactataggagaaaataagcaacacactaaaattgcccattactataaccaatgatgatggattttttaagcccctatattaccagagactagtattggacaatttagttaagtactttatataccatcaaaatataagtgcaaaaaggacaaggttgactttatcggaaggactagaaaaaaatcatttttaaaatgctgttatgtgtagatgagaattgtaaaagatagggaaaacaaaaaactaggcagattctgtactcagattgcttcacaattcactttaaagacagcagaaataaatatctttagacaatgcatttttagtatgctttgtgcaaggaagatgtttgcagaactctcagaaaccagttcatactcagataaaaggccttgggccctacaaaagaatatctgtgaaggaattaatacacatacaaatgtggcattgtgtgtgtgtgtgtgtgtatgtgtgtgtgtgtagtgtgtatattttaaattaaaatatttgacatctttttatgaatttatattttaattaccttttccaaattatcaacctacccaatcttcccttttccagtcctacagtcctactttttccacatcaccagcccaactgcaaaagagattcctcctgcacgcctagtccctctcgctctctaggcttccacaacacctaggaaattttttgtgtctgtttttgggattttattaggcaccaggcactaataatatacaaaatagtccccatctgaaggcggagaaagttatagtttagtaatgtggtcaccaatgtggtctcataatgatgttttaaagagaaatagtcccatgatgaagtcaacatattcaacttctggtgagtccactgacaggagctagaggagaaaacaggcaccccatattttagaggtaaataattgaagtaatgcttcttaaacctttttgtacacacaataataagattctgattgattaagaatcaatcagtttgaataagattttgattcattaagaatcaatcagattgaataagattctgattcatcagaatgaaagaatcaatcagattgaataagattctgattgattaagcctggggtagagcttgtaattttgtatttctgacaaactttcaggtgataccaaagcggctggccctggtaccgcgctttgaatagaaaggctacccagtgaaccaatgcccagggttcttcgagactaccatgatgactttgaccatgcttgacatccataattacttctagtacgaccagaagtcaatgcctctctatcaaccattatcatcattattcttccctggcagatcctacatcctttgtatatctctaagttgataaatcccccaccttctgataaccttctactctgcaaacttctttgattagaaaactctattatatcagcaattttgtctctgaaaattctacgtattgtcttgccttaactgaactggacattaattaaggataaatcttccaattctagtgagggttattgttttttgtttttgttttctatcattcctcttgcacttcaaggctaggatttgggataggtgtgtccttcttcaaaaatgccccagcttatttgaagccgtgtcatgtggatatattatgctctaccccttcgtgctgctgtcaaccatgaatttataggtcatttatcttaattcattccctgcattaattgaatactttagttcctgttggcctttctttctttatacctctacttgtgtcaccctatgggtgacttcattattggtgcagataactccagcattctgagctctctgtatttgacaaccacatttccttccctcaaccacacattccctggtcatcactagaaactatatcttctctaacatcttgatcaccttaacgtctctgactaccacctcctttcctagctcatttatgctagttcttgctctctagaaactttttctatctcttcaggacttctaaaccattgattttgctacttgttcactatcattctcctctagtctatacttttattcttatccagaatggttttaatatttcctcattgtaacaatgacagtgaaagagttcactgtcaattcatgtgtctgtttctccatcgtgcttacctagaaaaccccaaaccctggataaaccaaaatatttgctaccactacttctgcatccaaacaattgtcaggctgggcacattcaccatctttctggggaaatcctgtatcctctctctctttcatatgttaggtctcctgttttgtgtatactataacttcctctttcttggttaacttcctcattttggaggagtacattacacagtaatattctggggaacggtttaggatgcatacagtttttgagacccttatatccaaaatacctgtattctaccctcacaattagaaggttagctgagtatagatttcttggatggattttttttcaatattttaaaagttttgtttgtttgtttttctaaatttcagtattgataactccagtctatttttgattcttggttctttgttagtgattttattattttcactctgaatacttatagatatcctatttgccacaatgtgttaaatttcactgtaagtcttatattacagtatgctttactgtgctctttaaatactcacgtaattaaattatgaaatcttttccaaatatttattaattttatcctttgtattctcagtttctctctgggaatcttattatatcagaccattaacatattgattctctagtctatataggagggcagcttttctgatctatattccgtatctttgcatatccaggatgtattcttaatgtactcctttaagccttctattgagtttttcttttctgtcatttgtaatttccaaaagcacattcttgttctctgaatttttcttgaataccactattattttgtgaatgtgatttttttcttttgtctttctgagattatcaataaaaatattaatggtagttctttttttaaaggtttcatctacttgcatagtctatttcctccaagctgctttttttccccctatttactctctgcatttcataacagatgctttcctctaaagtctggtgatttttaattgttcatattgaacagaggattgaatacttattaaaaagctcttgagtctgaggagggcttattgactatggtctttcctgtaggctgacccaagtgcggccattgtgctggaaaacaaaatgacaagttagatccccagagaagaatcttccaatcaccctggaaggtgtaaacctgagaatcattgggagaagaggactggggatgaattttcagtataagattcttaactgtgctggtagcccctgttctagagacactctatcttatcctctccagtgaatgaatgtctaagcttctgtttgggtgtaggagaggaacgaggagtctaaatgattggtaaatggagcgtcaactacttctcctccccaactgtatctttctcacttttggaggcgcttggttccaccagttcttgattctttctgtggttctgtagtatgaaatgcattactactctgctttctccaatgatagctttggactaactactaattaatttgctttccaggcttcaaaacagtgttgtcattaaacttctcctactcttctccccatggatatatatttttttccctatatctttactgtcattttaatgggattttggaagacagcagaagaaaatgaagatagaatctgatactcttgacaagaaatcccattaattcttcgatgatttccaattttttcacagcaacctatctttttaaataaaaaacaacattgctcctctgctttgtaaccttccaatggctctcaaattgttcttagagtaaaattcttgcttctggttgtagcctgcaaggccctatatgacccactccttgccaatttctcctgcctcatctaggaccaccttttctgtgctgagtgtgcttcagacagagtagttgcctcctggatttgtctcgtgtatcaaactgattcttgctttagagccaacattttcttggtctggatgcccctagtaacagtatcttttatatgtttctattctcagctcaaataaaacattctgagaagagaccatcttttataaagtaacccaatcactactgaatcaccgtgtttatttccttgttacatttaccactacctgaaattttatgtgtgaacttatcttttgtctccataaaatgtcatcttcacaaaagcaagataagaaataatgaaatccatatcatgttcaaatttaggtaacttcagtatatcctcgaaataaaacaacactatttttcaaggacgtttacattaaacacagaattggtgccagtgaggatgggctatgagcataggaatggaggatgaagaggaaaatatgggcaaaaataaaaaaggacaaaaaagacagttttttcttagactgatgaagagcaacaacaaaaattcttgataggaaaagttttctgagaagatgcattattttttcaaaagatatgttacagaaaacataggtttatttacaatatcctatagtacaagaataatggaaccaagaaatagaggtactagttcgcatagcacacaatatatctatgaaactcattactcaaagagtttatgtaagtggaaattttgaatagactcagcaaaattgatgactaacaaattcacaatcaataagaaaaaatagaatgtatagcatgtccccatattttcagtcacatagaagagagcatcttccaaaacatatccctttgatactacatcagtcatcgcatgtttccttgaaagttatgatagtatttgcttttatttaatattatcataattttatgatattcctttagaatctcagccactcactgtgtaaattattataggagaagtctaattttttccagtggatcttttgaaaacgtatctcctttaaaacataatgttaatagtgaaaaatagtttgaaaacacaggtggaattcatggtgtcaaaaatgttatttttaagaacgtattt

SEQ ID NO: 94104 - DNA, 143814 bp, Homo sapiens
  misc_feature (1)...(143814): n = A,T,C or G
tgcacatttggtcagcattatgcatatgtgaaaatgcactttgttctatatttctgtcactccctgtttgcttttctctatcttaattatggaaatgtatcctcgtgagttgatataccagtctttctgtcatacccagtaaggaggattcccgcccttggtctggggtccgcatcaactgtgtagcacatgaattgctgtcatttggtcccacaggtgtctattgagtgcttatatgagcctccaggtgctaggccttgagtgcacagcatccagtagaggatgggggtctcctgtgtttttagaaatatcccatgaaataaaaaaattaagctatttaattgcaaaagtagtaagatgagcttaggttctaacctgccgctggggcagaaacttccacctgggagtgattctgcggctttgaattctggcctctttgtgtgtctgtgagtggctgacacagtcggccactcaatcgcagttttgtccgctggttttggcgagctcagggcctgtgctgtgtgtgctgcagctcgggagggctgacaaagagaggtggttgaggagtgagcggccgggagcctttcgcctccagtgtcttcgctggaccttggtctttacaaaaggaaacaaatgaaggctcactctgatccactcactgtgacagtctgagtggcagcagccaggagcttctctggccatttgtagttccctcagttaaaaaatgaaagggtagctaaggttcaacagctcaggctttgaactttatttatttgtttatttattattatcatcatcatttttgagacagagttgacagtcttgctgcgtctgtcacccaggctggagtccagtggcttgatctcagctcactgcaacctctgcctcccgattcaagcaattctcccacctcagcctcccaagtagctgggattacaggtgtgtgccctcacactcagctaatttttttgtagttttagtagagatggagtttcaccattttggccaggctggtcttgacctcctgggcttaagtgctccatctgcctcggattcccaaagtgctgggattacaggcttgagccaccatgcccagccaggttttgaactttttttttctcttttgagactgagtttcgctcttgttgcccaggctggagtgcaacggcacaatctcggctcaccgcaacctctgcctctggcgtttaagtgattctcttgcctcagcctcctgagtagctgggattacaggcatgcaccaccatgcctggctaattttatagttttagtagagacggggtttctccatgttgatcaggctggtctcgaactcccgacctcaggtgatctgccctgccttggcctcccaaagtgctgggattacaggcatgagccaccacacccagctggttttggacttttaaaaggtggggttcttgtggtccagccccatgtgtgagatggggccaggttctagtggcaagtctagcagttgctatcccctttttagacgtgtgacacagctgcctactaaaaggtagggtgccggcagtatagcagccaccttctcagtcctcattaattagaggctgagctattggatttcctgccaatggccaagtggaaaatctatttgacttttttttttttttttaatttaaaatgtatctgcgtggatagactcaggcaggagatttgtctttgtctttgttagaggaacctagctccagtgtcttgcttctcctcccactaactgtaacagtcaccactgaggccgggtgtggtgcctcatgcttgtaatcccagcactttgggaggccgaggcaggtggatcacctgagagttcgagaccagcctggctaacatggtgaaaccccgtctctactaaaaatacaaaaattagctgggtgtggtggcgggcacttgtaatcccagatgctcaggaagctgaggcaggggaatcacttgaacccgggaggcacaggttgcagtgagtcgagattgtaccgctgcactccagcctgggtaacagagtgagactctgtctcaaaaaaaataaaaggtgccattgaaccctcctaagaagatatacagtagccaataagcacatgaaaaagatggctcaatatcacttatcattagagaaatgcaaatgaaacccataatgagatactgcttatgtccattaggataactgctgtcgaaaaacagaaaataacaagcatgggtgaggatgtggaggaattggaactctgctgcactgttggtgagcatgtaaaatggtgcagctgttgcggaaaacagtatggcggttctgtaaagaattaaaaatagggctgggcgcggtggctcacgcctgttatcccagcactttgggaggctgaggtgggtggatcacttaaggccggaagttcgagaccagcctggccaacacggtgaagccctgtctctactaaaatcagaaaaattatctggtgcaatggtgcgcgcctataatcacagctacttgagaggctgaggcaggggagtcacttggacctgggaggcggaggttgcagtgagccgagattgtgccactgcactccagcctggacgacagagcaagactctgtctccaaaaaaagagagaaaaaaaaaagaattacaaatagaataacctaagtggtgtgcttatgacaataaatagtttattttctaaaaataaaataaaaatagaataacctaatgctattgcatttccacttctgggtatatatcataaagaattgaaagcagggtctggaagagctagttaaacacccatggtcatagcagcattattcataatagccaagaggtggaagcaacccaagtgtctctccatgggatgaatgaataaacaaaatgtggcatgcacatgtaatagaatgctattcagccttaacaaggaaggaaattctgacatctgctaccacgtggatgaaacttgagggcattatactaagtgaaataagccagttgcaaaaagacaaatgctttcacttatatgcggtatctagagtcctcaaattcatagaggcagaaagtagaatgacagttgccaggggctgtgggaccggggaattgctgtttaatgggtgcagagtttctgttctgcaagatggaaagagttctgaagatggatgtcggtgacggttgtacaacagtgtacttactgctgccctgtacatttaaaaatgggtaagatgggccaggcgcggtggctcacgcctgtaatccccgcgctttgggaggctgaggtgagcagatcacctgaggtcgggagtttgagaacagtctgaccaacatggagaaaccctgtctctactaaaaatacaaaattagctgggcgtggtggtgcgtgcctgtaatcccagttactcaggaggctgaggtaggagaatcgcttgaacccaggaggcggaggttgcagtgagccgagattgtgccactgcactcccgcctgggcaagaagaacaaaactctgtctcaaataaataaataaataaataaatggtaagatggaaaatgttatgttatccatgtttgaccacaattacaaataaacttttttttttttttttaaaggaacaaaaagtcactattaaggcctcacccctctgcttcccgtgtctgtggcttcgtgtccagcagtgagcacggccagaggggagcctccccatctcagccagtcctcctccctttcagaagccctgccttatccctcagagggggacctcttgcccctgctaacatgtgcttgagaaagcttttaatctcatttatgaggtcaacctctacaagctaaattattttaaccaaggactattcactgtgatgttatattttgggctttgtttttgctgcttggtcaaatagagaacaagggccacctctcgtcacacagcctgacgctcctgcagccctgtgagactgagagttgttttcctggtcatggtgacagatgagccacgcatgactcactggagcggtctcccctgaaacaaaggcatgcatttgactgcagactgggtgttgagttggtggcctttgcaagactgggtgggcagttctggcttcaaatgaccctgatgaatcacacggttcacagacgtttcatttattaccttgacagtgaccctggacaccagttgtttcttcatataatttgcgttaaggcttccttttgactttgtgggagcttggagtaaaacgcttcacagagttttcttgcgtttctgtttttcaggctcacttcatggactcactttgcgtgcttgttaaatgtgctgtgttgctcccaagaccatgtaaagcctactgaccactaacctccctcacagcagaaactagacgtcaggtaaacccaacccttgtgcctgggggtcacgtcaagttgcatgactgtgattaaggtaataagtaaaggtttaattatttgggctagcgattttggttttaaaatatttgataattaccaccaaagaaaagtcaatccatttaacttctgttttgtggctacacattcttagatataaaagaattaaaaataaaaagcctactaaatatatctggagatctcaccagaagagcatcacctccaactgacctaaaatagtgatatactggtttgagtgagaaactagctgggcatggtggcatgtgcctgtagttccagctacttgggaggctgaggcaggagaatcccttgagcccaggggtttgaaaccagcctgggcaacatagcaagatcccacctcaaaaaaattatttcagaatcaaaagagatggtttcttctttcctcccttcctccctccctccttctcccccttttcactttgagtttggcttaactaatagactccttgagcaaactggggtttttacaaggaagtaagagtctaatattaagtttttctgatgcccatattctaagtcagcttcatacttacttctctcatcatattctaaagtgaagatacctgaagtctttacaaaagctctagagattagttttattaaaatgtttttctttcccaaatgagagctcttattttttcccccatttttcatctcagcctcatttttgaggacttccaggcctttttcttttgtggtattcctagagccccaacagagcctggtacctggtgtcatgttataaaaatgtgatagtttttgagcaaaagtctctcaaaatactgtggagagattttagctctaccagtagtttatgtataatgaaaatgtatctctctgatcactgagatctgtgtatttagactgacagaataaagatactttccctaatttttctcttcaagaatcattagtttggtcaggtgtggtggctcacacctgtgatgctagcactttgggaggccgaggcaagaggatctcttgagcccaggagttcaagaccagcctggagcaacagagtgagaccccatatctttaaaaaaaaaaaaaaaccccgagcttgagagtggtagcacgtgcctatagtcccagctacttgggaagctaaggcaggaggatcacttgagcctaggaagtcgaggctgcagtgagctgtgactgcggcactgcactccagcctggatgataacagtgagactctgtctcaaaaaaaaagcaaaaaaaaatcattcaaagtctctcaacaccaagcctgaagcagatctttctcataagctgatttttatgcctgttcgccttctaaattaatattgtataatgaataatgtctttaaaataattagcagacaggtgtgcagtgttgtctgtctagctaatgagcagccttgcaaaataaggagagcctgttctactgactgactcttgtccctactcctctgagtccttccaggcactgaagttgctgtgtaatatgcagggcattctttttagaaagttctgtcataatggaatgtaatttaggccacggtcttactgatgcaactgttcttaatttaggttaaaatgggcaactccgacagtcagtacacccttcaaggatctaaaaatcatagcaatactattactggtgctaagcaaattccttgctccctgaaaatacgtggcattcatgcaaaagaggaaaagtcattgcatggatggggtcacggaagcaacggagcaggttacaagtccaggtccctggcccgaagctgcctttctcactttaagagtaaccagccttacgcatcgagactcggtggccccacatgcaaggtctccagaggtgttgcctactccacgcacaggacaaatgccccagggaaggatttccagggcatcagtgctgctttctcaactgagaatggcttccactctgttggccacgagctggcagataaccacatcacctccagagactgcaacggacaccttctcaactgctacgggaggaatgagagcattgcctccaccccaccgggcgaagaccgcaagagcccccgagtgctcatcaaaacgctggggaagctggatgggtgtttaagggtcgagttccacaatggtggcaaccccagcaaagtgcctgcagaggactgcagtgagccggtgcagctgctgaggtactcacctaccttagcatcggaaacctcccctgtgcctgaagccaggagggggtccagcgccgattccctgcccagccatcgcccctctcccacggactctcgcctgcggtccagcaaaggcagctccctgagttctgagtcatcctggtacgactccccttggggcaatgctggagagctgagcgaggctgagggctccttcctggcccccggcatgcctgaccccagtctccatgccagcttcccacctggcgatgccaaaaagcctttcaaccaaagctcttccctctcctccctccgggaactgtacaaagatgccaacctggggagcctctccccctcaggtatccgcctttctgatgaatacatgggcacgcatgccagcctgagcaaccrtgtctcttttgcttccgacattgatgtgccctccagagtggcacacggggaccccatccagtacagttccttcactctcccctgtcggaagcccaaagcctttgttgaggatactgcgaagaaggactccctcaaagccaggatgcgacggatcagtgactggacgggaagcctctcaaggaagaaaaggaaactccaggtgagcataccttagagcagagggaagggtccccacagtttccccacctggagaaggggaaggttagtagaagccaccatagagtgttgtcggggtgcttaagtgatctggcaaaagtgaagagttcagtggaaagcctggctcatctcattttcaagtgtgggtttgttytctcttttgcttcagatattttcacttttagcccacaactttaatcttcccatgtcttagtcagcttgggcagcaaacaaaataccacagacttggtttaatcaacagacatctatttctcataattctggaggctggaagtcagaggtcagagtgccagtgtggtccgattctggggagggctctcttcctggctgcagacagccgccttctcactgtgtcctcatgcggcagagagagcaggaggtctaggctcttttcctcttcttataaggaccctaatcccatcatggggactctaccctcatgaccccctctaaaccaattacctctcaaagatgtcagttaaatatcatccactggtagttawggcctcaacatggattttggggaggggggaaacaaatgttcagtcaatagcattctggttctgtgcatgtccctgcactcttccatgcactccacaggcctaatcttaagacttggccatagccggtgtggcagckcatgcctgtcatcccagcacttggggatgccaaagtgggcagatcacttgaggccaggagtttgagaccagcctggccaacatggtgaaaccctgtctgtacccaaaatacaaaaattagcctggcgtggtggcgggtgcctgtaatccgagctactcaggaggctgaggcaggagaatcgcttgaacctgggaggcagaggttgcagtgagctgagatcacacctgggcaacagagagagactctgtctttaaaaaaaaaaaaaaagtaagtacagagttggagagaattcctgaaagaattggttatctgagaattttactagacctcattcttacagtccaaataaaacagttgagattgtcattatttttggttgaataggcttgttgaacttgatattactctgatgaaattaaaatttctatgcttaagttggtacatcaaaaaaaaaagttgatgatatatctacatgtgtaatcttttttttttttcttttttttgagacagagtatcgctccgttgtacaggctggagtacagtggtgcgatcttggctcactgcaacctctgcctcccgtgtccaagcgattctgctgcctcagcctcctgagtagctggcattacaggcgtgcaccaccatgcctggctaatttgtgtattttagtagagacggggtttcaccatgttggccaggctggtctggaactcctgacctcaggtgatccacctgcctcggcctcccaacatgctgggattacaagcgtgagccaccacatccggcctatatgtgtaatcttaacctcctcatggagatagctaatggcatcctgaaaatatcttgtacctaagtgcatgtaatagaaaaatatatatactgataaaactgataaaataagaatgatgaatatacttctgtatcatggcatgtaaagttttactgggggagcaaagtggcttatccaccaggaagaaaagtgatagtttgcctttttaggtaattagtggcaattgctagattttcagtttgttgttgttttgttatttgtttttatttttgattatttatataggggagaagyttctttttaaattactctgtataagtcatggagttgaagggaatttgtgtgggcagttagtctctagcagaattgcatcctagatagacataaaattataaaattatatagagatttaggggtggaaaataatataacttttttgagtagattgcttcagatttatgaagtttgactttcgttacttccttctgatgtatatagcgtgtctgcctccaccaccccctcctgtgctgggcttcggttctccctcctcttccttcacacagaggtgaagaacagatgatcagcatcctgttttcaggrcctcttcatatccctgaatatattgtagtaatttgtatagtgattttactcctggatcatcactttttcagactaaaccacaaaatagtagagatttccttgacttttttctctcagctcccatttcctaaacaactgatccccactgagcataatgggagacgcagcttctgcttacttgagggctgaagtcccaggtggacaacgtccacgcctttttgattcaagtgttatggtgcccacctgtgttcagctgtcatccactgtgtcccctaattggtggtggcatcgagccaatgattctgcatctcttatgtgcactgagtttgttgctcatctgtatatgtggcctggcttacacgcggctctagtgagctgcattcagtgacagttcccacttggttcagatgtagaccagtggctgctgtgtatgaatcattctatcacgggtaagtatccctccttgcctctcctgtcaagttaccctccctgcrtctcctacccacgggaactgggtctccttcaattctgcattgtccaaaaacttaactctgaattgtgtgcctgtagagttaaaaacaaaccggttagggccgggtgtggtggctcacgcctgtcatcccagcactttgggaggctgaggcaggcggatcactggaggtcaggrgtttgagaccaacctggccaacttggtgaaatcccatctctaatgaaaattagctgggcatgctggcatgtgcctgttagtcccactacttgggaggcagaggcaggagaatcgcttgaacctgggaggtggaggttgcagtgagctgagatcacgccagcgcactccagcctgggcaacagagtgagactccatctcaacaacaacaacaacaacaaaacagcaacaacaacaaaaaactggttagaatcaaggaattagaattttattatttattttattttatttatttattttttgagatggagtctctctgttaaaaaaagtaccttcttagcaaatttcaggcatagaatatagtgttattaactgtagtcaccataatttaccttagagctccagaacttattcctcctgcaaaactgaagctttgtaccctttgagcagcatcttcccattgccctctcctgcccctggcaaccaccattgtactctctgcttcaatgagttggactatttcagattccaygtataagtggaatcttgcagtgcatgtctttctgtagagtgacatctcttgagtttttactcttttttttttttgagatggagtcttgctctttttgcccaggctgtagtgcagtggcgccatgtyggctcactcaagcgattctcctgcctcagcgtcctgagtagctgatccggattacaggcgtgtgccaccacccccagctgattttgtgtttttagtagagacggggtttctccatgttggtcaggctggtctcgaactcccgacctcaggtgatcmaccctcctcggcctcccaaagtgctgggataacaggcgtgagccacctggcttgagtttttactcttgagtctttactcatctccactctgctgtactgccctagtcatcaagttacattagcccttgtttctgattattcgatttgatggaagtgaagtcayttgtatggaaatggaaatcgtatgatttgtgtgtgtgtgtrtrtatatatatatatagcaggcaccttagtttcatccgcataacagatgattaagaattctagctgaacctatttaaagacattctatattttttaaaggctcttttttattagcctgaaaattagtgactggctattaggattctagataaaaagatttggaaatttattagagactgggagagttcatacctatgtataagaataagttataaatgctaaaatgcatccccccacccccccccatttctgaaaaagaaaactccttgctttgctatggttaaacatttaaaagttggcactgtaagttgagaagcagtgtcaagagtgtgtgtaggtcacacttaactttgggacttctgtgcctttctgtggcagaattgggcttgttttgaagcatattccgtcatggcccttgcagggtatcagaggtaattccagtgtttttgggygatgagtcagagggacatatttataactgagataatgttaatactagctagatgagaagtgtttcttcaccttttaggagttttttgtttttttgttttgtttttcttttgagacagagtctcgctctgtcgccraggctggagtgcagtggcgtgatctctacycactgcaacctccgcctcccgggttcaagcgattctcctgcctcagcatcccaagtagctgggactacaggcatgtgccgccgcacctggctaatttttcgtattttttgtagagayggggtttcaccgtgttagccaggatggtctcgatctcctgacctcatgatctgcccacctcagcctcccaaagtgctgggattacaggcgtgagccaccgagcccagccaggagtttttgaaaagcaacaaattgacaattaaaaaaaaaactctaagtatttctaaagtttcctgtccaagtgactcacaacagctggtttatttgctctgttatgcataagcatcagtgtataaataaatatgactggagatgcagtgtaaacagtggcaaatcatatttctatttgtaatatctgcttggggygcagttgttcatggctcctgggtatttggaagtactctccagttgtgtgattattctcttacaaaacagcaagtaattgcaacttgatttttggatgaaatttctgaaaaggaaacctctctatacaatgtaatattcaaaataaggcctttagtcaatggtccttgacccagttttccatcatttttattttaatgcataagaaaatataatcaaaagcccactagcagctgagtagtcttgagtgtgcttggcgtctctgcagagttatcttcatttaagccataaatgttgaatgtcagtgccttttgagtcagaagttaagctcactttatgctgaaaattttaattactgccatttaccagtgaaaagcctgtatgcaaattatttttcttcagtgactagacttctaatccagatattagagaaatgtctttatgttttcagctctgtgcatggccagcttgatgttcaatgcaccyggtcctcacagggagcaacattattatataagtatgcattgtatttrgagctacctgtgtttgatttttgtgttggagtaaatactgcagttaagaatcatgtctttgatatctccagtacctagaataaaataggtactcaaatgaaaggatgtgaatgaataaatgggtatatttttttcatgaaagtaattctctaagtaagaaatattaattatgaaaaaaactggccgggcgcggtggctcatgcctgtaatcccagcgctttgggaggctgaggtgggcggatcacctgaggttgggagtttgagaccagcctgaccaacatgaagaaaccgtgtctctactaaaaatacaaaattagccakgtgtggtggcgcatgcctgtaatcccagatacttgggaggccgaggcaggagagtcacttgaacccaggaggcagaggttgcagtgagccaagattgcgccattgcactccagcctgggcaatgagagcgaaactccatctcaaaaaaaaaaaaaaagaaaaacaaaaaagctatagttactagccagtacccttcatagataaggaatcctaagtgtattattattgttattatttttgagatggagtttcgctcttgttgcccaggctagagtgcaatggcctgatcttggttcacagcaacctctgccttccaggttcaggtgattctcctgcctcagccccctgagtagctgggattacaggtgctcaccgccaggcctggctaatttttgtatttttagtagagacgggtttcaccatgttggccaggctggttttgaactcctggcctcaggtgatccacctgcctcggcctcccaaagtgctagaattacaagcatgagccacctcgccatctattatttttactatatgaactgggaaaataagatactagagatctcaaagtctagaagtctagacctgggcacttggccagaagctggggactatagggagaggaagagaagtttttgggttttgcataacaatactgagtccctgtcttccccaccctaccctggtatagtaattttctaatttacctttcaaatgatccagggaaaaaataaattgcaagaatatgaattctttcctggaagatactgattcatggttagcaatgaagaaagaaatatcattctagtaatcttcactagtgtgttgtaaacatactagttaatttctcgatgctaagcataggttagatttaggagagccatttgtattttatttacctctttaagtgctaattctactggatataaattgacttgggcaacactatttttaaaattctttctggtatgaagacttgatggttaaagatgtatttttgttacaagaatcttgctttgcattacattatcagcagccactggtattacacttatgctgtgtgcaagaagggatgctttggatagccgtaagctctgatgggtgatcatgtgtgtttctcacaggagccgaggtccaaggagggcagtgactactttgacagtcgctctgatggactgaatacagatgtgcagggatcctcccaggcatctgcttttctgtggtcagggggctctactcagatcctgtctcagagaagtgaatccacacatgcgattggcagcgatcccctccggcagaacatttatgagaatttcatgcgagagttggaaatgagcaggaccaacactgagaacatagaaacatctacagaaaccgccgagtccagcagcgagtcactcagctctctggaacagctggatctgctctttgagaaggaacagggggtggtccggaaggccgggtggctcttcttcaagcccctggtcactgtgcagaaggaaaggaagcttgagctggtggcacgaaggaaatggaaacagtactgggtaacgctgaaaggtgagtgcagtgtcacctgctgaggccactggggattgtttccgccagccgtgctctttgccaggaagtgccaagagactagcattgatttgagttcacatgaggggtttgacacaggatccatgggctgccttcatgcagatactttctcacacccgtgaaataggctttacctactattcacatgtattatgcagttcaataaataattagtggattttttacttgtttttattttttttgagacagagtcttgctttgttgcccaggctggagtgcaatggcaggatctcagctcactgcaacctctgcctcccaggctcaagcaattctcgtgcctcagcctcctragtagctggaattatgggcgtgggccaccacacctggctaagttttgtctaatttttagtagagatggggattcttcatgttgaccaggctgctctcataactcctgacctcaagcaggttgtccaccttggcctcccaaagtgctgggattataggcatgagccactgcacccggcctattataatggttggatttaatacttattgcttatttcataggtatttagcttatttataggtatgcctgtaccattttcgctggatttggagaaaaaaaagtcagtaaccaaaggtagtttagttgtttggaaggcagcttctgaatttcacattccgtacatgttcagaactccaaagaggttttctttccagcttgtgcaactaagattatcatctggattattgatttgtcattccagctttatgaacaaagtctgtttgttgtcatcactaacaagtgcagccgtctttttttttttttaatatactttaagttctagggtacatgtgcacaatgtgcatgcaggtttgttacataggtatatgtgtgccatgttggtttgctgcacccatcaactcgtcatttacattaggtatatctcctaatgctatccctcccccattcccccatccctcaacaggccccagtttgtgatgttccctgccctgtgtccatgtgttctcattgttcaattcccacctatgagtgagaacatgcggtgtttggttttctgtccttgtgatagtttgctgagaatgatggtttccagcttcatccatgtccctgcaaaggacaggaactcatccttttttatggctgcatagtattctgtggtgtatatgtgccacattttcttaatccagtctatcattgatggaccagctgtcttttttttttaaacataaaggcaatagaagtgagaatttgttttgttgacatgagaaaagttttttataagcattgccatttaaaaactataattgccttgaggaagagagaagctccaaatctgtacagcgttgatttatgcagatgcacccagagcggcctcgcagcctctggcattctgcacagccccctgggactctttgtcagaggagctgagtgtgttgttcaaaagccaaacctcatcgtcaagtgatgcccttccctgtcacaggagagagcagaaacatctgcaaatactacgtgtgcaatgtccagtgccctctcaattacccctttctagcttttctttgccccttatcgaacagttggagccctgcttccccaaccgtggagggcaggcatcatgccttcgttaccacaagcccctctggcacctctsgtaaaggagcacttgcaaaggcatttcatatccaagtgataccttttcctagcaggccggcgggtgtacaaagcccaggggcccagcattcctcacacgctgcagtcctcttttccatccctagatttggatgcttgtagacattgtggctggctgaggaaggtaaagaacrtccccagtttttccatactggcgaggcagatttctgtattgaatgacagaaacaatttggaaaggtagaataatgggttgaatctggcaggattaacatttaaagagataagaaagttctgctttaaggtttaaaagtcagatagctacccaaggacaggatagggaaatgtggctgcaaactattatgagtgaggccaggtgtggtggctcacacctgtaatcccagcactttgggaggccgaggcgggtggatctcctgaggttaggagtttgagaccagcctggccaacatggtgaaaccccatctctactaaaaatacaataattagcctggcatgatggcaggttcctgtaatcccagctactcaggaggctgaggctgcagaatcgcttgaacctgggaggcggaggttgcagagagctgagatcatgccactgcactccagcctgggcgatgagtgaaactccatctcaaaaacaaacaaacaaacaaacaaaccaaaacaagtattatgagtgaaaaagatgtcgggatttaatttgcaggccatgtgtttccaagttgatgtggctgaaaaggtaaatgtgatttcaaagagcaaatgtgatctttagctacctcattagagatgtcatgtgatcatcagctacctccttagaaatgctatatctcttgcaaaggagatgacagtgtctcctttctttgccctggtcagagctggttgtttccctccttgtgggcacaatattgcaggagatttgttaggaaatgagaaattgatccttgaaaggttgtcctggaggatccctaaatggggagagagtgaacatgttcccttaaggggtaaacatctgggactgtttgtgaatcatagtctgaagctgcctcctagtcacatgatgtgaatacttagaatggatgcacgttaccccatcatttgtcatgtatctactttttaagtgtgaaatttgtttcttaaaattaattctgtgagratttcttccctgcctgtctatggatttgaaaacccccagtatacatcaccctagtggtgggggttagactgggaggcagggtgactgtgtgtgtatgtgtgtgtgtgtgtgtgwgagagagasagagagagagagagagagagagagagagagrgaatataccactttgagaggctgggccataggtgatgacaaggagatttagagccgtgctagatggaggagggcataaagatctagggatatttagcatggagaaaataagaactgggtgagagtgaacagcagtgtgtagaagagacattgaatttattctgggtctgcagaggttaggatgggactaatagatgggagacaggctgattctaaattaatataaaaaacaacagtgacagccatgggcacgtggaaagatgctccctttttgatttctctgctactgaccacatttgtccagagccaaattgtcgcaggcttcttgagggaaactcaggcagatatcacttaagggctggaagagctgattggcagcttcctgtattttatcccaaaaggtagaccaggaacttctggctaccaacttcaggggtagtgatgggcctgagttgtcactgagcattgctagatttgtagtcttggctaggtcctgctttcctggtgtttgcttgtaaaacacttcaagatccatggataaagggtgctttgtagtataaatgttatcaagcacacatttcttcctttcctttgcagccaaggcaagacttgtgataaagatgtttttttccccagcgtaaccttttccatgtggctttctacacctctttccgctgggaattcagtatgttgagttctaatttcttggcttagaatccaagttgtaatgtttggacttaactgtttggtttaatcttagttaaaaacacatatatgtgtacacacacacacacacacacacactcttaagcctaatttttaaattatccttaaagtatccatgtaaataaatgggagacagttttctggagagagccgttattaacaaaccatctggttatctgcctacctggaatgtataggtatatgagggacgtacatgtttttcaaggctttggaggatgtaataaattttcaacaagggtaattctgctttccatttgtcttttccagtgagtggattttcatgcagttcactggggacttcctgggctgaagagttggcaaggtcattaaacatatccctcaaaatgtgcaacagactgagtgatagtcagtgtcaggggaggagttcataaactaattttagaatactggtgattctgccctgagatgggccagcagcagggatgggagatcaaaagggtctcatagaaaaggtggatttgagggaaaaccaagactaattgccctctttcccctgggtgagatttctactaatattacgtctctattcttgtactgccattgctatgccaatctgttttctctttctgctaccatagcaagaacgtccagtgtcaacgacccctccaagccaagaccagcgcttggtagggactggacagggctgggggcccccagcaccggggtgaacggcaaggcagggctggtggcccccagcatcggggtgaacggcaaaggcagggttgggggcccccagcaccggggtgaatggcagaggcttcactgacacrggtgcagcccgtttccactggccccagtgcacccttagagatgcagagtcccgtgaagttgaacttgatgtcatagagttaagattgatttcctgatttttwaaatttgatagccrcaaaattctgcctattgttttacttcctggcctggctctaatgtgaaatgtcctgttttgatttcatgcctccaagttagagcggtagtctgttgtccatgggttgttaggtttggtgacattttggcattggcccaaggtttgcattcatttcctctagatgccacgatttaaaccatggctgttggaattccagtgttagggaagctgggaagtgaacgtgaacccattggaaagaatttggacgtgtgtgcagctggagctgctctgcccctttgccctggtcctcgggccccgggtcatggcttgtagcatgtgcaacagtagcatcagatgggccttactcgatgagaagacttggtttatagtttaactgctgcatcagtggctggaaaaagatactggccaggcctgcaagaagcagctctggctgtaaacctcttgctactttcccttgtttgtaatacttgagttctgtcagcctgttagtttggatgagttttatttgcggggaggagcaaatgcgcagtttcttgagatcataaagtaccatggagggagaaagtactgcttccgaagtccaagcttggagcaggcatctttctctcttggcttctatgtgctgttatcggttctattgtataaacttgtttgttcatatcaakacttatttttaaaggaagtaatgaaattggaaagactgaaatagttttcaaaacgtctgaacttttatgaatgaggatgcaaacacagtagtaggataaagtaccgtgaagtgggccccaggcatttgtttacagtgaaggcaggctggtgtttctttcctgtcaatgtgaaaggcacttgcgaagcacccagatggtggtcatgtcattgttattcgtatgctggaggttgccacatgagaagtggtcaaaaaagtttattggatacagatttgaggggatagttaacctatacaagaggacacatttgtgagcattttagaagcattagtttgcttaaaaattgtgtctaataattataatgcaatttctaattaatgaagcaaactcttaataacttctacctgcaatactttatttgcttatgaggggaagagtaagtacttaaaagcatatgttgcagtatttttagagtaacgtttgaaaattcaggcacwtttagtttcacttttctcccttagtctaagtaatgttttctattagtttcacttttctcccttagcctaagtaatgttttctattactgtgagataaaaggaaatactaaaaattaagttattttacatggcatttggagaacaaaccgggtactttctcataaatggcaaagtcccctaggtatgttcagtttcttgttcccattgatggtcaacggagtgagtgagtgtgggattttctgtggcctcttacattgagattccctaaataatgtggtgttgtgcttaaggatgagggctttggggccagagggcctgagttcacatccctgctgctccacagtgcagcggtgggacccctgcaaggaattcgatctctcagttttctcatttttagtgtgaaaggaaaataaaacctggggaccccaattcctgatgccagaaggaaaaaaaaaacaagccgaaagctgagtcatgcaagaagctgcctttccttttctttctaagcaggagctacagataaaaggttaaatatccccacaggtagctagctactctgtgttcaccttatcttatgtaaagtgctggatgattacgtgattgacagttcccctgcctgctccttttcccttgcagcaggtggattaccatgctctccctcgttcctctccagcccacttttaatttttaaacactgaagccctcaacatcgtctttggagaaaagcacagaccacagactatttctgtgattctgtgttctcttcctccgggcatgtccayaactttggcaaaataaacttctcaatggatcgagaccagtcctagatactttttgggtcacagtagaatgggctaaataaccctgcccaccttagggcctctatggggattaaataagccagtgcatgtggagtacttagaagagttaagcaacaacttattatttggtattgttattactgatattacatttacaaagacatctcattttcattcaagttcattctgatacaactaggtgtacttcagatgccacttttccttgtttaccatgtttctgtcacatgattgtctcactcaggtgtttttaaaaaagtgtgtcacttaccctcccagtcctttcctgcatctccaggtctgaccgggatgttattttgcttctctgtttcacaggatgcacgctgctgttttatgagacctatgggaagaattccatggatcagagcagtgcccctcggtgtgctctgtttgcagaagacagcatagtgcagtctgttccagagcatcccaagaaagaaaatgtgttctgcctcagcaactcctttggagatgtctaccttttccaggtactgctggtactttgtaagtggaggtaatagcttatgtactgctagaataagaaggaacagaaaaggcaaaacttggaaatgaaattgaataaatacttagttaggctttggatttggccttaagcaacagatgttggcttccgctgactgccaagggcactgggccatcagcaatccagtcattcatccagagggcacttttcaggtgcctctgaagtcccaggctgtggcccatgagatgctcattgggacacaaagagaaaaaaatcaygatccctgtcctggagtagctggcgatctagtgagcgcaatggtcaagattcccagatttggggcttttaaaatgaagcttggagaatattgatgggagaggcttgggttcttgccacggatctcagtggatgtcaaaagttttcaggaaaaccctcatagacaaatgctatgaggtctcatttccctgtggaagtggtcttaggatcttaagattcaggttatctactgttagaattttcagtgactttttagccagtgagatgttgtagaacatggcggtactgagccatcggtattggggtcgggcttaggtttgaatcctggcacctttgttagcgttgagtttgtaagtgatcttggagcrcgtaccagacttctctgagctttgggcccttcaaccagtaggataatagtggcttacatgattgccgtaagagtaaatgacatcgtgtgtgtgttaaatgcttaataaattttaacttggtgattaatattaattcagaacaggtgagagtgagagctgggaagtgaagtgtgcttcttaaatgtcccccatctaaacccagcacttgacatacacacagtgttggccgtaggttacatctgactggaagtttcatggaaagcctcgtaaagcttgggtttagatctctcataaggatggtcctgggtgccctcagaagccctgcagagcaacagtgttctctaggctgactttgggagtctagaatgctcagaagtgctccctcacttacccagtgctgggttaagctccctgggcctttaattgtactgccattcccaacctgacttaacttactagagccagggcctgagatttgattttccttttcttaacagaaaggttgcttaaaaccttctatgatactttaaagcaaagtaatgaatttatgttagtctgaattgtaaggaaggtaaaaaaacaaacaacaacaacaaaaagttacattaaatctgcatggatttcttagggtcaagtgtgaaatgaatgttttattttgtgattcaggtaaaacatccttagttwtgagagttttcccgcctgtgatcccagcactttggaggctgaggcaggaggatggcttgtggcgaggagtttgaaatcagcttggtcagcatagcraggccccatctctacgaaagaacaataaaaaaattagccaggcatggtggtgcgcacctgtggtcccagctacttgggaggctgaggcttgaggatcatttgagctcaggaggtcaaggttacaatgagctatgattgtgccactgcactccagcccaggcgacagagtgagaccctgtcttagcaacaacaacaacagaattttcccaggtgttctgttttgtgatcccagaggccacttgaggtttgaccctgtgactcgaatgtgtgtggttatttctagacatcaagagaaatgaaagtacttgtcagcctgcttagaatcatacccatttgcccactttattcaaactttgcttattgtttttaaaatatttttcttttaaaaaatgtatcattattattattattatttgagatggagtcttgctctgttgcccaggctggagtacagtggtgtgatctcagctcactgcaacctctgcctccccggttcaagcaattcttgaattcctccctcagcttcctaagtagctgggattacaggtgcccgccgctatgcctggctaattttttttttttttttttttttgtatttttagtagaaactgtgtttcacyatgttggccaggctggtttcgaactcctgacctcaagtgacctgctcgccttggccttccaaagagtgctaggattataggcgtgagccaccacgcctgtcctattattattttttaattgacatggggacttactgtgttccccaggctggtcttgaactcctggactcaaaagtcctgggattacaggcatgagccactgtgcccagccaaaaataaactatttttcttttatacaaatagtatgtggtctttgtgttagaagtcactgaaaaatagagaaaggaaaaaccttgatatattcaaagacaatagcattattttgyttccccccaatatacttttatttacattgttcttttttttttttttgtattgaggccatactgtagatgtaattttatatccaggtttcaaaatttcatattctagtcctaatgtttactcattctgttaaaattccgaagacaagtrtccttttatttatttatttatttatttatttttgagatkgagtcttgccctgtcacccaggctggcgtgcagtggcacgatctcagctcactgcaacctccgccccctgggctcaagtgattctcctgtctcagcttcccgagtaggtgggatttcaggcatgcaccaccacacccggctaatttttgtgttttatttatttatttatttttgagacagagtctcactctgttacccaggctggagtgcagtagcgtgatcttggctgactgcaacctccgcctcccaggtcaaagtgattctcatgtctcagcctcccaagtagctgggcttacaggcatgcgccaccacgcccggctaatttttgtattttagtagagatgtggtttcaccatattggccaggctggtctcgaactcctgacctcaggtgatccacctgcttcagcctcccaaagtgctgggattacaggcgtgagccaccgtgcctggccaagcatccttttagagagtggcgtaatgtatcatgagtgtgtctcccctgttgttcttatcactcctgtgttgttggctagcactcgtttctggttttagttcctgtcctagtcagagctccatgatgctttctgctctgctcctaatgttctctgagtccctctgaacctgagttgaatggttgaatgtgtttttgaaattaagcagcttgtatgcagtgcaagtacttcttgggttttgtacatctaagcccagcctgccattttggagagcactttagtggtaaaatgattcgaaacaggctttctccctccctgtgtgtaggccaccagccagacagatctagaaaactgggtcactgctgtacactctgcttgtgcatccctttttgcaaagaagcatgggaaagaggacacsctgcggctgctgaagaaccagaccaaaaacctgcttcagaagatagacatggacagcaagatgaagaagatggcagagctgcagctgtccgtggtgagcgacccaaagaacaggaaagccatagagaaccaggtactgtttgtctacacctgagttttcttccattgctcatgtcacttgtgcagtgactgaacgcatgctgtcatcttggtggtatttcttggctcacatcttggtggtatttcttacaccctgggggaaataatttstgtggtttttcattttaggtacctaatgtttgccattttgtgacatgggtgatatgatatgctttatgacctttggcggctctatgtatatactgaaatattttgtgacccaaacttaattcctaatttgaatagtgccttctggccttgatgattcactcatatattgtcattttctgaacaaaatccatacaataaaaccactagaagattagacaggtaagattctaatacaatagctttggaaaacgtggyttggtgtaacagctgtttctgtgtctatggattgcaaaaaaacagtaatttttctgrttataacagagaagcacgtaacgaaatgctttcttttctctgctgcggttccatattcatataataaatggctgcttcctatggcatttgcattttagagaagggaaaacagtttgaaaatttttatttccctttgctcagacaacctaaacacttagacaagtgttagtggaatttcgagcatccctatcttagtcaggtttcctaggagacagactttgatagtgatttagatgtaaaaagttttactgggaatgctctcagggacaacgscagcctggagtgagggagcaggatctgggagggacaagttgcattgtgatgcagcttgtcccacagcgagctgtggagctgggagggccattcagagytctgcatggaggcagggtggccggccttcgtmccctcaggccagcagggcaaggcagctcccctcaatagaggtgagttaccacgaggggatctgtgtgtgagctgggaaaaggaaagcaatgcctctgtcttgaagggggaatccgggtgattcactatagaatccactacagccccctccaaaaccagttgtcaaatgacctgggaacttgaatgaggaatgggatgaagatagatagtgagcaggttcttgcatttttcttcctttagttacttgttaagttattacagagaaaccagtttctttaggaaaaaaaatttcatggtaacacaacaatttagacatagtgtgacttattagaaaggaattttacatgtggtgttttatttaaattgcaaattaaataatacctctgtttatgtctgaatgtttaaccttgtttggaagttttttcatctgtgtatatatgaagaattcagcatgaggctgggcatggtggctgacgcctataatcccggcgctttgggaggccgaggtgggcagatcacctgaggtcaggagtttgagaccagcctggccaacgtggtgaaaccccatctctactaaaaatacaaaaattatctgggcayggtggtgggcgcctgtaattccagctactctggaagctgaggcaggagaatcgcttgaacctgggaggcagaggttgcagtgaaccaagattgtgcactgcactctagcctgggggaagagtgagactctgtataaaaaaaaaaaaagaattcagcatgagtaggaaaaaatttctgtctaaaaataggaaactgattaaaggcatgcattcaatgatacaccgagaatttggaataatgtatcaattggcaatagcaaaataaccaaataattccgacctctgcccctcattaatcttctcactctatctacctttgcttctccttttctcatatctcatgttgcctttctcccatctcagctctttccctcctgcttattttcccatctgcaaatactggtgtacctaatagatgcacctggcttaaagaaataaaaataattgtaaaatatggaccccgtttctaagaaattataatttagttagagagcaagccttatgaacatgaaactaaaggtcattctaaaatgatygaagttaggtgacarctggtatagtcatcaaatattatgggagatcagagggttgaggttgtactgtgatcttgaggaaatgaagacttcctggaagaatatggtgttaaaaagttgttaagaggtgtgaaggatttccaggctggaagggtgttgggcgagcatggagagacaattggaagtgactgagtggtggcttggggctctggagcacactggagtcaaaggtttgggaagtgacaagagttggcagttaggttggataggcaatgaagctttttcagtctgtgtcttagtctggaacaaaatactgtaaagcgggtggcttataaacaagagcaatttatttctcagagttctgaaggctgagaagtccaagatcaagatgccggcagattcagtgtctggtgaggccctgctttctggtttctagaagcatcttcttaactgtattctagcatgacatgaggrgcgagggatctttccgggccgcgttttataaggccatccatcctattcacgagggctcaccattatgactgtcgtgcgcagtggattaagcagtgaaggatgaaagacaccgtaacttaatgcttgaatcacacagtttgttggcacgcaaacagttcttaacagatattggtattttatccccattcacgctacacacaactcttgtttttcaccctgttaggaacaagtcggggatcttacatgaataggcacaggattggtcacagaagtcctcaggcatctgggaatagcttcccctggtatcaaggctggaatgttgaggctgaagcattcagtcaaggagatggcaagcctgactccgggtccctttctgagtggcagcatctcatcctcacgagtctgtgtctcagcagagcaggtcgagctgcctgagggcttctctttttatagtccctgtttggggatccacctgtgtctggttatcttgaaggttggtgcgccctagcatgtgatgtcgtcycaaattggaatatcccaatgcagttggtctaaacagatttgggcattctggcagacatctgcacttacaaactaactgtgataacatattyacactayacccataaattgcactccaaacaatgacctaatcatkgccccttttaaaaaggccccacttcctaataccatcacctaaagcattaagatttcaacgtacatatttcggagggacacattcagcccatagtggtcttgtatgcaaggctcagatggtaaggtttattttatactctgctttcaggtggggggatacaggtttttaagctgaggacaaagcatgatgactgtagtgtctttggaagattaatcaggcagcagcttggaggacagagtggggcaaaaggtgtcaggcagtggagtggcactgtgctgggtgtatagatacaagggcctggtcccaagtgacacaagttcaacagtttacatggaaaatgtataacagggtrcataattttctgtaattytatagaatcttttttttttctttttttttcttttttttttttgagacagagttttgctcttgatgcccaggctggattgcaatggtgtgatcttggctcatcttaacctccacctcccaggttcaagcgattcccatgcstcagcctcctgagtagctgggattacaggcgcccrccaccacgcccggctaattttgtatttttaatagagacggggtttcaccatgttggtcaggctggtctcgaactctgaccttaggtgatcygcttgcctcagcctcccaaagtgctgggattacaggtgtaagccaccacgsctaatctcaattttttagaatcttaaagacagtaacttacacccctgagcggaactgttgctcaaccaggatatgccatttaaactccaaagtacaaaatagttttaacgaggaagccaaaactgccaagaagaatgcaggaggtggaaggctttgggatccracaagaacacagctgctgacattgctgagggagagctgcccccacgagcccagcttgcctcctctcaggccctgcctgcccctcttaaggggcctcaccctgctcacagccagggggygttcagctcccgaggcagtgcagccgtacctccccgctctctgtctgtgtggaatgtaggttgggagtccatgtggaggtgatgggacagatcaaagagcctgaaggagacacggttatcccagagttttctttgtaccatgtctcatccatggtgctgattttccaggatccrgcagccacagcctgtctatcctgagatgagacttgtggatccgagtgtctcagagtgttcagagcaccccagtcaaaaatctcatcctgaccataatcgtagtsgaagggatgcccagcttggagttttcaggtctttgggtagggtcagatgtttagggctagggagagaaaagggacatttggcaacactgagaggctcctggcctgttgtgtgtgtgtggtggtggtgggtgggggtttctctgtggccacaaggagtctaagcagacatttttttaaaaatttaaatttgcattaaatgtaattgtattcccttgtccatagtttgtaaatgtttaattgatgacatcatagttggtgctattctctgattaagaggggaggttacttgaacataaacccttacataaatccaggggtctggatggtcaggtggcctgaagagaaactgttttaaagaatgagggtaattatcacttgtggtccattatccattctttgacagaatcatcactttagttattttaagtgcacctttctaatgctactaatttttcatttttggttctcccctccccatagcccaggccctaaccccttcctgtgtcctccccacactcccttctcccctacacccttctcccaacccctgccgtacatgyactccctttctcatgttagtcttgtgagtttctggtaacagacaattgggattgattttagaaattcttgtccaggcacggtgactcacacctgtaatcccagtactttgggaggctgaggctggaggttcatttgaggccaggagctcaagatcaggtggggcaacacagcaagaccctatttctgaaaaagaaaaaaaaaagaaattctacctggaagtattctcctcaccgtattgcactctttgaggttatgatttagtcacatgttcctgaagggctttgtagtgtgtagcctgagttatgtttgctgtgcccgctgtccttgcatcctttgtcagcaggttgtaaaggagctgtttacgcttttttttttttttttttttgacagagtcttgctctgtcacccaggctggagggtagtggcgcaatctcagctcactgcaacctccacctgctggattcaagcaattctcctgcctcaacctcccgagtagctgggattacaggcacccaccactacgcccagctaatttttgtatttttagtagagatggggtttcaccatgttgaccaggctgttctcaaactcctgacctcaggtgatctgcctgcctcgacctcccaaactggtgggattacaggcgtgaaaccactatacctggccaagagctgtttactttttaccttcagacacaaagactgggaagcattaagcaggaacaagtacttgcttaaaattgcttttatgagatatttgacaaaaaaatgtaatgtgaagccacaaaggcaaaggtatttacagatcaagaccaatcaggacagggtctccaaaatattccctaagcatttagctttctctaaacttccttttaaaaatatctgtaaaagagcagtgctttatccacttagcattttaaaacctcaataaatatacatttatttatgtagcttcctccccagcggttttccctgaaaacctcagatgtagtcatttctagcctaaaaatagaatgtgcaatgtaggtgacatcatgcaacagaaattctctggaacaggttttcttcgaagtacgtgggtggagaagatcctttttgaaataaaaaggcactatcgcagttgtaacataccggctgagctacatacggtcagtggtgacatgctctggccgtgtcctgggcctcttgggtgtttctggggcaggatgatgcagctttcatttgagcatgtccaatgtggaccagatcacaccgccatccacacgccagatcgcctttgaagttcccagggaggaagagttgtaaattaagtccagttagtactttatttgcctttctgcttattatttcaaacaagtaaacaaggacaaaacctcaccacccttaggcagtcttggcattctcccagatggcatcccccatcctgcctcattatgtgcgatttccagggtagacaggcctgcttctgtggttaattaggctggggagggaggaggtggttggactaccaggggttgctgtggggaaggaggaagcacttgctggtagggttcagactgctctgggttttatgaaatgtgggcttcagtttaaatatttacttaaatacagttttaaaatcataaagaggacggattgcgtttggacaattggcaactggtgaagagaacaatgagaacaaggctttgaggaaaatacgaggatactrtggtgtatttctggatgtgtacagggggaagcagtttgaggaacaaaccactggagtgtagcatatttgtgaggggatttgagggagataaagtcagattgtggaggtggtgggtgaagatgtgaactttattcaataggcaatagggagatggtgaaagtgttattttttattttttattttttaaggcaggcaatagggagatggtgaaagtgttattttttattttttaaggcagagtcttgctgtgttgcccaggctggagtgcagtggcatggtcttggctcactgcaacctctgcctcctgagttcaagtgattctcgtccctcagcctcccaggcagctgcgattacaggcatgtgccactacgtcctggtaatttttgtattttagtagagatgggattggccatgctggtctcaaactcctgacctcaactgatccgcctgcctcagcctcccaaagtgctgggattacaggtgtgagccaatgtgcccagctggaagtgtttttattttctatttttttgaaacggagtctttctctgtcgcccaggctggaatgcagtggtgtgatctcggctcactgtagcctctgcctccagggttccagtgattctcctgccttagcctcctgggtagctgggatyacaggcgtacgccaccacacccggcaaatttttgtattttttgtagagacggggttttgccatgttggccaggctggtctcgaactcctgacttcaggcaatctgcccgccttggcctcccaaagtgttgggattacaggcatgagccaccgctcccagcctggaaatgtttttgttaggagaataagaatgtttggtttagttmaatgagcgtttgttcggtgcatactctgggtcaggcaaatgtgcacagactggagactcaaagaagtcactgtctctgccctcagtgacagtggcactgctagagagagtgctagagccttcagtgacagtggcacctgctagagagaggtgacagacagttgagctctcagtctagcaggtgacagacagttgagcatacaatttcaacataacacagtgattcagtgcacgtggcattccagtgctgtggaagacagaaatgggaaatatagcctcatgtgcagtcatggaagaccctggaggagggaggccaagttgcttcttgaaaaatgaggagtttaccgggagaatagagaggggtcttccaggccaaggcacagtgggagcaaatgcagtgtggttttaggtaggtggtgagaggtagacaggggaagtaggactgtctgtcactctctcctcccggtaccactgcagaagcctccggtttcgcccttcgtctgatgcatcttccatacaacagccagactgggttgcatcggaaaagcacatctgggtcaggtgcagtggctcatgcctgtaatcccagcattttgggaggccaaggtgggcggatcacttgaggtcaggagttcaagactagcctggccaatgtggtgaaaccccgtctctactaaaaatacaaaaagaattagccaggtgtcgtggcgcatacctgtaatcccagctactcgggaggctgaggcaggagaatcgcttgaacccaggaagcagaggtttccatgagctgagatcacaccattgcactccagcctgggcaacagagtgatatgtctcaaaataaataaataaataaataaagtaaaaaaataaaaagcacatgtgatcctgtgattgccagataaagtccctgataacctctccccaccttgacctttatctgcaactccctgagcccacccttctgctcctttctttgggtttttcctcaggcagagaggactcctgtgctgtgcacaaatgtgccctgctcccctccgccctcttcatctggctcaccccttctcgactgtcatgaagggtttaggggtcgcttcctccaaggcgctgtccttgatcgcccttttgcccactccatcagggagccccactctcctcccacagttctccatgtctgtgccactgctgtcatccrtggctttgtcatgatttcttcgtgtgtaaggttgctcctgctataaaatacgtgctcctggaggaaccgtgtctgttttttwatctctgaaccctcgatgccttgcttgagttagtgaatgtgtggaagcacctctgtctcgtctgtccagggatgctgtcctctgtactgcaggaaacagagwtcttctctgagtcagccaccaccccacttcccagtgttccaggccttcctgcttcacccccgtctaacagaacgcctccttttgccctgccttgttctcatgctccccttccttgttttatcagagcctctgccttaggccactatcatatgtgatttcacaataactctgcaaggtaaagatgtagatatagcacccgtttgttggatgagtaaatagacccttaggagaagtatatttcttttctttttctttcttttttttttttagaattaaaaatttttttaaaaaatagagacgaggtctcgctatgttgcccaggttggtctcgaactcctgggtgcaagcgatcctcctgtctcggcctctcaaagtgctgggattataggagtgagccactgcacccagacgagaagtacattttccgtataagtaccgtgcactaactgattgcgccactggagcaccaagaagtgcatttgctaatgtcacacagctggtaagtggtagagctgggatttggacacaaatctttgctcctaattcataggcgctactgctccgtaagacttgggtaaatcagatggtgctttgcttgctaactaaaccaggtgatgaattgttttgtgtggaatagaatccttgatttacttgtttttataacttggatttttcaggtcgatttgatgggaattacattgattataaaactgagtgaatttttgggtatgggaattatatctcaaaggaaaacagaacaaaaccgaatctctctactttagctggttgttctaaatactgttaaacttgagtgtcatctatgtcactagctggttcttctgtgaagataggttttagtatttggaaagcatggaacgggagtttttcagcttcttacaccaagaaagaaacatgaattatcttatgggacaaacctagtaataggcaaatgactactgcgattaaatgactaaatggcagaaaatatttttctaggactgctgggtgtggcaggaatgtacttgtcatcttttaaaaaaaaatcattattcatttgttatttttagcattaggcttcatccctctccctcccactttactacaggagaccataacctttctgagttcattaaatcagtaaagctgtgttagcaataaagaggaaaattttgcattgaatttgtgccaatgtttaaaaatgggagtgttcccctgtaattttgttattagtaacttcctttcacartgaaagataatgaaaaccttctcagagtgagtttttttcagtcttgtcttttttatgttttgagcatgggcattaaaagaaacaaaagctcaatctatatagaagttatgttttttacttttttttttttgacagggtctcactctgttgcccaggctggagtgtgcagtggccctgtctcggctcactgcagccwcaacctcctgggctcaagctatcctcccacctctgcctcccacatagatggggctacaggtgtgcaccaaccacacctggctgmgttttgtgtttttttatagagacggggtttcaccacgttgaccaggctgcaagtgtttttttttttctttttatatcatatcttgatgtttatctttaaataataaggaaacatctagaaacttatcagtatttaaagaatttaggaaaagggggtgggatgtcttggattaaaaggaactgattttaggcattstagtttttgatgttagaaaaaaatatctccagaaacaccttgataaatgtggtcaggtaatacattactattttggtgattattatcattgaactgtactgaatctctaaactaacatacataatagctaaaagattgtctttttttcctttaccctttaaaatatgtatcttygtctttcttttatgtcaccttctgaagaattgttataaaatgtttttctttcaagttaacattactttaaatttgggctggctttgaatgtcaaggctggtaggatattgaaatgtaaagtgttcaatatgaatagggccactgagtgagagtgtggtagtcttacctccttctctgtagaatacctgggggtatatgggcagacataaagtggrcaggtaaaaatgtaaatgaaagttgctaaggtcactatgaggatagtgcacaggtatcttcctatgagtcagaagacctgggaatcaggggccccgttatagctacttgagagggtccctgtcccctacatgttgttcacatcagaatcggctttgggtctgctagtctggtagggtgagctttttacatgactggtcaaattgcttctcttctggacttaagtctcaactgctgagaaatgaaggtatggtaataccaagtcccttgcaatttcattgtgaatgttaacagcctttctaaatactataaggtctgttgtgagcctttgggtccagcacttgtacctcttcttccctctaaggaaccygagcttctgaatcaggggcctcaccgtacttttacttgaatactctttcaagttcctctctacaactttgctgagtctgtggaaagaaaagtcaaatatttcatattgattatttaaccacagatcttcatttaagctctggaactgattctttctataaagaaccatgaccttaaaaataagatgactatgatctttcaatatggaatagataygtgagtaaagatggcttactctgccacaaagatctatagggatgaaggctgtatataagtcaggggtctccagagaaacagaaacagtaggatgtgtgtatacctgaagaggtgtgtgtgtatgtgtttgtgtagggagagaatgagagaaatttattataagaaataggctcatgcagttatggagaagagcaagtcccaagatctgcagggtaagtcagtaagctggagacctgggagagacaatggtatagttccagtctgagtctaaggcatgagaatgaagacagctgayggtgtagttctaggctgaagactggtaggctcaagattgaggaagagcccatgttttgttcaagtccaaagccaagggggaaaaaaagccagtgtcccagtttgaaggctgtcaggcaggaggagttctctcttacttgagggggtgtcagcctttttgtcctcttcaggtggtcaacagattggatgaggcccacccacattagggaaggcaatcsgcattactcagtctacccatttaaatgttaatatctcccagaacatccttggagacacacccagaataatgtttgactaaatacctggtcaccccgtggcccaatcaagttggtacataatattaaccattacgcgggtggatcgctttgaactcaggagtttgagaccagcctgggcaacatagtaaaaccctgtctctacaaaaaaaatgcaaaaattagccaagcatggtggcatgcacttgtggtcttgagaggctgagttgggaggatcacttgagcgcaggaagcagaggttgcagtgagccaacaatgtaccactgcatccccagctggggtatcagagtgagaccatgtctcaaaacaaaaacaaaaacaaacaaacaaacaaaaaatcactccagtcaggataaggttaagaaggataaggaacattgttgaaatagagaagtcataaggttacttttcctttgcattttctactaaattaaattttaaatgaactttacagtgtacagtttattgagatactggttgtcttgaaacttaataagatayaatcaagacaacaaacgtcttgatttttataaggtctcctttgggctattggggtgtcccagccctgttgactttccaacaaacctaagcatctgggtccatgttctccctctgaattcacctgtattttgtcccaagatttgggtggagaggtctatgagtgctgaagattattaaagtgtttctgataaaactttatgattccctgtgtatccctgtgtgctcattcccgatctgagccggggtatcgggtctcactctgataaccccagctggggatgcagtggcacattgttggctcactgcaacctctgcttcctgtgctcaagtgatcctcccaactcagcctctcaagaccacaagtgcatgccaccatgcttggctaatttttgcatttttttgtagagacagggtttcaccatgttgcccaggctggtctcaaactgtctttacctctcagtactgctttgatgtgtagtcacataagtacattaaatagtgctgttaaaaatacttttaaaactrcaggattcagtgcaaatacaagagattgtcttcttccccaacctgtggtgattggcatagacctgaattttattttattttgtctttttttttttttttctgagatggagtctcactctgttgcccaggctggagtgcagtggtgcgatctcagctcactgcagcctccacctccggggttcaagcarttctcctgcctcagcttcctgagtagctgggattacaggcgtgtgccaccacacctggctaatgttttttttyttttgtatttttagtagagatggggtttcaccatgttggtcaggctggtcttgaactcctgacctccaatgatctgcccgcatcggcctcccgaagtgctgggattacagacgtgagccatcactccyrgccttttttgtctttttaatccaccatggattgcatgggcatctttaccttctggtatccagtgactcattcattttctttttctttcctttttttctttttggagacagtctcgctctgtcacccaggctggactgcaatggcgtgatctcaattcactgcagcctccacctcttgggttcaagagatcctcccacctcagcctctcaagtagctgggactacaggcatgcaccaccatgcctggctaatttctgtattttttgtagagacaggatttcgccatgttgcccaggctggtctcaaactcctgggctcaagcagtctgcccacctcggcctctccaagtgctgggattacaggcatgagccactgtgccttgccgactcattcattttctttcctcttatatcttcaccctccatacaaccttcagaaaatatctgataaactgttttacagtgaggcataaatgagtgtgataaactttaatgcattatccaatctagaaatatctacatattattagaagacaaaggaatccatctataattgtggactttcaggaatcatctggagagaagatgtttgggaaacagaactgagatgatagtttttactgaaccttaagtaaggtgtcagtttgtgcccatccatcactctgaaatctggaattctctaatatggcaggaccaggaagagacttgcagtttcaatttgaactgtcttgttagcgtagaacaggagtcatcagtaataaggccatgcaccagaatcccagaaggtgctcatgaaatgtaaactttcctaggcctcagacctaatggataaaatcttcaggcrtaggacctgggcatctgcatttttaaaagccaacaggtcattctgtccattcaaggctgataccagtaggccaccacgttgctaataggggtatacaggatcttgagtgaggttaaattctttatggatgttgacattgtttcaatgcaccttggaaygtcactgttttgctgacaaatgatgatgattaagaaattctttgtttagatcttgtgactgtttttctttcatgcagaaaagttgtgcagcgaccaacctaagaaatagctacagagaacttggaaaaggtctggggaatgcccagaatttgtaatacttgtctatggggagagactggagggggcagagtgtccagtgttggaaatccttcaaagtattatttatccagaatgaaggattcacctagaaagcttggtgtgaaaggctaggatctgtcygggtgctcagcaacatggcagaactagagatgcaactggtgcacctgaaataacctaactcttcacrctgcatccttgattacaagcgttcacttacagaccttctcttgagtgttgagattgcgctcaacagcttttgaatcacagctttctgttcttctcgttcttctgctgagtccctgtgttggyaagtcacaagagcctctcttcacctattattaataacttatctttgcatgaaggtaatacttgtaggtaatgcattttatatctttgggagaaaggagagtggctcccagagtttggctgcatttctttaccaactcatgacttaagttttgaagaagttcatagtaacttctgtggtgtaaacagctgcatatactttaattttatttagatgtacagatggcagttattctccaagatacttacttaggagtatwctcagtaaaattctatttgtccttatccctgaagtccatttgcttcttattgttttgagtcatttactcagaatgaacagaaacataaagtcattgcttttatttatctggcatctgtttgtgtgcagttcagttaatccagtttaggatcagggactgtaaatgtgaagggaaawgaagcaaagtgaaaaagctgacttgcaaattgcatcctgttttaagtcaggatggtttagagtgttggcattctccaaacaaacatcatgcctttttggcatgtcactgtattgggaccaccagctttttgtttttgtttttgtttggctatcctgatgaaatgaagtgctggatgacccagtgcattttgtttttttttttgagacggagtcttgcttggttgcccaggctggagtgcagtggcatgatcttggctcactgcaacctccgccttctaggtttaatccattctcctgcctcagcctccagagtagctgagattacaggtgcctggcaccacaccagctaatttttgtgttttttttttttcttttttttagtagagatggagtttcactgtgttggtcaggctggtctcaaatgcctgaccttcagtgatctgcctgcctcgctttccaaaggacccaatgcattttgatgggagggattgagatggggtgagcaggaaaggctaatttaaaccatgcagaccagccgaaactaattttttcttcaagtttgtgaaagggatcacattttcgttttaacctgtgaaaacttttaatttttatttaaatcacctctrtttttgctttaagatccarcaatgggagcagaatcttgagaaatttcacatggatctgttcaggatgcgctgctatctggccagcctacaaggtggggagttaccgaacccaaagagtctccttgcagccgccagccgcccctccaagctggccctcggcaggctgggcatcttgtctgtttcctctttccatgctctggtaagttcctgaggaaggctgtttctgcagcattcggggagggctgcggatgctccccctttcttcagctygttgccatcggcacttgtggggcttgacccaacaactgacacctagaggccaggtcacccagaggccaggggcctggagatgaaggagaccagacgtcgtgctgtagascccccggtttctctactgcttattctagagtccagcagctagtggacagttactgcatgctcatctctgcctttctgtgtattccaccatcaggaaagtgggatcctggagaaggggcaacagtggtgtgaagattaaaggatggattaaaggttgttttctctgtcctgcagagcgccccatcaggttttttgaagtcgtwcccattttggtggcttctgtgtgttgtgttggctcagcctaggggtctgtagtggttttgctgacrctgctgcccaccatggagagagctgactgtcatgacttgtgttatccagatgagagtggtctatatgatggatgctttcctggtatttcagacatgcaggagcttttggcgatagtcagaatgcatttatagcaagcagagctcacttccttcattttttctgccactcaaatactaagcctttagattttttttaaactgtgttttacmttaggtatgttctagagatgactctgctctccggaaaaggacactgtcactgacccagcgagggagaaacaagaagggaatattttcttcgttaaaagggctggacacactggccagaaaaggcaargagaagagaccttctrtaactcaggtgagcttttcagcatgggaacagcagactagagtgaaattcctgaaacccctaattttcggcctgctatgaatcatcaatgttcattctctgttaagaatgaaatgaggcgaggtggggtrgctcacgcctgtaattctagcacactgggagggcaaggcaggagggccacctgagcccaggacttcaagaccagcctgggcaacagagtgagaccccatctctacaaatagccgagtgtggtggtgtgcgcctatagtcccagctactcgggaagctgaattgggaagatcgcttgagcccgggaggttgaagctgcagtgagccatgattttgccactgtactccagcctgagtgacagagcgagaccccgtctcaaaaataaaaatgaaaataaaagttgattcaaaggaatcaactcttagcatgcacttttttttttaacccaacgaaactgcacaagttgccgtatctatcccggcacccctgaagaggtagtcacactgcgtgcagtgcttaagaacagaaaaaataagaataatcagaaaataatccacacttttccttccctctagtactaatatttactttctcatagattttatattaaaataaatggaaaattaataatcagaggagtggcagctcagttctgttgatagagctgtggattttgctcactaaatccttagaacatggccttggggttttgtcatcccattttagagacgagcagactgacacttgaagaggttacgtcacttaccttatcctgttcaccagcaccaaagggcagggccaggactagtttctgcctaagtccacggtcttgaaacactggaaaattgctagtgcttattttcccttggggaaaggtgactcttgcaacactttctttttcttttcttctcttttttttttttctttttttgagatggagtcttgctctgtcacccaggctggaatgtagtggtgtgatcttggctcgccgcaacctctgcctcctgggttcaagtgattatcctgcctcagcctcctgagtagctgggactataggtgcacaccaccatgcctggctaatttgtgtatttttagtagagacagggtttcacctgttggccaggctggttgtgaactcctgacctcaggtgatccacccacctgggcctcccagagtgctgattacaggcgtgagccaccgtgcctggcctcttctaacatttttattaaggaaaaatagtctaagcacatgttatgtgaaatgtggcccaagtatcgtaaattgttttcaaaacattttgaatatgtgtatttcatggtgcacctgtatttcatgatgcaggtgcatgataatggattttatcttgctgattgatatgttttaggattattctgtttcaaagctgttgaaaaaataagttatatgatgacctgatcattcaggtgaatagggaaattgtttgcaattaaatctgaagaagtttttgcttttattttcaatgagctgctgtttttctgattatattttcaatatcattggaaagagagtcacattttattggatctttgttttctaatttgtatatggctatttgataacgcttttgtgaattgggtaagtaaaagggccagtatcagttcctttgacttgtttaaaaccttaaaacaataaagttagaggtggtggagagtgggttggtagattaacagacagcagaatcacaggaaacttttcttatgtggccaccatgtttatatactcatatacaaaaataatatcagattttaaaattgtggttctacttgtaattaatttttttttcttttttgagacagagagtctctctgtcactcaggctggagtgcagtggcacgatcttggctcactgcaacctccacatcctgggttcaagcaattctcgtgcctcagcctcccaagtagctgggactacaggcttgagccaccacacgtggctaatttttatatttttagtagagacagggtttcaccatgttggccaggctggtctcaaacttctgggctcatgtgatccacctgcctctatctcccaaagtactgggattacaggtgtgagccactgtgaccagcctgtaatttaatttaatttaattgtaaagagtaatcttatttgttggttgtaatggaaatgtatttcctcattattgactgtagtcaactgcaaaccctttgctaatggtgggcctatgctttctttattttttaaaaattgtttttgtagaaatggggatgggagtggtctccctatgttgcccaggctagtctcaaatttctggcctcaatccatcttcccacctcaacctcccaaagtcctggkattacaggtctgagccataacaccgagcacttatgttttgtgaactgaacttctttgatggttaactaatgtccttaaggtattttaatcaagacagtatattcgatataaataataacttgataaataacttgcttattttttcttaggtgtagacattctgctaattagatatgagcctaatatggtttttacccagcatctgtggtaatttgttctcaacatagactttttgataaacaaaagcatttggtcgaacattttttgttttaaaaagatatgaaactaattacagtgtcagtatttatataactgaatgaagttgatttagtaggtatttctaagtgtttatattgtttttaatgttaattatgccattacaaaatttagaaggtgaaatttggaaaaggcaattgtttttaattcttctacccaaacaaaccacttttaacatttagctatattttcttccaagatttattctgtgcacattaaaaaaagtaggtatgagcttgattttgttggttctgtttcacaccttcagaaacatgtactttttggttaaaagcatatcaagaatgaatttatttatttatttatttatttatttgatacagtctcgtgctgttgcccaggctgcagtgcagtggcatgatctcagctcactgcaccctccgcctcccgggttcaagtgattctctgcctcagcctcctgagtagctgggaccacaggcgggtgccaccacatctggctaatttttgtatttttaatggagatgaggtttcactcttttggccaggctggtcttgaactcctgacctcaggtgatctacccacctcagcctcccaaagtgctgggattacaggccgacttaaataatagatgacataaaaaagtaaaacgtaactatgcgggaaataaaaactttaagtgtattagaataatgatacaaattgtgatatgaagctcttctaaaatgttatagaactttagtttttaaataatgaaaaagggtagctggcagatgaatattacagggccatttcattagtctttttcctcccccatctgtcagatatttgattcaagtggcagccatggattttctggaactcagctacctcaaaactccagtaactccagtgagrtaaactttgctatagatggccrccatcttgttttacatgaatgacacaaatgctaactttttctgtttttttttgtttgtttttgtttttgtttttgagacggartctggctctgttgcccaggctggagtgcagtggcacgatcttggctcactgcaagcttcgcctcccgggttcatgccattctcctgcctcagcctcccragtagctgggactasaggcgcccgccaccacgcccggctaattttttgtgtttttagtagacatggggtttcaccgtgttagccacgatggtctcgatctcctgaccttgtgatccacccacctyggcctcccaaagtgctgggatgacagggtgagccacagcacccggccacaaatgctaacttaagcgaggaatgctggttcagaatctttacatgaactccttgaaaatagatttataattaaaatggtcccagtaggtattctctaaagagatagtcttgaatgccaagcattttggaggtatctaacctcatgttaactccattttaaaattagtgacatgactagactgaagtcataataatatctttgatttatacatctctattcctcagcagtacttaccttcrtttgagagttcagtgaatacaaaattgcattttcctctcagggttgtcagggatcttcacatagatagtacattctatgctgtgtctctccaggcgccgtcaaggggagcctgagtaatgtctcctcatccctagaattgcttctgaccaaacaaatcctcagaatgatttctgaatgaaatcctagagcatgaaatcccagatgtgcctatgcctcttcctagtgcctttttcaaacccacaacatccccatgaagctgtgttatttaatttctcctccaccaaataattttttttttttcagatggagtctcactctgttgcccaggctggagtgcagtggcgtgatctcggctcactgaaacctctgcctcccaggttgaagcagttcttctgcctcagcctcctgagtagctgggattacaggcacctgccaccaaggctggctaatttttgtatttttagtagagatggggtttcactatgttggccaggctggtcttgaactcctgacgtcgcgatccacccacctcagtctcccaaagtgccgagattacaggcgtgagccactgcacccagccagttcttactctgcacttaccatctcttactgttagccactctgtcaagtgcgtatgtcatggctcccaggaaagcttgtaatcgatrtagtttatatatgccctatttctattagatgtagtcatttaatggctgaggakgactgatttgtaataaaggcccataattttagggtcctatctcttccagcattatataacaatgtaaaattcttactttgaaagttaagaggcctggcatggtggctcgtgcctgtaatcccagaattttgggaggctgagtcaggtggatcatttgagactagcctgggcaacatggtgaaaccctgtctctatcaaaaatgcaaaaaattatccgagtgtagtggcttgctcctcggaggctgaggtgggaggattgcttgagcctgggaggcagaggttgcagtgagccaagatcgcaccactgcactctgacctgggtggcagagtaagaccccatccctgaaaaaagaaagttatgaaactatagcatcagtacacttcctattaacagagtttatgttggactttgaaaataaattttgctgatgtagccacttacagtgagaatttaagcttagtgcttaagatgggctcaaatcaacaggtcccatcgatgctctaaggagtgagaagaaactatgatttctgcatttgttttactcctatttgttttagctaagcattacttgtgatgtagggatactgaagaaattcctttcatttataggacaattttaatgcagcctctgtaatttctgtgctatcgtacccagataactagattcagatagaatggcagatagaactaagggtgtaatttgtttttttatatctctgggacttaaaattctgcctgagctggctaaataattaatatttcattttgctacttttcatctgctaatcattcttggagaatacttgtaacctgcacaaacctatttttatacaataagtacattacgcccatttctataacacagaaaggctgttgtgagggaggggccgtgtgcattttaaactatttcactctaattgatgcatcatataacagcccaacagtgagtcaccctaattcaaaatctgttaagtctggaataaagccagtcttacttgaacatttttttagaggacactttggcttgccaaaaatgaaagcttttcataacgaacgtctggatgagtaatagtgagtcttacacggcctttgaagggaggtgtttgtcatggagattgtgacaacaaagtccccactaaggctcagatggcggcaaccccrgaagcttcattgcagaaattgtgacagcccctgggccttggccccttcttctggaaaattggcttggggtattccaactttctgtggcagtgagtgaatgcagtattgtcatcttagtcatgagctgtaaactgaaaaaaaaacctaaaaaaccccaaaaaaccccaaaaccaaaacaaaccccctaatattgttttcttaaatggaaaatatgaatgaaacagcttactcttcaccacagtatggtaatctgtttagagagaatattaatacacaaccctacatagcatatatatatgcatacagctagcgagctagctagatccatctttgtttttctttcatatcaaccgatgtgtgggcctcagtccaagaaggaaataaacactttctcttctatgacattttactgttgttaagaaaactgggagcgtgcaactcccttttgtgttttctcctcatctcccttgcaaatagactttccttttatcagccactgtggtggtttgggcccatttgtgacagccagattgtgattttgctactcacttcccttcagtgatccaagtagtaattacaagccatttgatccaaaagcatctgctgtgagaacacacggagtttcaattttttctccttgctgcatactgagcataagtaatttgacatgtggtttcaggaccattgatgtaataataataataataaatacttctgtggaatgccctccaaggagagctaaagtgatttgcagacgttcactagtcagtctggagtgactgtggctgcagcccagtgatgttcccgtgtcgtgatggccagttggagctgactgcaaggtgatctgagcagcagtggccagaacagtggcccagggctttggaacaaaggatgattctcaggaagttctttatagtggccatcgctgaaatgcagtagctactcccagtacagtataatgccctgatccagcctcagcttccaaaaaaaatctttacaatttatgtctttcaaatgcaattcctcccatcagtctcctaaccaccccacgaggctggcgtttttaacctcttttgaaggtgaaggaacagaagtgcagaggcactagataacagcccctaacaaggctgagatttgacctggattgccttgctattattgtattttttctgtctccatttgcattctcaggaccaggaaaccttgaagaggctagttggaaatatatatatatatatatatatatatatatatatatatatatatattttttttttttttttttttttttttctttgatgggaggaagtagagtaggaggcgtggtaggtgcgtaacagtcctggcaaaggtagccaaccgtggaattctgggtggttaaaaaggttaatttaacatagcagcatctttgacatgggtaacctggaaaaagagttttccagatggctccatttttaatgcttatttttaggattctctcttctttttatgaaaagaatattggagaatatttcatctggcttcctgaaactaaagcatgtgtattttcaacttggatagcattgaccttccttcagagaattaatccaactttccctccaaatgggcaaagcttacaacaacctaagagatctgtaagcaccaagtagctttttctttttctagttttaataaattaattttaaattcttggtgcttcctttgaataaccaggttttacttttcttgaactgtatacatttgtgagggttgtgtgtgtgtgtgtgtgtgtgtgtgtstgygtctgtctgtctgtctgcctaacacacaccaaaaattacatttaacttttcattgagggactctcttgagagggtcttactctttgatggccttggctttgataggcgtcttctcttctatggttcactagatcttgggtcaacagtgtagactcagaaaaccattgctcagagcagttgtagcacagcaccttgtttaatggattttaataggattatttcttttgtccttccatccttccatctatctgcacacttttctcttgtccagaacttattctccttcaataatctgttaatttttcttctcgaagcttccagagagcattaagaacttgacactatgtcaacagatttgagtaagatactgaaaacggacagcgtttacccttctgcctgtaatatgactgtgaatttctagttgtatccagctcagcactgaagttttgggtgtgtcctgggtgtgggacgcactgtgttaatggctgagggagaatgaggatgcagaagacaaagcctctgctggtattcatcttctcctggtgcgggacttagaagtgactctcctgtgagmtgggctttgccaaatgctgtaccagggacataggagagtaaactcatctaagtgagaggacttgagggcagagaaaggagagataggagagaattcataagacaggggcattttaaaccaggttggagggtatatatggtttcagcactgactctacttgtaaggacggtacagcagagagaggagatggaagtgagcaccggtgtggagcaggagcatgccactcccttctggggaatgttccctgagccattctgttcaatgggaacatggtgtgtggcttagaataatggaaagtaatcaggagatttgggttgcacccattttatataaagggagttaactgccaggcgggcattctgtgtagtatagtggtggtgtgaaccagctcatcccagacttccacccttcagatccccggagtaccataggcactagttgtgtaaacttgggcaagtttctagaatttcctgagccatatttttcttgccttttccataggaagtgatgatggtgccttcctgagagggctggctgtgagtggtgagtgaactgatggcacatcaggagcttgtttcatttggtctcacgagatgcagtctttttttttttttgagatggagcctccctctgtcgcccaggctggagtgcagtgrcacgatcttggctcactgcaacctctgcctcccaggttcaagctgttctcctgcctcagcctcctgagtagctggggctacagacgcgtgccaccatgcccggataatttttatttttagtagagatagggttttaccatgttggccaggctggtcttgaactcatgaccttaggtgatccactggcctcggcctcccaaagtgctggaattacagacgtgagccatggcgcccggccaagtgatacagtctttctctgattgtcagtaacggtgagaacaagagggtgtgaaggcacagtgttaatttgtactgctcatgttcctcccacacctgtttatccataattacgttcttcctgatctccaaaagtgcagcagtaaattaattgctctgtcaccctcagtgggagcctgtgacttcctccgggccttgttctttgtgatgtttcttactccacagtgacctctgctgggttttagtttgcttctcaacaagcctggtttcagaggtggggcctgcacctttaaggcagcatctgtttgttgctaagcaccgggttgaaatcactgcccagatgaaaagtacccgagagaatgaaccagggaaaaaaatgtgcctgtgtaagacaagagcctttagcagagagtgtccgggctggttcctggcatccctggctccttgcatctggtcctgtcttttcctttggcattggcacgtgtggggatgtgcattctggctgtgatcatccttccagaaaaatgtactgaaagcgacagatccaagacaaatccagaaatgtcacttcaaaattgagcaccatgttttcaaaaagatggcacagagagacagatttttcccttgctttcttcttttaaatttctttacgatgtctcttctagtttttaaatcctgcataggaggatcttttactttgtatttaaaaatgcatggaattcaaagtaaaatcacccattaatgataactttaaagtatgatgaatgatatataataatgtgatagtattgaatctacaggtgacattttctggtatgtaaggtgtttcacataagtgacctcttttgctcacaaaaacttaagtaacaagtaattttttcaatatgaattatattaataayatcctcttttacaaaacaggagctgaatcgtacgtarcaaggtaaatcttgtcctaggccacactttgctggtagagtctgtgacttttgatttcgaagccccaaatcttttctttactgctatgtgaatataagaacctacccagagagaaacatgtctacatcgcttaagaaatgtatgctatttttgttatgaattacaaaaggacgtattagcatgaagtcagcaattgttgtgatgatgtagttggcacactacacttttttgggaaaggcttcctgaaggtggtattctttgagatgattttccaacagtgtctatgtgtgagatagctgaaggatagagaaaagatttcccaggactatgggttaattttaaggaacaaatagatttctgtcagtgatgagtcaggctaaaattaaaaagaagaaacaaagacaaaaacacagatagtcttagaagagaaagcttgtgctggattaagtgcagttcagagtcaggatggcaggcagrtgtcagtgaccatggacaaggtgtgtctggaattcagtgggaggtcagagagggattatggctgagatgcaggcttcacartggcccttctcaaccatgatcccagagcagtaagcgtggatactcagcagcccttacatggattgcggtgttctttttttattttttgagacagactcttactctgttgcccaggctggagtgcagtggcatgatcttgkctcactgcaacctctgcctcccaggttcaagcgattcttctgcctcagcttcccaagtagctgggactacaggcgcacgtcagcacacctggctaatttttgtatttttagtagagacgctgtttcaccatgttggccaggctggtctcgaactcctgacctcaggtgatccacccgccttggcctcccaaagtgctgggattacaggcgtgagccacygttcccagccggattgtggtgttctaacttggcataagcggtcaattgacacagtggaaagaacacaggacaggcagtcactaactttcactctgcttcccatggctgcagtttcatctgataaaatgagtgaggaaacgttgtcagcctcagagggctgtgagaagccagtgatgtgaagcgtgtgagcgtttactctaaatactccgtaaatgaacaggacatttggccggtggtttccttcatttgttaatcaaatttgtctgcattttcttttggcatctacaaacaggtcgatgaacttctgcatatatatggttcaacagtagacggtgttccccgagacaatrcatgggaaatccagacttatgtccactttcaggacaatcacggagttactgtagggatcaagccagagcacagagtagaagatattttgactttggcatgcaaggtaacggattttgctgcagaaatatatttctgaatagaaataatcattaatgttgcaatcttaygccttctaaattcatgtgatattcaagggcccagtttccatgccagggaacatattagcatatttattagttaatatatttattagcatattcattaatttgcattctattccttgatctctttagaagaatgagttattaggtcatgatcccacacttccatgaagaacctgagctaatctactgaaattctatgtatactttgatatctagaataattatgaaatccgttgctatttaagttacttagagatggtgtgttataagaaggcggcataaactttgaggtaatttaatttaatcctaaatagttttatcggatttctccagattaaacacgaaacttgatatattcacagttgctttatggagattaatataagatgatgttttattcatttttcaaactgggtttcattcctgatctgagaagggagtttatggtaagtcttaaagagagccctctgagagagaatatattcagcaacatcagatcagaagcttttagaccaccaggtggtgcagtagagcttaaatagttttaagtttccagagaaaatacaatcaactatgttgaaatggtgaaaaaggcatatagagtttggcaacacttaatcatgtgcacttaataaatgtgaaaaatgtttaattttagtccccctttttcactttgacttgaaacattaggattctctacatttatatgtagtttatatccttaggaacttaatttccttttgctcccatatgtaacgtttttattcagaaaaccaacaatgttctataccaatgatatcctccattaaactgataattttctgagtaataaagggtatcagaagtagtgggtcagctgggagcagtggctcatgcctgtaatcccagcacttggggaggccgaggaggtcaggagatcgagaccatcctggctaacacggtgaaaccccgtctctactaaaaatacaaaaaattagctgggtgtggtggcgggcgcctgtagtcccagctactcgggaggcagaggcaggagaatggcgtcaacctgggaggtggagcttgccttaagccgagatggctccactgcaccccagcctgggcgacagagcaagactccgtctcaaattaaaaaaaaaaaaaaaaaaaaaaagatgtagtgggtcaatttgacccagttagagcataggcctgagataaatttctcactgttgaaaatatgcatgcgagagaaaatatgagtgtgtgtgcgtacacattttcgttttgaaagtttttggagtaggacattcttaagtctgtagatttgttaacattttacaaatttctgtactttagtaatgagaaacaaggttaggcttaacctaactaaagagatggcatttgctgagctgataagatttattttactgtcagatatgttctaccgtaatctcttaaaaatgcatctcttgcctttaatcataagcaatattgttcagcgaaaaccttcttaaaaataattgtcctcctttacttttttgcatacaagtatttatttatttatttatttatttgagttggagtcttgctgttatcacccagactggagtgcagtggtgctacctcagctcactgcaacctccacctcctgggttcaatcgattctcctgcctcagcctcccgagtagctagtattataggtgtgtgccactacacctggctaatttttgtatttttactatagtcgatgttttgctgtattggctaggctggtctccaactcctgacctcaagtgatccacccgccttggcctcccaaagtgctgggattacaggtgtgagccgctgcccctggcctgcatacaagtatttaaattcgagctcttatataggtttaaattcagcaaattatatgcagtattcttttagagatttctactttgatttttaataagcctgctaaccaatgatggatttagaaagagcatttaaaatctgaataactgtctttttctttatagatgaggcagttggaacccagccattatggcctacagcttcgaaaattagtagatgacaatgttgagtattgcatccctgcaccatatgaatatatgcaacaacaggtaagtgtgcactagctttaggaagggaaactgaaccacatctatggccctttgattttgaaaaatgtcatttttggggaaaattctgtttaaatttggcgtctagtttggaaacagtctctatataaacggtatcttaacagctttcttgttttatgaaaaatagygtcaaagtaattttttgaggtatcataacatgagatcctctgattttgttgttttcaccttttgcaggtttatgatgaaatagaagtctttccactaaatgtttatgacgtgcagctcacgaagactgggagtgtgtgtgactttggtgagtgtaaggaatgcccctttcagggaattgtgttgttcatctttgcctactttgccccagcatctttggacttaattttttccccttacattcacattttcagaatatatgacagtagtttctgaacttcctttctcttccttcatttctatttattgatattagcaggtgacacagataggtattagtattagagggaaatgccaaagtaattaaatggaatgaatataaaattgatgggaatttgaaaatatagattaataacacaatgaatgtactgtgtgctggtgctgctctgagcagaccaactcatgattcatatgacagttgctttcatctctagtgtctttgctcttagttttctcttcccacctggaatgctccccttctttcctctttcttcccccatccctcctctctggtgacatgaatcctgctgtccttcaagaactaactcaaggtctttcttgaagaagccgtgtctgattgctttagctttacttccttctttcttccctgagtttaacagttgagggtcagctgggcgccgtggctcatgcctgtaatcccagcactttgggaggccaaggcgggcagatcacctgaggtcgggagttcgagaccagcctgaccaacatggagaaaccccctctctactaaaaatacaaaattagccaagcatggtggtacatgcctgtaatcccagctacttgggaggctgaggcaggagaatcgcttgaacctgggaggcagaggttgcagtgagccgtaagccaagattgcaccactgtactctagcctgggcgacaagagcgaaactccgtctcaaaacaaaacaaaacaaaaaaacagttaagggtcagtacttctgaagtcacttcatagcatcatttcctacatttctccttgattagataatgattggtaaatacttccatagaaacactgaatgattagataatgattggtaaatacctccatagaaacactgtttcttaccttgttaaatatatcgatacatgattttttccttaaaatgattcaractaataataaagtttataatatgttaaaatgtcctttttaggatgccttcgttttttaaaaatttgtataatcttttctgacccccatgttatttttttattttttattttttttgagacatagtcttgctctgtcacccaggctggagtgcagtggcatgatctcggctcactgcaacctcygcctcctgggttcaagcaattctccctgcctcagcctcccaagtagctgggattacaggcaccgtgcttgccaccacacctggctaatttttgtatttttagtagagacggggtttcaccatgttggccaggctgctcttgaactcctggactcaagtgatccgcccacctcagcctcccaaagtgctgggattacaggcatgagccactgtgcccggaccccatgttatgttggtttttcctttgaagccctcttagccttttttctcctcctcttggccttcactgtgctttttgtggttgccatttgtgttcatctttgtattggaatggatgaatgaagacattgcaaagatactctctggtgagaccatattctaccagcagaagatactctctggtgagaccataatctgccaggctctgctggggtcacagcagagacctagggaacaggacattcttgctgtcctcaaagaactctccgtattaggggaccaagacatggaaacctgtgctcctcactgtggcatcacagagggggacactaagtcaggagccatgcattcagaagagggaaggtctgcctaggatttgcatgtagtcttatgtatttagggcaagcaccgtattcatccaagcattttttcaccttcttaaaatgctcaaccccaaacatagttgtttctcaacaattatttgttgtattgaactgaatttcatgtatttcagtgagagtatttttttgctgttaaatttgcctaaatttttaattgtggtaatagacatataacataaaatttatcgtcttgaccacttttaggtgtacagttttgtgatgttaagtacattcacaatgttgtgctaccatcatctatctctagaaatcttttcgtcttgtaaagctgaactctgtacccatttaacaccaattcctcatactgtccttcccccagcccctggcaaccaccagtttgttaatactttgtatctctcggaattcccctagcaaccaccattctattaatactttctacctctctgaagttgactgctctagctactcacgtaaatagtatcatactgtgttgtctatttgtgactgacatattttacttagcatattctcctcaaagttcacccaaattgtagcatatgccaagatatttttcctttttaagactgaatgatactccactgtatgcatagatcacattttgcttatccatccgtctattgacagacagttgggttatttccacctcttggctattgtgaattacgctgttatgcrtgtgggtgcatggtctcacctttggaataaaagtyatgtttttatatttcttaagcctctcgtttgacatttgtctttttctgcccctgcaagatatttatactttcaaaatagctgtaatttcgactttctcaacatactgtacttatgagaaaagatgttcaaggagatactgccggtgtggttggagaaattcagtgtggtgggctgagacttgctttttccttttgttttcattcctagggtttgcagttacagcgcaggtggatgagcgtcagcatctcagccggatatttataagcgacgttcttccygatggcctggcgtatggggaaggtccgtgtggcacaccgtgcccctgttgcctcttaatttgaaactgtgggatacagtctggctagtgaatgtttcttcttacagttttgtcagaaaaaggttgctcctggaattttaaagaaagtaaacntaagagtttaattggaaatgcgaccaaacacagcggctcgctyscataaacccagctnctcaggaggctgaggtgggaggatgggaggattgcttgagcccaggagcccaagaccagcctgggagacagagtgagactcctgcctccgtaaaaaaggacagagagagagaaaagaaagaaaatgcatatgcctatatatagagagagcatgtgtgtgtgtgtgtttaaaagagtaagtgtatacatatatatagacagagggaaggaggaagagagtgtgagacagacaggcggacacggatggaacaaagttaacatgggaacactagaaaaaacaacgaatgagtggttctcaggaggctgaggcacaagaatctcttgaascggggagacagaggttgcagtgagctgagatctttcaaactgtttcttcgaatagtagctgtgagagagctaacatttgttttgctcttagtggcatctaaatactatacattttggccctttaattcttttttgtttttcttatttaaaagacgaagtcttgctatatagccccaggctggcctcaaactcctgggctcaagtgatcttcctgtctctgcctcctgattagctgggactacaggcacctgccactgtgcctggctggcactttctttgaagaaagcaacaaacaaaacagtccctacgagtacatggtttgagtttgcagccttctttcatctgaaaatatttctcacagtaatccctctctcttttttctgtttctccttcctttttctcaggkctgagaaagggcaatgagatcatgaccttaaatggggaagctgtgtctgatcttgaccttaagcagatggaggccctgttttctgagaagagcgtcggactcactctgattgcccggcctccggacacaaaarcaaccctgtgtacatcctggtcagacagtgacctgttctccagggaccagaagagtctgctgccccctcctaaccagtcccaactgctggaggaattcctggataactttaaaaagaatacagccaatggtaaggctttgttctgtcttccttcttaactgctggtatcaacagccaatatttttaggctgtaattttgcttgcaaactcagattatttaagctgttcaaagaatgttttctaatttattagaagaacacagatgccaactggagtagattttatcaaaatttcatgcgttttagtaattatagcgctttcattaaaatagaaaataattatttttgcacaaaataacatttaaaaaaaaatcatggactctttaaaaatcacccataatgtttagtcttgtagttcctttgtgactgaaggcagatgaaagcctgcataaatgccaaagtggaaagatttttcttatttagttgaatctaaggcacaaccattttgcagtcttctgttgggctcttagaacagcccgtgcatttcagttcagttatatcttttgttaagtactactttattaataaacagcaaactttcttttttaaaatttatttttatttttatttttttttgagacagagtctcactctgtcacccaggctggagtgcagtggcacaatctcagctcactgcaagctctgtctcccgggttcaagagattctcgtgcctcagcctcctgagtagctgagactacaaacgtgtaccaccatgcctcgctaatttttgcatttttagtagaggtggggtttcagcatgttgcccagactggtctcaaactcctgacctcaggtgatctacccgcctcggtctcccagagtgctgggattacaggcatgagccaccgtgcctggccagtaaacagcaaacttttaatgtaggtcatgaattttaaaactttgtgaaggcctaaaaatgaaaaactgtgtgccagtttagttttctcacggtaagacttccatatgaggaaatcatttgaaggtctgaagttttgagttgatcattcatgtgtatttcatgtactgcagtcaagtaaattaggggctcggctagtactgaaaaccagtagtttcgctttatacctctggagagcccgggtcaagctccacaggagaccaagtgtggggtctttttcctgggagaacacagagcaatttttatacttaattacgataataatggatttccaattgaaatctctgcatgattaccaaaaatgaatgaaaaaacaccaaagagaagttgttaggattgatttaattataaaggaagtttattaggtcatttttggaattaaaaaatcagatggtaagatttgcgattcaataaggtatctcgtgctttctcctcctctcttggggctttcctctaatttaaaatgccattaaatggactattggcatataaaagtgaatgtcataaaacaaaaattatgatggaacttattaattacttgggtatattagggccatcattcagctaccctgggctgctgttatgggcctgagtattccatataatacatacatgtgtccatttgttggattcattactcttgagggatacattcactacctgtgttatgtctctatgtattttatcataataagaaattaccacagaggctataatacttttggtacttgcgggaatgaattcctgtagaaagtagagaaaggggcaaatttacctttttttttttttttttttttttgagacagtcttgctctgtcacccaggctggagtgcagtggcgcaatcttggcttagtgcaacctccacctcccggtttctagtgattcccttgcctcagcctctgaagtagctgggactacaggaacatgccaccacgcctggctaatttctgcgtttttaatagagatggggtttcaccatgttggccaggctggtcttgaactcctgacctcaagcgatccaccctcctcagcctcccaaagtgctgggattacaggtgtaagcaaccgcgcccggctgtttttcttttctttttaaatttttttttaaatagtaaggatcaagcaggtgagttaagccacatttatttatttatttatttatttatttatttatttatttattggcaaggaaacagaataaagaggcagtcctggatctgttaaatagctattctattactcatcttaggcagccattcggactgtctaatcctttacaaccaatgtctgtgtggacagagagcttagttagccaggcaggcacggtgcttgtccacatcacgtcctcctgatggaatcttgcaggttcttccactaccagcctagtgggagccactaaccctttcctggtgtcctggcaagactgtgctctgtgggtgtgacagtctcccaggcagcgccccgcccacctctgccctgagctttaccattcctcccctctcctaagctccaggtggctgttccatagtgatgtcgcctgtgctggaaaaaacagccccagcagactccttccccagacaccacaaacagaggcttttctttttcttttcgaggtagttgcgttgcttgtgaaggaagttacatgcctttgggcaaacatctcagaaggaagtcttccattttgaaggttgaggggaaaagaaaataagggtaggtgggtggattaaaagataaaagtgaaaaaagaccaggtctctcattcatatgcaacatctgaatgacaagagaagcctgtgtttgtggaaactctgagagatggcagggtgacaagcatacaggttttgagtcagacgtgggttcaggtcctgggctgccctatactggttttttgactcacccagggagttctgggctttggtggatgctaccccagcctctttaccctggtggaaacggttctgaggtgcagtctacacagctctgcagatgggccctggaatgagccccagctgtacacagcagcctcgctttcacacctcccatgggcttcctgcccttcttgcctcactgtccctaccccttcctttgggaatctcggggtcaccttccaaataaacttctgtactcaagtccttgactcagactctgcttttaggggagcccgaatgaagatgctgagcctcacttttctcatccagaggataatgtttctcccctgcccctgtggtccctgtgagtttgggggagttcctgtctgtggcatgttcagcccagcgtttcacttggcaggaattctgaaaacgtgcttctcctcctcctccctcgcttttgcagcttcctgttttattaaaaattaccttgatttacttttgcaatgaattagaaaacagtaatcccattttttaactaaaaaagttaaaatttacggaaatcaaaaatttaaatgactttgaaaaacagtttttaatacaactttgaattataacttagcagtggccggccatttgagagcctgcctttccctaaatttcactttcccttggcattgctagaaggcaaccatgtacttgaaaagaaggaaagttctgtttgcttttccagagaagccaatcctttgcttgctataaaaaccaaatggctggctctctgggaaagaagacctgtttttttaaaatagaaattataagaatatcagaaagtagatgaaaaggaaagccttaagcacttgtttgggcttatgttgcccttccaagcagaatatttatagccccctgtcgagcacttaaaatgtgtgggggaccctgggaacaagctacacagagttcagggctttcagtcatatcctgaagtttacgttgcttaacttttgtctcttgatcagtttcaagtgggaaaaaaaatctgtctctgtctatatctctatatctaatgaatcttttactgaaagaagtgttagtcacagtggcaggtcccaggaagctagggggttgcttgtgggttgctattaaggttctgcttttctagaaaagaagcatccttgcagtatttgacattcattgatactaataatgtttaggaaaatgggtctcaaacttcctagtgcccaagactcacctgctgagcttaatgaaaatgcagattccagggttttgctgtgggtgcacctcctgcaagaggcttggggcagtgcaaccccccctcccccaccccgccccctttttttttttttttttttttttgagatgaagttttgctcttgttgcccaggctggagtgcaatggtgcaatcttggctcaccgcaacctccacctcctggttcaagggattctcctgcctcagcctcccgagtagctgggattacaggcatgcaccaccacgcctggctaattttgtttttttagtagagacaaggtttctccatgttggtcaggctggtctcgaactcccaacctcgggtgatctgcccgcctcgacctcccaaagtgctgggattacacgtgtgagtcactgtgctcggccgcaagccccatttttaacttgcgcaggtgtggaaagcagccttggagagccagcctctctagcctgcattggctggagagcagccccagggctggcgtgagcactcccgctgccccttggccattagtctacaagaggtggcctgaactgaggcagtaggacttactgtttcctgaggccttctatgccgaggttttgaggatggaatgagataatgtgtgcaaagttccyggcacatgatctctgttgcgcatgtgtgttcttaggaattgtgtgtcccaaacctccaccattgtctttcctcgtgcgctcagaatgcaggcagtcgactcttagctcacctcgtttattgctgggcccgtgcttggaagacaccrtgttccatttggcaaatcgcttacactgggaagcaaagaacttccagcattcaccagcttcactccactatgcctgtgatgctctgtgaggagcggaagagacaggaatatatggagaatcgttgagggttcagtatgaagttcctctgttgcctacaaaatgagtgaccatttgattttgcctagaagggcttaaatttctgttctagttattcacagtggagagaggaaatgtccgtaggctgtatttgacttgagcggaaatatcatctgtaaaaactttttatggagagaattaattttaccactggaattccccagagaggccagtgttatttcagagccaacaaggcaaccattgaagggattggacaggccagacctgtttatactgggatcctgttaatgccatacttgtgatttgtgtatgaaaatcccttttctagtgtttgccatcttttgaaacattccagcagcttttaagaaagtctcattgggcatagagtttctgaataaagtctttatgtaaacactgaacttgtcgcattaatgaattctccatctataaacagccattaatcctaccttgttaggattggaggtgtatttaataggggacaaaaatagaaaagacctatgttcctccttccatttagacgatgtaaatccaacacaggcttaccagatgatgaaggtaattgcagcctgaggttctttttttagcctccacgccccctttgaatcattctttttttaaatcgctgtgagtagcgttgagtctcaagctaccagaagccacttcgatgtaaatttgctctttggaatgaattgctcttgggaatgtatgtgtccattatatagcttctcaccagggaaaagcattatagagccagctctgatgtggcaaacccacttatttcctgtttatgagagtgagggcattttggcttccatagcctgtttaggatgactaacagcatttagctcagagaatgctctgtttgtgtgtaaaactgctattagtgagtctggctggctgataccccagatttccagatgtaaaaacatattagtgttcctaaagatgagtggtactttttttttttttaaatcagaaaacaatctgattgggaaatactggttttaccaggacacagaactttggtctcaraattacgagtttgttttgtctgtgctgaagatcggtttcatttccaccagtgtggaagtgagcgtgtggctttcttttagtggtggaaaaaattaagatcctggatactaatttccttataaaacttagttttgtttgattctctttttcttattctcagtcatttatttattcacttgtgtatttaacagataaccttttgttaaatgtcgaaggtacataaaggtgaattacacattatttcatactctcaagaagctcatagttgaattggaaaacacttgtaaatcctggctccaaagaaaaaaaaaattgcaatgaagagaattagaggtcagaggtgggatttccactaatttttctgttttacaagagcaaaggcacccagaagcaaggcacagggctctcagcatcagcatcagaggacagtttctagaagggtttgtgtttgatctcagcgctgcagttggacaggccatggacctggaggtgtgtggtggggggatttggtggagggaagggcctttcacatagagcaagcaagctggaagacagaggctgcatgtagaggtcacgggaagaaaggttggaaagtctattggggccagattgtagaaaaccctgaattccaggaatttataacgtatcgttgcatgtatctgaaaaaccaactagctaattaactaactaatgaatattgtattactacttccccctgccttctataaaatatagagaacttgtctgctcatttgatggccactggagtgtgtgtgtgacttgaaaagcttgcccctgcctgtcacctctctgatcccaccactctagcttcattcctttggatcttaaagtattgtcatgttgaatgatcagaagccccttataaaataaatattcagatgttttagaggaaagagtgaataaaggaacccctatatgttctctgtaaaacctaagtcttcctcagcactgggaagccgtctccactaaagtgtggtcctcaccggtcccctttaggggtgaggtagatggattaacatcctgctggcctgtgacagggatggctggtggggaggggacaccccatggcaaagaggaccaggcagtatgagggtcaggaggagagatgttaaataaacgttcccagcattttgagtaaaaatcagtcttggcttttctctccgaacattaactataaatacaactttcagataaaaatctacagaagttctctgaagcacactgtgtgaaatatctgttggctctgccacttttgatagacatttgagagtttgggatgccaggcaggtctcctatgaaggtagagtgagccggctctctatgaagcagtagttctatgaaactattggctgctgagaagaggaaactttacagcctgttacataaggaaaaggaaaaaaaaaaagatctcactttcctgtcggtgttatgagtactggctgccaaatggtgcttgtttgtgtttctatttttttcctccttcttttgtaaggggcttgaaaatgaattctatttctcactttattcctgcctrtgaaggaagtgagatcattgggaaggaccaagtatgaaaatcttctttttagctctcgtgtttagagataactgtattgtgacactatcttcgctttttcagattggtaatacatgcgcatggtacaaaatgccagcagtgtagaagggtaaacggtgacagctaagtccccctaagctacatcgggcagtggtgaagagcatggacaccatctgatgacctggttcaggtcctggctccagcctctcctactcactagctgtgtgaccttggacaagtcacttaacctgaaagctcagtttttccaagtgtaaaatggtctaggatttttgtaggagcaacggactagtatttggaaagcaccagatactgcctggcacgtagtaaatgccatgtaagtgtgtgttgaatacgcagatacattcctcctaccctgttmttagccatgcagtgtctcttccagaggtcatcattgttcttagtgtctttctcatcctggcctggagaattctaaatattggggaaaattggctgggcgcggtggctcatgcctgtaatcccaggactttgggaggctgaggcaggccaatcatttgagctcagcagttcaagaccagcctgtgcaacatggtgaaaccctgtctttactaaaaatacaaaaattagccaggcgttgtggcgcacacctgtagttcaagctatcactcgggaggctgaggcaggagaatcgcttgaacccaggaggtggaggttgtagtgagccaagattgcgccactgcattccagcctggatgacagagtgagactctgtctcataaaaaacaacaacaaaaaaaaaaaattggggaaaataatggggtatttttctgccttgtttttactccattgtcttagtacatggctatggtggagagaataatggcccaccccaaacatgtccacattcgaatccccagaacctgtgaatatggcaaaagggattttaaatttcaaaagactttgaagatatgattaagttaactatcttgagatgggggatggattttcatggattatgtggggggcccagtgtagtcacaggggtctttactggagggaggagggtcagaatcagagaagtaaatgtgatgagggagggagagagttgacagccacgagccaaggaatgcaggcagcctctagaatttggaaaagggatggaaagagtcctcccttacagcctccagatagaacacagccctgtggccttaatcttctgattttcagaactgtaaggtaataaactgagtttacatgtcaagcaccatgtttgatggcagaaatacaaacatgaaaaaaaaacaacacagttctggtattcggggtgctatggtctggaggcagacgtgtgtacagacagcagtcataatccactattgtcattactctagttttacagttcttggacttgtcggtctctttctggacgctttactgttaaaaattattgagggccctaaagagctttagttatgcgggccacatctatatctattgatattgactgtattagaaatgtaaactgagcaatgtccaaaatgtttgtttaacataacaatagtggatccatttttatgtaaacacaataaacattcttttaatgaaatgtctcctcaaaccaaaaaaaaaaaaaacttagtgagtagccttattttacatttttgcaaatttctttaatgtgcatcttaatagaagaaaactagattctcatatcagcatctacattcagtctgttgcagtgtattgctttggtggaagttatttaaagaaaattcattcttatacaggtacatgtagttggaaaagggaggagtattttgatactcctttcagacaactgtggatattctttcatgtgttcccaaactcagcaagtggccatttcttcaaggttggttgcaatgcrgaacctgaggcattattggtggacttttcttatttggtagcattaaaattcattggcctatcttgtacttggaatagatcttttactcatgcgtgatttcataacatgcattgtttatttggaaatatggaatcactaagttatgtagatcttccaaatgtggacatttcatttcacagtattaaaaattactttcaggccagtcacggtggctcacacctgtaatcccaggattttgggaggccgaggtgggaggatggcttgaggccaggagattgagaccagcctgggcaatgtagtgagatcctatctctacaaaaaataaaaaattagctgggcatggtggcttgtgcctgtagtccaagctacttaggaggctgaggtgggaggattgcttgagtctgggaggttgaggcttcagtgagctgtggattgtgccaccgcactcagcctgggggacagagcgagaccttgtctcaaaaaaaaatgtcacactcagatctcattggaaaagtattgggaagctcacggtggcagatacaaattttccaaaattctgatttttgttggacagtttgaattatatctaccaataccgtcaggctcattttgttcattttaaagaaaatgtttttttctcacctttattttccaagtaaaaattgtggttcttgaaaaaagacagttagttccgctcccaacacagttgtacatatgtttttcctcaatgctacgattgtgcttgggtatgcagctgacgagttgtatgtgtgcttcctgaacatgttccaagggtggaggtttaggaaaattaccaatttttgctgctccattgaggacattcttaagtgaaactggcgcatttttaaatgtaagagtgtggcaatgaagagcgcaatggtgctgagcacagtttggtgttcctgccttatttgtgctgagacagcagcagatgctttgcaccatcagtgcacatgtcctcagagagcaaaaggcaaatgacatttgacatttgacatttttctgaaaataattttcaacttgtggactccytggaagggtcttggtgaccccaggagtctacagaccacacctggagaagggctgttccgatacatatggagcagcaacacagaggagcagaaaactcatgttccaggttgatcagggccactctccagggagggtctcacctytgttaacccctagggaatgagaaggtagatgagggggcatagagcgttccaggcgcagagaagccgggaggaggccggggctgtctagctgtggggaggtgtgtgagtaactcagatggttggagactcaggtgcaaatggggaagaggagaaggtagggtgagacaggtgagcagggccaggtgacaaagggtccacggagctgcgagcagcctggatgtaaagatccacagggaaaagatgatcagggtatggtgggtcagatttgtaggttagaaagacaggcagccccggtgccagccagggaagggcattgcagctgctgctagtcctctaagagatgaccaagggtggccaggcaccaatgggctgagaggtgggtggcacagcatggcaggcagtccctgcccttccctccctcagagcacataggtaggaggagatactctgtcctcctcctttacagggactctgtcttgtatttgtcaccaataaatcactgggcacataagtagagtcattcaacaaatatttgcttgaacatttgaacaaatgagtagaggatataggaacaacaagactcagaatatgagaaagaagaaaaccccaggtcttccgctttaaacatttcaacattgacatgatttggctgtgtccccacccaaatctcatcttgtagttcccttaatctccatgtgtcatgggagggaccaggtagaggtaattgaattatgggggcggtttcccccatgctgttctcatgatagtgagttctcattagatctgatcattttataaggggcttccccctttgctgggcactgattcttcttgctgccaccatgtgaagaaagacatgtttgcgtccccttccaccatgattgtaagtttcctgaggcctccgcagccctgcggaactgtgagtcaatgaaacctctttattttatctattacccagtctcaggtatgtctttattagcagtgtgagaatggattaatacaaacattaactttatttttcaacaagattctaaggcttaaggtgtgcaaaataaaacttgtaactaagaagggagctgtggctttgtttatagcttgagattgaatccgggtgcaaataatttgagaagtttttgccttcaaggtggaaaatgaacttctatacttaatcctgaattcaggcacataaattaggtccatgacatgagatttgcatttttttaccccatggtaggtacccatcgcctgtgaagatcacactgaggccaagctgagaaaccagtgatctctggagaaaaatatttttctctcattttacttttctctggtttatcaagtatttagttactgcctgttgtgtcaggcattgatctaggagggctagagataaacagtgaacacagcaggtaaaaaagcatccttgcccacgtggagcttacttgtattttagtgtgtggacatacagagtaagcgggaacctcacaattaataagttatataatgtattcacagatgataagtgtgacggaacaaaaattgatcagggtgggagggatggggagtaggggccaggctggttgcagttgtgcatagggcaggccggtagtgctcagggaacaatggacacctaggagcacaggcttgtgggaggtcagggatggggccacgtggccgtcagggggcaaagccttctaggctgagggaacaatcacatgtgccccgatgtggcctgtttttcggcaggtgtgcctggaagggcaagggaagagcagagcagtgagaggtgaggcccrgaggaagtgtgaggccagatcaggctgacctcaaagaccattgtgaggtccatttattggagggaagggagaagccgttgcagagaaggaggagcagggaagtagtgacatgatctgacgagtgattggtaaggatcactgagtgttgctgaaaatggactgaaggaggcagtggtgcaacagaggctttgccgtcacccaggcgagaggtgagggggtggagtctgcttggggtggtggcagtggcagtagagccaacagagctcgcccagagactggaaggagagggatcagaggtgacccccaggttttggcgtgagcatccagaaagttggagtttccatcagttaaaataggaagatgggtgtggagcagctttggggaacgatgaggaattggtttgggaactccttgtgtttaacttctgttcatgttgaatatttcacctgcttccaaaaccgttttgaaatgaaaactcatctataaaattccataagaggtatcaaaattagcaacagaaagagaaaggggggaaattttaaaaggcatattggtctttcctctagattggatggtgttgggaagcgggagttactcaatgattgggaatcttaataatcttacctagaagatgctctaaatggtaaatgaatttacaatgaaaacgttatctataaaattccattaaattcatcaaaattagcaacataaagagaaagggaggaactttgagtgacacattacccctttaaagatgtccactcatagtgtaaggcaaacacatatttgtttataggagaataaatcaataggctttgaaatgcaaattgtagcacatcagttcctttcatttcagacaatttagttctgatctgttgtaccttataaatttatttctgccctaccatactcagctatgattatttataaattatccaatctcatataaatccatttatctgttatcctttcttgcatatggctgttaacatctttaacatgtcgtgggaaaatgtgacaaagttcaaattatcccattttgttacttgttggtagctctggagaaggttatttggaaaaaagcacatgaaattgttaacaaaattattgtgtatcttctgttaggagccctggccagctgccctggggagtgagcaggtgctattccacagtttctagagtggcaggatgccccctccttccagaagtctcccagtgggcttgtgccaaatctggacttcccagtgaagcacttggaaactgccgaatgaaaggacatgtgatcctccacattttaacatttttctttccaaacactagttattttctcctaaattgccatttgtgaatctaattctgtctttcatgtttcagttgatgaatggccatgccattcttttgtgaagtttaggcatcttcgcatagcagtattagcaacattatttgaacatttattgaattttgtcattattattttatacaaatgattgaggaaaaatgggggctgaaaatgttgataagaagcctagcttttctaagcttaattacccatgaccccgaaatgccagtcaccgcatgtgtccagccagcaagacattagctccatatggatgttctttgaccttgaatgtattggtctgttcttatgctgctaatacagacatacccgagactgagtaatttataaaagaaagaggtttaattgactcacagttctgcagggctggggaggcctcagaaaacttacaatcatggtggaaagggaagcaaacatgtccttcttcacatggcggcggcaagcagaagggccgaccaaaagggggaaagccccttgtgaaaccatcagatctcgtttgaactcgctgtcaccagaacagcatggaagtaaccatgcccaaggttaaattacctcccaccgggtccctcccaggacaggtggggattatgggaactacaattcaagatgagctttgggtgggaacacagccaaaccatatcactgagcaagtcagtatgtgttcactggggaaagaggagaaaattaatacatgtgctaggtctacttaaaaggtgcagcacaaatagaagttttatcattttttgggatctctgggagtagaagttcacagaacctgaatactcaccttttatgcttctcttttacaattgtagtctgtgagaagtgtggggctgcttgcatgtcacactggcggaatcttgggctcttcctcttttgaactctgaaggcattttgtctgtatggctgatatgaaagttgccttgcaatatcgctcactgtgtgcctgtcctaattaacctactactgacaatcccttgaaaacagggactttgaagagtgtaaaggatgtttcagacacagcagccagcacaattcttgataaaaatagcaggcattgagtaaatagctattgagtgaaaggaaggttgttagaaatctcttaatgaggccgggcgtggtggctcacgcctgtaatcccagcactttgggaagccgaggcgggtggatcacctgaggtcaggagttcgagaccagcctcaccaacatggagaaaccccatctttactaaaaatacaaaattagccaggcatggtggcgtatgcctgtaatcccagctactcggaaggctgaggcaggggaatcacttgaacccgggaggcagaggttgtggtgagccgagatcgtgccactgcactccagcctagacaacaagagcaaacaagagcaaatctcaaaaaaaaaaaaaaaaaaaaaatctcttaatgaaagttaaggcaacgttcttaagaatgaattatgggggataaaaggaatccttggaacacatcttgaggcttccatgatttcttctttataaatctgatgcaagggaatggtgccgagactttcttgagccgaggtctccatcagtggcacatgtgtggagggcaccctgggatggcccatggctgtggtggtggagaaccacatgccccagctctggagtcctactgcatatcctgggagtccacggagcctagctgctggctcacgtctgtgctgctctgcaattttaatgggctaattggtgcccatgacagttaatttgccagctaaaccaaaaccacaactaaaaaaggacagtaacttctttatttttttttttttaattacaaaaaaagtttttaagacagagtctcgctttgtcacccaggcaaatggtgcgatctcggttcactgcaacctctgcctcccaggttcaagcgattctcctgcctcagcctcctgagtagctgggactacaggcacaaaccaccacacccagatgatttttgtattttttaaatagagacagggtttcaccatgttggccaggctggtctcgaactcctgacctcaggtgatctgcctacctcggcctcccaaagtgctgggattacaggtgtgagccaccgtgcccagcctgagaacagtaacttctatatcaccagtataggccaatagtgacagtgagttgtgttttaatttggggatagtaacatttgtaaaagactatgggtctcaaataaggtctcaaatggattctagttcctggctttttcgtctgtgaccatgggcaggttactataactattttcttgactcttaaaacaagggatgaggcaaaatagtttaaaattttttccttctctctctgaaattcttgtatttaacgtgattgaagtgacaatataagaactacaggagtgtacatttcctccaaaattttatgaagcgaaaaaagcaaagtaatggatcaaacattccattttggttttgcagccagtcccattccctccttaaatagagtcaggtcttgactgcggtagagaacgtgtttgttaaggcttcctaataatagcaggctgtctcaatataaagttcacaaagaaccttaaaaacatgaattatccctcacatcaccctgatggagcagagatgtgttattatcattttactttcacagctgggtaaatcaaggtatagagacacatcaagcctctggtagcttggacaaggtcatagtcagtggcacacacagatagaactgtgtcttcctgtttttccttccatgtagggaaaaatgtctggattttaactgcttttttttccttttaaagatttatctattaatatacatagagtaaaacccagttataatttgccttgcagtaaagcaaatttagatgtgatcggattgctgatagtccttgtcttctcatctggattcttatctgagggttgggactgatgatcrgaaaggtcttgtgatcatctggggctttctcagttcagggaaaggtcagttatttacagtcatagcttcgctatctattcttgttccttttttgatggttcatacagattttcattaaccttgcaatcatgtggccatatatttcctgtgatttgtttctttggaaccctcttatggtggagttttgctgttaattctaatttctctcctgtaatatctaccctgacttccttatcttctttttaaaaaattgaatagaattaacatactatacaatttaccttttacagtgtaccattcagtggtttttagtatattcacaaaattgtgcaaccatcactacygtctaattccacaatatttttattccctcaaaaaagaaacctgacacccatcagaagtcactcttcaaggccagggtcagtccctcacgcctgtaatcccagcactttgggaggctgaggtgggcggatcacaaggtcaagagatcgagaccatcctggccaatgtggtgaaaccctgtctctactaaaaatataaaaattagctgggcatggtggcgcacacctgttgtctcagctacttgggaggctgaggcaggagaatcacttgaacccaggaggcagaggttgcattgagccaagatcgtgccactgcacaccagcctggtgacagagcgagactctgtctcaaaaataaaataaaataaataaacaataaataaataaaaataaaaaaagaagtcactccttatcctccacgctccaacccccgctcctggcaactatgaatctactttctgtttctatggatttgcctattctgggcatttcatataaaaatgaaaatacaatgtgtaacctgtcatgtctggctcctttcacttagcataatgttttcaaggttcatccatgttgtagtatgaatcaattcttcattcctttttatggctgaataatattcaatttcgccttcttttaatccaagagaaccgtagcacttactgaaaagtgtcctcaaattttcttttttccgtagaaactttctctaatagaatctcatgtgtacttttgtctaggtttcttctcaaagtctttaaatagaactccagctaagtagttcctaagggctttgaacttaaattcaactttattaaaattcttggagtgtttgaagtacggtattgtctgttacatgcctgaaggtaagtaagtgtggcattggggtgtcctcccagtactagtgggtgtccgtttccttgcagtgccaagaccttggctgaagatctctctcgtcattgactgtgtatttttcactggggctcataaaaccccatgggaggctctgcaccttctttctttgggttaagcacgctgcctcagtcactgccatagcctgcctggcgaaggaagatatgggtacatctaaacgctctttttcgttgttctaagaaggagtattgcagtcagtgtggaggtggctggcagcacctttctactgtgagaacatctgccatgttcctttatgtattttttcccactctaaggacatttatcacaagacaattgaaacagatcctggcagcctgctattaagaaacatttactaccagcatttactttactgctctctgtttattgccggtgttagcttgcattgtcaaaaacatcaccaattggaatgtgacctcaggttaaatggacttggaagatttatgaatctttctagcacagtatttgtgctataatagaatttatttctttgcaagcttaacaataacattcagactgctgctttgaatttccctgacatgagtcataacaataaaaaaaatgcaaagtcccagatatggtcagaagagaagactgatttttatctatattaagagtaggtaataataaatggtgatctctttgttaatggtgcagtttgggacttgactcacctttgaatgtggtcaactcaagagttactttttttttccctctcagttatttctattatttcatttaaatgctttgttttcattctctttcactgactgatgatcagaaatatttgcctggatggcacagtacagctaatgtcattagtgaaaggtggcacaaaccactgcattttaaagtaaaagtatgagtaaaattttggacaatctgtgttacttaaaaatatgcattgctatacaaagtttacaaatttaaatttatttagaagaaattgttttaaaagcaaggtctcactctgtcgcctaggctggagtgcaatggcacaatcacaagccactgcagcctctacctcctgggctcaagtgatcctcctgcctcagcctcctgagtggctgggactacaggtgtgcaccaccatacctggataactttttttttttttttttttaatagagatggagtctttccatgttgcccaggctggtcttgtgaactcctgaccgcaagcaatcctcctgccttggcctcccaaagttctcggattataggcatgaatcacctcactggccacaaagttaaatttaaaaggagagattctggctgggtgccatagctcacgcctgtaatcccagcactttgggaggctgaggtgggtggatcactcgaggttaggagtttgagaccatcctggccaacatggcaaaaccccatctctactaaaaatacaaaaaaaaaaaaaaaaaaaattagccggatgtggtggcatgcacccatagttccagctactcaggaggctgaggcacgagaattacacctgggaggcggaggtcgcagtgagctgagttcacgccactgcactccagcctgggtgacagagcaaaactctgtctcaaaaaaaaaaaaaaaaaaaaaagagaaagatttgcaaagattttctttgcaaatgttcaatgtgctgtttgtactgtgagaactggctgtgagcattaatgcagagttttgtaatagtgggtgaagcttgaagaattgaaaaaaagtcttaattttctatttacataatgctattatgcctaggctggcagctttgatttacccaaattttaatcttttcttaaaattacatttgtactttttttaaaaaacaaaagatacataaaatgaaggaattgaatagggtgatttctgagtttcttttctgatctaaaattctttgattctctacgagtttttcatttatggaattgcatagcataaattctgagaaactgaatagggaaactgagtaaatcaaatagattaatagcataattcaaataaagtacgttattttttctggatgtcagtagatagtagaatgtaagtattaaatgtcagagacgtgtaactctaatgccaaagtggattatgtagttgaaaacttaattaaaccatttattattcacttgtaactactttgacattattttttagatttttttcagtcttagaaaattattcttctgtagttttcacatcagaaggggtttctaaggattaatgatttaatcaactaaaaacattttttgagcctgagatgagagtcccactgaaatacacttcattgttatttggctgctatatttttaattgctttagtgagtatattttatctttctttgggaagtgagggaaactaatactcagagggtgcaaaatgctatgggttggatgcattttgcatcctctgatgccacttgattctcttagaggtaaagttgaggtcctggccacggggaggggcagaggcaattctcagaggtggtggcgctgaccaccaggtgacattttggaagtttgtgtttctgtttttggtcatcataatgattccagggatggtgacgtttggtagttgggacatggttgctggacatccggcagtgatcacgttaatcccatacattgcacattgttcgactggaccttaatggaggttaaaaaacatgcatataattatctgagctaggaattacctcgattttacaaagaaatgcaaattattttttccccacagctataggtacttggaattttctgggaagatggcaacccaataaataaaggaagtacatcctttgttttgctcagaactttgccaagagttttgtcattttggaaaatcatgtccctgatggtcataccaccaagacacactggcattggtctctggtgaagcttgggacaaggcctgtagagccagtggctgacagcttcctcacggcttctggagaggttctggtgccatttacatatggagtataattcaaacaaagtattcaaaccatagtttttaattataaattactttccgtttatttttctttttgtcttatttttagggtagtatattgcttttggagaaactatgaaggtagattatattaagaatgatttttatttcaggatagtaaaagtatatattatcaaaaaggaccctttggatatgagagtattaaaaatcaatgtactataatatatgctttgaagcatgaaaaacatattttaaaaacaattttcattctcatgcccgatacttttagtctatttcaaatgaatcctcagtccgcatattgaagcacggctttttccgatgcggtgactgctgtcttagttcattcgtgctcctgtaaagaatagcacacactgggtaattttaaaacaaatttacaggctcagagtcctagaggctgggaagtccagtgtcaaggtgccattaggtttggtgattctgattccaggatggcaccttgaacgctgcgtcctcattgtggctgaaggtggaagggtaaacagtggaagagaacagagccactcctgagagccctttttatcatagcattaatattcatgagtcatgggtagagccctcatgacctaaacacctcccagtaagtctacctcccaacaccattgcattgagaattaagtttccaacatgtgaattctgggggatacattcaaactatagcaactaccattattaatttctaaaaaaaaaaaaaaaaaaaaaaaaaaaaaaaaaaaaaggtcatcttgtacctttgtacctaagaagagaaaacaaatgttctcctgtcactttgcatttcttgtttttggctatggattaatatcatgttgaaattttaaatttaatttctctttaattgctgttccggagaactggggaggcactctcagactttggggtggagtggttcttagatcactttttctaggaaccagttgtctgtcctcaggaggccccatcctggctgctggaaaggcaggggaactcttccctacctgtccttacaatcaggagctgcctggtgtctccagggtctgctggcggccacctggtgggtgtccagggactacaaagaactttcttgcctagtctcttgctgcctggttgagtagggaggaggctgccagcaagactgggattatgggatggcatcagccagatgaaccatacgtagctgcctgaggagagtcaggcttccttaggattaagctgcaggtgggatgctggcagggacaccaccacgcacgccaggccttctcccaagctttccattgctgcccgtttccaagaattcccccttgagcctatcacagtgagcacctagatctattggtgctttctgggcaacaggaaaaagaaatggcaaaacccacacgtttgcatattaactgtgctaggttggatttggaaatgatgtaactgtacattttgaattcagattacgagctgtgtgggtgagacaaccttaacttcaatatttcctgatatttctgtttttaagttggtacccaggatgtccctttaacaaatgttttgccctttcgttgtaaaggatctggggttgccagtgacttggctgacagtggtgctaatgggccaggtactgacgcacagttcaggaggaagctgaatgaccaggtgtctcaaacctaaagccagatgtgttccccagttgtctgtaaggagctataggctgtgcggaagtgtagggaggcaggcattttccgtggtagcctgcctggactgtcatccttgtccacagcatggtttttttgttgttttgagatggaatctcgctctgtcgcccaggctggagtgcagtggtgtgatctcagctcactgcaacctccacctcccgggttcaagtgattctcctgcctcagcctggggtacaggcacccaccaccaggcccggctaattttttgtatttttagtagagatggggtttcaccatgttagccaggatggtctcgatctcctgacctcgtgatctgcccccctcagcctcctaaagtgctgggattacaggygtgaaccactgtgcccagcccacagcatgttgattaaaggagagagatggccgagcctggtctcgtgattgctctggccgtggcaycttgtacttggtggatgcacagtgtctggcacccatgggaattaagggtaaataaattaaatgacacatccaaattgaggggaccagactgtaacttgggacattgcagctctgctggctcaactgctgagtagaagctcttgttggctgtgctaaatgttagattttttcaaattgctagacctctgccccaaactgttaatttccacgagaaatgtgatgagaaagacaaaagggtatattaaccagatacaaatagataactcttgacttgaatttataattgatttgcagtcatattggccagargctttttctggagtgagtctgaacatctgtactgtgcaatgctgagtkcagggtgggcaggaagcaagtgcttattactctctgataaggacaaagaacccctaaaacatgttgcactgtatatgtcctgatgaggctcttccaggtgggaagccagattttcgcctgggaggggcaggatatacttactccctttagcagctggtgctcaggatgtgggcagaatataagggggctatgtataggcatttggcacccaggacaggatgcctgtttcaaacagctttgtaaataagcattcggattttaccagcctccactctttttaaagccagtcttctattcttccagaatgtacttttatctcatgtctcttctataaagagcactaagggcaccctccttttacggggatacaggtcctggtgaaattggaggctcccagagctggggatggcagctgtggacactgtccagctcggattctcctgtgctccgtcatgtccaggacagtgttggcacattgctggtggctgcagggactctgtatgcacagatgcattccacctgggggaaacttgggcagtagaacaccgctgagatttcctgtcttggcggatctcaggaactgtccacagctgccttctcttctcagatccccagggccagcctcagtgggagctggttcctttgggccatcctatccaagcctgtgcctcagagaaaatccggtggcacccaaagtttccttgaagttaaggggctctagggggcctaagggagcctcactgattcaaagctaagcctttatcctggagtgagcagggttctgacaggaaggggtcagtattctcttaccaggtacacgttgccccctttctcatgcttacctgaaacgaatctcttcttccctaagtgaatgagtacctccttgtctcttttataagaagcgaacagtggttcggggagttttcagtgtttaagttccaaaatctttgaagagattgactcagatgactcaggattcacttggcacccgcttttgacatcagccatgctatattttcactagcatccatctggcatcttgggctccaaagctccttatgcccttgccacagctgagttcttggtgggactcaaggtcttgttcatctttgtatccctagtacttagaacatgcctgatgtacagcaggggctgtgaaatccccatcatcagtgaatgtgcatgtggatcatatgtcctatttcctgtacttgatgtaactctttggaaataccaagtcttcttatttacaaggtaaaggcagcactaatgcaaatttgattctgtaacctaggtaatgcacttttacattgtatggcttctgtgacatgactcttttttgacggccttatacttctttttaaattctctatgaaaagaaaggtacctctcttgagaatcaccccctcctgtacccttatgcactgatgtttccatggttctctcctcggtcctcttgatgtcatccacccccttggcttcactgctatggagtgatagtctgatgacttccaaatccatgtctctgtgaaggcctttctgggctttggactctggactccccgaccactgaaaatctcccactgcatggcccacatgtgtctcagactcagcattgcagaagctaagcttgttatccccacttctccccttgccgcattccccatctacccagtcacctaggacatagaaaccaggcgtctccctcgatgcctctcttttctgtatcttcttatatttaataagtgacaaagaggggacccgtagaatctacctcctcaaatgctcaaccatcccttttttctgttgctctcttctgtgatcttctggtccttacaccttgtacctgtgatgtcactgtgactttcttgtcctccatccatccgtccatcgaggacactcttccatctctgccccactctgtgcagccacactyggcaagttccctgatggtgcccggctcctcctagcattggcctttactcaggacacttccagtcctggaatcccctctccccgctgcccaccccgccttgtcatcttcagcttgaaagtcaaataaatattccttcgacataaaggctttgctcaagtgtctgctctcctttgaagtgttttaagggcccagggagaattaacttgcttcctgagtgtccccactcagcagcctgtgggctttcctcatatcatctgtgacccttggttgcactcatctctctgcctccccctccctcaccaactgcctctccccagattagaagcagcccgygagagcatttcactcctttttgcatccccagctcctagcaccgtgcctggaaaacagctgctactcaagaagtatgtgttgagcgcatgaacggggagatacacttaggctggatacagtaggattgagggctgctgttcttttgtgacttacctagattggtctcccttaagccaaggtatacacatcagagaaaggaggcagtcttaaaggacagcagtgggtcacttgtggttgagggtctcatcttacttcccgtgcagttagcttgttggtgaggggactgcctctgtgttgtggcattaggggactagaggaggcaggcccaagtctgcttgcttgtcatggctactcaaaatttccccagggacccttcatgcctttcgggtcagcactgccttccctaggctaagttaactctgcaaccaacaacagtgaggtatgaccgagattatctgtctggtccttacctggatgagattagggtgtcggaagaggtaatggaagaaaaaaattggagctgcagaattctgtagatcattatatgttttccggaggccttcccctatcttagaagtgagtgcctgtgtagtggttggtaatatcagcatgaaccagctactggcattcttgtctcccagctgtcccaacctccaggggttcccctagcttctaaaggttctccagaaaccatcttccctgcccccatcatgctgggcagtttctttgtttgcaagtctatccaagcctcttgggcctagatcagctcagattgatttcttgttgtacctaactgggatcagaaaccatctggtttcacctagttgaggggacattctatcaaatacaagaattacaatgaaaacttgtgttatgttttgatagaggctggtctttctgtctctattggagaagagtgctgaggatgggatgtgtgcttccagttgtaggctggaaaactatgtgttctacttatttcatattatttaaattttttaatgttttaatttttaatttacttaaattttaaattttcatttttattatttttatattttaattattaccccctccccttccttcccctcctctttctttttctttcctttcttgatagggtctcattctgtcatccaggctggattgcagtggcacgattactgctcactgccgcctcaaactcctgggctcaagccatcctcctgcctcagccgtccaagtagctgggattatagccgcataccaccatgcctgattgtgtgtgtgtttttttttttcaatttctcgtagagacactatgtagtctcactatgttgcccagggtggtctcgaactcctggtcttaagtgattctctcgccttggcctcccacaggcctgagattacgggcatgagccaccacacctggcccatattatttcttagcctttactctggaagttaataagggtttactgatcctcttgggactttcaagttaggatgaaattgtggttgatgccagcacaagaaacatgcttgtaaatgagcaagttgtagattggaataagtataatattccatcattggtttccaagattccctggtaattttgccttcacttagccaaaaacagggaaataccaacaaagttgttgctgtttgattgtaggtccaaataaattagttaagaccagagcttaggggagcatagttcacacaacaacgagaagagtgacaaggtatttaggtcattattttgattggtctctttcgaccaaaacaggcagatgttgccttttcaattagcaagaccctagatctgtttcagaagcccatctgtatgcgtaattgtaacctcagtgtcattcaggactgctctgtactgcctcctaggttgttttcttctttcctttctccatgtgagcctttaaaccgggtgttattattctctgcaaatggccaaactcatatatgtttttgtcattttttatgcagatttcagcaacgtccctgatatcacaacaggtctgaaaaggagtcagacagatggcactctggatcaggtttcccacagggagaaaatggagcagacattcagggtaagatactggcccaaatcgcaaaccaagaaccaggcaggcgagtgttagttcccacctttaccyaaggtggggaaaggagatggagttacctatctctaggtccagcagttgatacaaacatacatatatatgttaaggatacagcttccttatttatgtatttttttgaagtgaagtactactaatcggaaccatttgctctagccagaactcctccatgacttctggtatgccatcaaagagcrgtgcacactctgctgttcatatattgtgctggctttgcttagcaattttgacaaggaaaaccttgtcaaaaggtgttaattactaatctctttctttcttacttttttttttttggctgaagataaattatttttggaatgttgtcattttgtgtgataaaacgtatataacataaaatatgccttttttactattttcaagtgtatgcctctctgtggcattaagtatattcacattggtttgcaaccaccaccaccatctagaactttttcatyattccagacagaaactctgtaccccttaaacaataactctctatttcccctgctttcaactccctcataacttctattccactttctgtctcatttgccaatttctaggtgccccatatattggtggaatcacaatatttgtccttttgtttctggcttatttcacttaacatatgtcttctgggttaatccaggttgtggcatgtgtcagactttcattcttttttatggctgagtaatattccattatacggatacaccacattttgtttattcattcatctgttgatagacacttggattattgctgctgttgtggataatgctggagtgaatgttggtgtaagagttatctgcgtgaatccttgttttcaggccaaggagtggaattgccaggtcatgtggtgattctctgtttagctttttgaggaacagcccatggtctcccacaatgctgcactatttgacattcccagcggcaatgcaggaggcttctacttcatccacatccttggcagcatttgttacattccattcctttcctgcatttttaactgtttgttgtcagctaccctttcagaaatggtctgattgacataatctgtgttaatatccagtccagttttaatcgattttgaaattataagtcttctgtatttgtttttgtcttaaatacaaaataagaatggaagaaatagaagcaatgataggcatttaaatgaaagttataaagtggaacgatgsctcggttgggtttagactaacactatcacaagattcttggggtatcacttcaccagccggaaacctctgtggccaagggtgcttttgcccaagttttgctcgggcccactaggcccactcggcccactcgacctggcaggctgtgctcaacttgcactactggcctgcatcccatgcctgccaagagtgagcagagtggtgaggggtgtgtcagtgagcgcagtggtgaagggtgtgtcagtgagcacgtgtggggtctggccaccacacacaggcaggaatgctggctgtggtggggcaggcagcagctgcaggctctagcacgggcgccggttccctgtgaagctacggctggatcacacatattacaagcagtttccatggcctgcatcagtacctggaagcttggagatgccaggaaccrctgagccccaaagagggtggcatagccctggttctgggaactcctaggtctgggctccctgaagggctgcagctcttctctcctcctcttttctctccttgtcacctgtaatgtggcgagcaaggggcgtgttttggccctgtttgtgttgtagctctttcagccctgccgttaggcaggtcccgaattcttgtcccrtgaccaggaagaaggaggtatgcgggcaaggggagggtgagcaaggtgaagaggagctttattgagctgtagaacagctcagaggaaacccacagtgggtagcttctctctgcaggctggttgtcccatagagtgttcacctctcagcagagagcagaccctggagtgggtagctcctctccacagctggtagtactaatgtctgcttagctttaagcagagaggagaccctggagtagctcctctcctcagctggttgtctcattgtctctttgagtctggctgagtccagggctcagaggggtggaaatgtgcactgattggtccatagtggccatgagcagrcccagaaaaagctccataagttcccactctggtctgtgggactggcagcccagcccccagacttcaggccttccccggcttgaaagtggggcttttctggggacccactcctttccacccaggagcctgtctgcgtcctgccactcttcctggtgcccaggctgtttgtgccaaagggtgcctgcaggccagggccgagctgccctcagtcccctccttggcctgcctcccatgctcattggtgcccaaagtacagcagggggctggcatgtcagcgctgccctgaacgtgtccacacatggctgggttgcagcagtgcctgggcttggactcaactttgctccaagagcagagcgggcaccaggagtagggagaaaccaggcagtgggagcaggctactttcgagcctgtgggggcaatgggtccttcctaggcccctgagagtgcagagatgtctgggtccacagtcgcggctacgtggctgcagcagtacccgggagggcggggctccttcctgctcctggcccccaagaacacagggatgtctgggtcagaagccacggctgggcagtcacagctgtgcccgaggagcacgaggctcccgccctgccacttcaggattgggtggggcttccacattctcagctcctgctggctccatggaacgcacagcgctggccgtgcctcccccggtgcagccggcatcatcgcagtgactgttccagatgggccaccgctgccatcaagaccaccaggagccaggcacatggcacatcctttggaggaaccatgtggcataccttttgggggttggtgacatcccctgtgtgtgagggaccaggttagagcctgccagcttcagaacggatgcttctggttcygaagcagctggtttgatgaagcagctatgggctctcagcctcccctctcttctccctttcacttcctcactacctgctctcttctcccgttttccatgcaccttcttccaaatttctcctccctctcctcctcattcctcatgcraagcaaatgctcagctgccttcgctggcctggttatgtcccaggatgcaagttattttacaaaactgaaattcatcagcatttttagtccttctactttgttctatctctagtgggttatttaattttgggaacccaatatcatatctaatgttcattagctttttaatgaagcagtggatcctagagcatcaaatagatgtgttttgatagccttgtcttaaattatttttaaatcttattttaataatacaatagatatggggtctcactatgttgctgaggctggtctcaaactcctgggctcaagagatcctactgccccggcctcctgamgtactggaattacaggtgtgagtcactgtgcctggcctgacttaaaattttttagaaaatcaaatcctcctgaaacactgatagagcaaggccatgtatttaaaagttaagtgtgcctgtgggggccctggcacaggatggtagcttgggggactctcacttaacaccgtgagggataacgacttctygtctcttatgatctgcttgagttacacatcagagctcttaagaaggaaattgaattttttcccaaagtttatcttaagattcagcaaaatagatatgcaaaaagttagcacgttaaggccattgccaactctgttatttaacaatgcctatggtaactaagcaaaacatttacaaagtgaacattggagcatcagaaatttagaagaggagagaaagctgcaatcaggttgaaattggggccgtctgagcttcaattttcattgttaaaagtggagaaaggagaaagcaaataataacatcaacgaacacagaagaaaaaattttattgaaagaatatgagcatgttaagcatttgctgtaaaatccctctcaagtctaaygtagttatcaccttacctttttaagatatgaagatttccatgtataatgatagatttcagtgcattttttaaaatctttggtaaatacctagcagttactcagtttccctgttctttgtttcttgggaaagaagaatcagtggccaccaaaagtaaaaactgtggtggacattagtgaaaagaaaaagaaaatttcaaatttaaggatcacatttttttttctgttccgtggtttttttaaaaaaaaattttaaattttttttttttttttggaaacatcgtgttatatctaaagcaatcctcttctggattttttttttattgttttaaattttgttttattttatttttttgagacaagttctcaccctgttgtgcagcctggagtgcagtggtgtgatctcgactcactgctgccttgacctcctgggctcaaatgatcctcccacctcagcctcctaagtagctgggaccacaggtgcctgccaccatgcccggataattttgtttattttttgtagagactaggtctcactgtgttgcccagtctggtctcaaactcctgggctggagcaatactcccgcctcagcctcccaatgtgctgggattacaggtgtgagtcaccgtacccagtcctcttctatttttgaagtggtgatgtgggaggtgtctggtgaatgcctagtgtgtgctgggagtggatkttttgggactccccccgccccaccccctgtgccatgtcctcagaaggtggtctcttctcagggagaagatctgcctctgttttctgggcttcctgccctagcccaactggtcttctcaggggtcattaacttcttttcagattagaccctggttgaacctgggctgttggggatattttactaacaactattctagacattagaataaagaataatttcccttgaaaatcaaatgaagcctggtttgatgaagcacagctgtacccagggcttttgacagccccgcaatttctgcaaatggttcctaattgattggcttcttctctgtaagggtgcctattactgtcatagctctttgtgtgaccctgtcagcctctcctgtagggggggatttttttccccagtattgttagcaattagcatgtgctattgtaatagtttggagtttgaaagaaatatacaatgtccctttgggtgaggaggttgaaagagtttttggtttgttctgggaacttaaggtatattaagcagtccccacagacatgctgcctgcactccacctgctgagctggctctgaggctcaggagacgtggccctctgtggtcccattgtctccacgtctgtggtaacccggtgcctttctagagcaggcaggctcccggcatgggtggaaacagagcagggggccagcttcccccaatcaccggtgctgctgtggaggaagagcttggtggcgctaggacgtccttgtgaatgtgacttggaagagcagtttgggatttttttcattgcctggggatgagagggagagacaacgtgtgtcttacacatctcccaacagccgacttagatgtgatccgttctcccagagggagcaggtttctttgaacttttcctttttatgtacagcatgtaagtaaacaagggctttgattttcatgggtaaagattttgatccaaatgtaggcatgcttgcacggtttccttttcttgattgaaagttgattttgctctaaaaatgtctaaagactgatatgcagatgagaagagatgcctttctccccagaagggattctgacagtgatctttacatgctttttacagctaaggataagagaacttcttttggatacccgttctgtggcgctgtcactgttcctttctcattccaaaatctttaacttcatctccgaaatagttctttctttttgaaatataaagatatcagaaaggcctaggcaaatatttactctacaaaatatgcttgaaaagacagggaggaataatttgaatatagcaattaattgtatgcttgtaaaatttccttggagtatagcacatattaatacttatattgggtttaatactgtaaaagaaaattcacaaacatgaaacccattttctacaaggtaagcagagtttttaatttagttattcttgatgaaataatttttcggctttgtggaagaattttatgtaatcacctagtgtcgctttggcagggattatttttgccgtttgtaggcgttgtgttgatagaacagagagcattgagaatctggagatacacagcgtgacaactgtgtgttgtgctctttgcaatttaatcttgtttaagatataattgatatattttgtcctgtttattttttctaggcagaaaaaaaagaacgtgcactagtggctatggtttttagtgtacagcgtgaacaaaacttgcatttagtatttaatttctgctcacccacttggcttaaccttttgagtttttttttgtcacatgaattgcttttaagagcttgcctatctaagaagctgaaggaaaagaaaaaattattggaccacatgatttgctttccagcattcttggagttttcgtcttcctttggtgtatacttgcctgcattattgcaagatctttttggttatgtttttgttaggcagtcaagctaaaagataacttatttataaaccgtagtctttctccatggttgctattcaatagatgaatagaatcatgatccttttcttaaaaccaaacatgcctatttctaaatgcaagttatgtgactaaattcctattttaatgcacggagagatggcctcctcaaggcaaacgctttgtccctgaaaaatggtttggggtgtggcagtctccagcaggaagacaataatctgtcacaaagacctaattccaggtagccctttcttggaggcagtggtatgttggaaagaactcgacctgatgcttaaacctgaatttgtattcccatccaccatgccttatcattatgtgacctggggcaagttacccaacctttgtaagcctgtgtgtcctcctctatgaataaacataacaccaccaccaacccagtgttgtcaaaggaatcacgtgagattatgtccaactaggagcactggaagcaggggagagaggattaggctgtaagctgccccttcctggtgcgtctcccatgtatacgtgtgtgtgtgaaggttttccctgttgctcacctaatggcctcttgagctgagattcgatgtcaggtaggaaactgaacaaatagatgagcacctcaataaaatgctgttgaaagtaagacgtgcatgctttgaccatctcagctgcccacccgtgttcttgaccatctcagccatccacccgtgttctcgaccatctcagccgcccacccgtgttcttgaccatctcagccgcccacccgtgttcttgaccatctcagccgtgttcttgaccatctcagccgcccacccgtgttcttgaccatctcagccgcccacccgtgttcttgaccatctcagccgtgttcttgaccatctcagccgcccacccgtgttcttgaccatctcagccgcccacccgtgttcttgaccatctcagctgcccacctatattctcraagttagtgtcagtggtcaacttctcccgaaccgtcccatgagatgaaaatgaactagaaaccgaaagctgtaagaattgggtcctctttgttgtctgcatggagacaaagtctgctcaccgtgtagctgcttttttttaatgtatagtgttgtaaatggatgagcttttccaaagggttgcttcaagtgaccaaataaaaatagtgtatgttagatctgcctttccctttagcaggagtaggctgtgaacaccgagatgcttagtgaagcctgagcggctctgccagccgaggagggcttgcagactttgcccctcctggaagagaggcggcaaggacacagatcaccaggggtcagagttgggcggagtgtggcaccagcccatatgccttattctgcctctctaacgccacacttccttggcagagacttggaggcaagtttgtggacttgtttgaaatgactgtgctgtttttgttggagtctcaaaggccatttgatctctttgtagtgagttggatttttttttwwwaaatttcctattttccgtgctccagagtatttgtgccctgctcttcttggtctatccttggtcattagggtggatgtgtcaggcagatgccaaccccttgctgggtgtggcaggaagacggtggctatagaagacattactgtggcataaagcacacagagacctgttcttttctttgccagggataacttacacgctctgttcaacagggttggcaatgtcacttacgtgtcaacaggaaaaacaggaaaaaaaaaaagagtggtattgagaatccaaaagacagcgttccaagcaagtggctgcctggaaggccctttggcaatggagagcttgtcctgtagagagggatgaacaacagagcgtggcaggaaggcagtggkaagaaacttgctggtgacctttctcgccatttcttgcaactggcccttcccgtcagctgggctgattcctcctgccaagtgggtccttggacagaggcaaactaaaaagtgggcagtggggctgttggcatggtctgtgctgtgggctaactggggccaaagagaaattgccagcaacaggaagttgcctgatgagtcctcagctggctgtgcctttgccaggcaggcttttaaaactcagacatggggtgttgagttattgaacgagactttggctggggctcagagtctgcctgcagctgtggcagagggcctgtgttttctctattaaacatggaatacacgtatgtctaggagcagagtatcatgcaaggcagggggacttgagcctggcgaggctggtctggaggcctggcgggctgcacagtaagaaccccaggagccctgggccagcctggccccaccagtgcttgtgtctcctgatcctgatctggaaagtaaggatgatggcacctagcacacagtgaggttggaaggatgcagggaggtcaccaattgcccttcttcccctttcctttctgtctttggatcactgaggcactttcgtcagcacaactggcttcccagcctctttttttttggcagagaagagtttaatgaaaaaatagggatttgcattacaaactagggacaaaaagaagacatcgttttaaacttgaagttatagaaaataatcaagcgtgtcttacctctttttaaaattattattatactttaagttctgggatacatgtgcagaatgtgcaggtttgttacataggtatacatgtgccacgctggtttgctgcacccatcaacccatcatctaccttaggtatttctcctgacgctatccgtctcctagctccccacctccactacaggcyccggtgtgtgatgttcccctccctgtgtccatggttctcattgttcagcttccacttacgagacatgtggtgtttggttctttcccctgctgttttytgtgccacagtactttcctacctgccttcctctgtccctgctttcttcttttccagacttttctctttcatcttgtttttttttttttgaaaaaaaaamaaacaaaaaaaaacacaagttattattcagagtcatcttcagaatcacaaaataaagaagtaaaaaagagaagttttagagagcagcgctgtgagagctgcagtgtgaatcactgcgctggggtgggctggaggatcagggcctgtcaggtggaatgctggctctgaaattaacttgctgaagagataatgacactcccgttcctcatcctgctgggacagtgatgcacaggaaagtgacttggagactactcagagctgaggccacacaaagatttgactgagcagagatgctgatcttcacctaatgctttatttgccacgtttatttctgatacaggcttctcctttttctctccattgaaacagcgggtgccatggttttgctctcatcctgtctgagatgacacttgaagtgggatatgtttgaccttttcaaggcaaacagaaagccaagttcaaggagtcatcagccagctccctgcaacttaggtggtcgtaagggacctcttgccagagctgcttgaggtctcccctttaattttgtccacctggatgacagtgaagatggggttgaacggcaagtgtcccatgtctgtcctctttcttccatcttccctctccatgcccctcagccctctatttccagatctttatttcctttctgggcttctgaattagagatggagctatggagaccttgatataattttgctttctgtgggagaagaaagcaggaagtttgatttctcaggccaaactagcctcagtgtaaataccatttgcaggttcttgcctattcttcttcttatttatttatttatttttgtttttttgagagggagtctcactttgttgcccaggctggagtgcagtggcgcgatcttggttcactgtagcctctgcctcccgggttcaagcaattcttatgcctcagcctcctcagtacctgggaccacaggtgcacgccaccatgcccagctaatttttgtatttttactagagacggggtttcactatgttagccaggctggtctcaaactcctgacctcaggtgatccacactcttcagcctcccaaagtgttgggattacaggcgtgagccaccacacccggcctgttcttgcctattctttggggaagccacctcgacatggggtacactcggagtaagaacacatgggttgggtgggcgtggctcacgcctgtagtcccagcactttgggaggttgaggctggtggatcacttgaggccaggagctcaagaccagcctggccaacatggtgtgaccctatctctactaaaaatacaaaaattagataggcattgtggctcgttcctgtaatcccagctactcgggaggctgaggcatgagaactgcttaagcccaggaggcagaggttgcagtgagccaagactgcaccactgtactccaacctggatgacagagcaagactctgtttcaaaaacaaaaaacaaaacaaaaaaaaaaacacaaaaaaaaccatgggttttttgccctaagtcttacactgaggagccgtttcttcatccttgggtaagttgtcaaacttccctatctgtgaaactcaagggtccgtctgaccagctgtcctgccctgatgtctctccctgtctgtctttctgcctgaatgcctgatccaaagcagctttctgctagatatccctttttatccccatgaatatggagagctgcttacaagaagaatctcagcagaaccctattagaatttgcttcggtcgtttattgtccttcatgcatttcatcgaagctaaaacctgtaagatttttggaggcttctcaggtaatggtatgcgaaggtcaggatggttagataccgtatttccagatgctctccgctcttttatgcacttacgttatttaggaacttatttcaagcagaccatttgagaatctgaggaaagctatgggtccccagaagattgcttatgcacatacgttagaaattgcagacaattccagggagctccccagtcttacgatgtttattcacagctttccctgttaggaatttatgaaccgtcagtttgtgatccttactttgagtaaacatctgaatagcctagcctgtgtcttaatattactgatattgcagaatcagttatcaagtacctgcaatatgaacagcactgtgtttatatagtcaagtgatattttgaactttgtttttatcttagtctaattgcttgggtgagattagctattaatgctttatttttttaatgtgctaagagatgttgaggaacgttaaataaataacaacccctagatggcaaataaattattaggttgagaccagaatagattatattgatgatggtggttagacatccccagattttttttttcttttttttttttttttttactctgcacttcaatggatgcaaacccaggttgttaaacaccaatcgcagcattacgtgctgggatgttttggcattttgaaagttttattttctatcattagtgaacaaaatgggtttttttttggagtaagaattttaacattttgatcccaaaccaaacttttatggatctctttagtaaaataaatagctgtctgatggactaggaggggtgttttttatgctcagcgtaagggacgctcaggtggctgtggctcctgtgttccccggcaagggcgttgccagtgaatttcacccttcccctttccatgtcagcaaattagctaagcccttgttgtcgtttgccctttttcttttaaagaagtaataggcacaattactatctaattttggcttgccactgtgtgggtgcctggaatctcatccgatctttaatatttacccaggggggtgggtgtagtgtcgcattattcattcactcattaaatccccttcaccgaggcctgctcagatgcttgccattgttcaaagttctgaaatcgtcacctggctgccttctgtcaatattcttgcgtagagattgtagtccaatgaaaaccttgtactgagtgaaagaagatgtgtttgagtttcaaggcattttctgtgcctttcatgactcatagcagattctcaccttgtgataaagttccggctccacagtggtggctgcttttgcttttgcaaaagtaagttgtgagaaattgttctgagtcattttgcaatttcctctatagactcagctaagagtagatgtgtgtgtcatgagtagatgtgtctggagttgagggaggaggggtcatggaaaaactctgcctggaagtgcttcatccaggtacacatgatggtattttcaccatctcaaacactagcttctaactgctgaaggttaagatgggatcattcgttttgtaaatccgtctcctgctgtcttrataataacatgaagaaaagggcaagaaaaacatggatgtgtcattagtatggaaggaaggaggagaatggaggtttgttttaaaggcacccccaattctctttccctctttcatcctttcgttggttcttgccccttccacaccccgactgtgtttgttcagcctccagcgcatgctgccgcctctgctattcacctgcctttgcgctctctcattctttgctgccacytgagtcctctggtgttttcagaaaacagctggcagaggaggaggctctgagatgtgcagttgcttagaaggttctggcctggcatctgcacagcggggatttcatcaccaactgctcagaaaccacaaatgctgcatgcctggaggagtcctgccatcttcctaccttgcatgccactctcagctggttttgggattttctatttatttgtttgtttgtttgtttgagatgggtctcgctctgtcacccaagctggagtgaaatggtgcgatcttggctgactgcaacctttgccttccaggttcaagcagttctcccacctcagcctcgcatgtagctgggattacaggcatgcacaactgcacacagctaatttttgtatttttggtagagatggggttttgacatgttgtccaggcttgtctcgaactcctgacttcagatgatccacccacctcggcctcccaaagtgctgggattacaggcatgagccaatgcactcagctgggatttttaagagtttattcccttcttggttcattcaggcatagataaagggcagtctgagggcccgggtgacacacccatcaggacaggttggtgctctgccttcctctcatttgagcaccgaggtcttgaatttggggcttatacagatgagttaccaagatggggaaaggtggaccatcaagcagtaatacaacgtgaggcttacaggtaacttctaagtgtggggctttaaagaaagtctctgttcacattctgtcaccctcactctgtctcttccatctttttcttgcctgagtgtcctggttctgctgccttctctagatccccagctcttctcaccaccagggatacctggctttggttcccatgtatttattgatttctatttttaagaagtttgatcaaaactgtcaagttatttattgaaaatgatagttgtcttagtttaaatcttattccatttctgttagaagtcagtgtagattatagagtggtaaagtctcagataaatacttatataaataaagataggtattgttccatataagattatcattattttgagaacctgttgatgagggtgccagatgtgactgttgcattactcaaatccagcaaaaaacactgaacaaaaaccataattaaaggggcacacagggtatctgtgctcactttaaggcaagtagcccttggcagtacccctgcttaattaaggttgccaggatattaacatgtaattgatgttttatatacttataactttcctcccagaagctacaatttttttgaaaccagattccaagcattgttttaagccaatattagaagagaaagtgtagggctttctaagcatgaagaggatgtgatttcagacgaaatcatagcacctggaccctgtctccctgcccccatcccattcttcataagcgatgaaaagcatctttgatccatgaaacctgaaaaagcagccatcagtagaagtaagtgtgacggctgaaggtgtcataagatactaatgtaccagtggggaatgggatgcaaggctgctcagcctcagtagcccccttggctggctgagcatctttgtgggctccgcttttaagtggaaacaaaagattgctgatggtaggttgggtgtggtggctcacgcctgtaatcccagtactttgggaggccgaggcaggtggatcacttgaggtcaggagtttgagaccagcctgaccaacatggtgaaaccccatctctactaaaaaaaattagctgggtatggtggtgcacgcctgtaatcccagctactcaggagcctgaggcaggagaatcacttgaacccaggaggcggaggttgcagtgagcagagatcgtgccactgcactccagcctgagcaacaagagtgaaactgcatctcrggtgggggyggggggcagggaagaaaaaaagattgcagatggtgaaatttaaatgcttaaaaaaatctttaagaaytcataatttgcctgcaacaaattcaggtggtgacatagtccctttcattcccccaagtcagagcccgtgcccctgtgtgtctgtccccatcagtgaaactggggcttggtttcttctggagaagaataatccagggcaagtcaagctgtttgttttgcgcccctgtctctgttgctgagttgctgtcaccttgagttggctctgattgtcccgtggcgaaggccatcccaaacagcacatttgcagtatgtgctcggagagtgggatacataagaaacaggagagttaactagaaggattttccctcctgctctactaagttggaaaggaaagtagatgtttgtctcttaatttgctgttgcacaaagtgaaaagatacttggaccagaattgctggagctttccatgcactcacagtgggctttggaaaaatcattcactcccttgaatccttatttgttaagaaagtgggattccatttccacaactgtttcatggctgtgaggtgaaataaagactaggcatgcggaatggctttgtaaactgcaggggtgctgagtcagtctgcggagacttagcccatggcgaatacartgtgttttaaatacatcacttcatttaaacycgttttccccacaaccctattgaacagatattaccagccccatttagcatgagaaaactcaaattcagagatgtcaactagcaggccagtgtgtcctaggcagtgactgtaccacggatcgcgcccagccctgccagcttctaaagcacttcttcccatgacaccacactgcctcgtaaggagaatatggcactgcgtgtagaagaaaggggagaaaactgtatttaagtatcagactcatggcatatgggtgtatttactcttcaattgatttaaaggtagagcgactgtatttgtgaaattgcaaggtacgatgttagaaatctggacacgactttttggttctttagcttaatttacaaagttggttacacccccgtcgacaagaggaatctgtgaggatatagagatccaaggcttatgttccaaaagcaggtagactgtgacagctggagagagccagcagaggatgcagcctcctcagcagtctagaagcacatctaagatgcccaaggagtgtcggcaaggaactggaatgggcgcaaccgaattattttctgagcatcttagaactattatcagagcagagtgcttggtctgtacctgggagccaggtgctgctctattttttgtttcgttttctaggttaaggcagccgggaacccacatggattacaactagaaagaaaatcaatttctagggagccagagaaagggaggaagggcttagtgaagggasagtctgggctcaggtagttgggcagagctgtcctaagcaaagctgggtggacacagcctgaactgctaagcctaagtatgtgggatctcccccttcgagtatgcgactgaattttgtcctcagttttctgtaggatagactttacctgcccaggaaattggtggctaacggagatttgtcagagctctagtctgtcaagaatttggttatagttgctgttattgacacattttgtcttcaaataaagtgataaagataatctttttggcgctttattgtccaatcatgaatatataaaaagaaaaaagtctcaactcaatacggtctcagagtatgtaacactgaagacctttcctggctgggcatgatggctcatgtctgttatcccaaaacttggagaggctgttaatcagaagcaaagccatatctttctttccgggtgaaaaatgggttagagaaaatgcagttcctggcagaggaggcatacattagacagattagccttaagggtagcattgaaactcccagaattttatgtgaaagaggtggctggttgtgtagaaatgctgccctggcccttgaaacttccttggcagagagaacatcttattcattcctgaattccgaccaaactcctgttaaataaggaaaccgagcagaaggcaggcagcgaggacacacaagcccgacgctcctcctgttcccrccgctctggcaccagctgctcagttgctccgtcctggggagcaggggtcctccctgtgactctggtctgggaagccccacagcagtgaccatggcgcttcctctctccagcatgcagctctgacctgccttcctgggcatgccccctaggcactcaggatttgccacttgggacatgcacatgctctctgccttctcaggaaagtatgtccgcatttcctccagacagcgggtggccactgcccacctcctccctctctgaccatgactggtgctgctcattccagccctggccttctgcacgcctcccctcgttgttactcttcccatagccctcgccactttattgagatactgagttttgttgtcactgtgcctgttgcctctttctgccttttatccctacacccagaacagagcctggcagacaggaggtgcccagtaagaaactgctgatgagatgaatttgactgttcttgcccttcctttggggcactcgggaaatttattcttccatacttgtaaaaatagaagaacttgagacattgaatgccctgtgcaaattataactttcattgagccctggcctttgtggaatccttgtactatgctaagtatttttacactgaatgctcttgaccaccctttaaatgtgacccctgcttttataggcaagtaaactaagtcatggagcagttagccatgatcacacagctggtcatggccatggccaagaaaggtttgttataactccagagcctgtgtgcctaagtctcctgtcttgaaagaagtaattgttgaagaaaagcttagtctcaagcacattctgaggcccttggtgtgagtttcacacttacagtgggattgtgaaagggggcagagcccaggtgtattaattcattttcataccactgtgaagaaatacccgagactgggtaatatataaagaaaaagaagtttaatggactcacagttccacatgactggggaggcctcacaatcatgggggagggtgaaggaggagcaaagtcacatcttacatggcggcaggcaagagagcgtgtgcaggggaactgccctttataaaaccatcagatctcgtgagacttattcactatcacgagtacagcatgggagaaacccacccccatgattcaattacctcccactgggtccctcccatgacacatgggaatcattacaattcaaggtgagatttgggtggggacacagagccaaaccatatcaccaggtgacacctgtaccaccgagagtacaaatccaccacatagcccatcatgctgtcacctgtaagctgtgtgtccagtaggcaacaggggctgctgaactcacctccaggtgggtctcctccacccactcctgctctcccctgagctcgtctccttcacagaaagttcaccacctcatgcccctcgtctttgtggygtccacagttcctaactcgcacctgccagaccctgcctctctgtcctgccttgggccacagttacactggccttcaattcctgacacactctgtgcttcccccagccccaagctgtgcacagtttagctgactttaaccctggctccrgtgttagctgttcctgtccttgcttcaaccagagtagctctctctgttgtgtttccgtaggaccccccactttcggcactggtcacctttgaatgacttgcttaaagcttgtcttcccagccagactcaaggagtgattatgccagtcttgttcatcaaagtgtctttatggaagcagaatgtcttatcaggccttttctgcctcaaataattttttttaagtggtaggaaaagattccattaaaaattgtaaraattcaaccgctataaaaaaatgagaaaactcagataagccaaaagattaaaataacttgaaaggcagtgttaaccactgcatttattatacatgtagttcaattttataaaaatctatgcatacatatttatataagtaaatatacataaaattacttttaaattactttaaaatggcagagctactttttttttttttttgagatggagtctcgctctgtcacccaggctggagtacagtggaacgatcttggctcactgcaacctctgcctcccgggttcaagcagtcctcccaactcaggtcctgagtagctgggattacaggtgtgtgccaccaagcctggctaattttttttttttttgtatttttagtagagatggggtttcaccatgttggccaggctggtctcagactcctgacatcaagtgatccgcccaccttggcctcccagagtgctgggattataggcgtgagccactgcacccggccctactttcttcccttaccagtaaatcacgtccttctcttctggtcagcagatgttggtctctggcatcactggcagctgctgcatatggctcctcttcatactgcaatttctttaggtgactgtttactttcacagtttatgttctcattctgcccaggaaatagaacctttggaaatggaactgtctagtctagaagacaaataatatggggctctttggagcagcatttcttcctcctttttgtaccattttgataaatataaaaatttcatacaatttccctggagtatttagtgtatcactataaaatgaatggtttgtcctcaactttaaatgtctctagtcatcttgaacctgttttttaactcccaccacaccctgccaaggggctgacgtgctgcccttttcctyctccactccacggagcatgccggtccaggagaaactggatgtggtgttgccctctatcagcctgtgggccctgccagcttccccccaagcactaaatagagttcagccctgaaatcctgacctggctgcagtggggtagcccagggtagctgcagctggatgtgcagaccaggagccccttgttcccactgtgcagtccagatgtgcaggatccacctccactcaagagcatcatctgtgttgggcatggtggcttgcgcctgtaatcccagtattttgggaggacgtggcaggtggatcacctgaggtcaggagtttgagatcagcctgaccaacatgatgaaactgaaaccctgtctctactaaaaatacaaagattagccaggcttggtggcacgcacctgtaatcccagctacgtgggaggctgaggcaggagaattgcttgaacctgggaggcagacattgcactgagccgagatcgtgccactgcactcccgcctgggtgatagagtgagactctgtctcaaaaacaaaaacaaaaacaaaaaaaaacaaaaactggggaagtagtcattcagccctctgtggtccttccagattccatccttgccagtgatatttggggataatactagatctttctgtaagttagacagtgacttttacgaagttcagagtgagttgagaaaaagtccttcgtgcaatttttagtgttttttttttcccgttttcctaaagggaacttttctgacttaatgaatttgcttgaatatgacagctgacagtgtcattgcgctctgagattatttagtagtgcagcctccccatgccttccagacaatgaactgggaatattgtaagtgctcagtgtatgagaacgcaaaccatataaaccacaccctttctggggcttgactttccttaaggataactgaccgtttgtcccaggcctaaatgtattttgtattttttctagcattctatttcggtgcaggaggagcagcagaaccctagttcttctgactgatgtcctggtttggggaaactctgaggacatgagacttggattcagtccaggctgatggctcagcacagagtgggtcaggattcagtccaggcctatggctcaacacagagtgggtcggcatgcggagggagagggatctcccgccagggatctgccgaaagatcatactgcaaagtgacgggaccagctcaccgaacagcgtggcagtctctttcctagtagctttctatgttggttacgtctgttacggatccycccccaacatacttttcctctaaagcaggaattgaaatgtagtacacactgcaaatgctgtccttcatccttgtttctgtatgccacattaccccaaattacgcagcacttttaaaccttttttcttagactgaaagtgttttctgagcccaagcaacacaaacaggtgcctttgacaagagtttgcagtacccagaatccctaaatgaggccacagctgcaccctgagccaggaaaggcgggcacgtagctcagcttctgatgcagtggactcctgccacgtatttcatgcagtagctacaaaatttcaggcatagtcttgaaatagttctgggtaatgtgatgtacctaccccgtagtagtttaaagattccaaaackcacaggaaagttgaaaggcctcaggctgtgatgtctctgaataagacaaaagagaatatcaaagttgttgtgatcaagggaacagatttcacaaactgtcatcaagaggaggccatcatggtatttttctaatgaaaagtattgcactgaacccaggttagaaggttcatctgagtgactcagagcttggtttgacaaagactctgtccttcaaagaccgtcaaagagggtctgggcgagctgcttgatcgtcctaagcagttttcttgccactcctaagaaatgggtttatgggctccttgaaaatagacaagaaaatgtccttatccatacattaaaacacaaataactgcttrgacgtctgcctgaattcagagctcttgagtgggatgctcctcatctataaataagataaaatcattttcaagcagggatcaaccttagtataacattaaaaacctgaactaaaggcccggcatggtggctcacgcctataatcccagcagtttggtgggaggatcgctggagttcaggagtttgagaccagcctgggcaacatagtgagaccctcccttctctactaaaaatcaaaagaattagctgggtatggtggcatgcgcctggagttccagctgcttaggaggctgaggtgggagggttgcttaatttcaggagtttgaggctgcagtgagctatgattgtaccacagcackccagcctgggtggcagagtgagaccctgtctcaaaaaamcaaaacaaaaacaatttgagagaaaattttttttgggggggggttggggttcaatatcattgcttttccagatagcataatttttggaaaaaatgtttttatttaatctttttatgacttcttaaagaaaatattggtttcatgctcttttatgaaagctgaggcctgtgatggacccaagtttgtagcattgattgctacaaactggaaaaaaccaatctgaggcccccatttcaagtgcccgtgttttttattctgcatatgcacatcctgttaggccactgaatcctcacactcccagccctaagttatgatcatctgtcttttgcttttatttatttacttttagagatrgagcctcactctgtcactcagtggtgtcatcataactcactgtaaccttgaactcctgcctcagcatcgttagtggctgggaccacaggcatgtgccaccacagccagctaatctttttatcttttgtaaagatgggtttccctatgttgtccaggatagtcttgacctcctgggctcaagccatcctcctgacttagccttctgagtagctgggaccataggcgtgtgccaccatggccggctaatttttttttatcttttgtagcgatgggtttcccttatgttgttcaggctggtcttgaactcctgggctcaagtgatccacctgcctcattctcctaaagtgttgggattacaggcatgagccactgtgccagaccagtcttttgcttttaaagcagcattcctggggtgggggtggaataggctcaatagatgtcccagttgtctgcatatgagctgtttytgcctctctaagcagaggtggtctccagaggcaggtggctgcatccctagaacacctggggccaggagagccctgaccacatgggaggcagaggcagcaggaggcgtgaggaactagattgctttgcctgtgctctgctaaatacctgggagtggcaggggctgtgcggacagctagagaggggaacagagctagagacggagcacagctagagatggagcacagctagagacagagcasagctagagaggggaacagagctagagatggagcagagctagagaggggaacgggccctgtgccatttaaggtctcgctgaagcctccttgcccctcagctggaaagccctggagagtcatggtaaagctgcaatgctggcatgttctgtgagaaacctcccaactgtgccttgtgcacagcagctgctcrgcaaacacgagtttccttttcttcttgacccaaacggcaattttagcagttacttgatggaataggcattcctgctgccttttcatcaggaaggacactgaagacttagaatcgmgacttgcccaggagtgcacagaaggctgggggttgagcctggactgcagcccaggccttctgactctcatctgtgcttttcaggcctatcaccatatatgcatgtgaagatatcccagcccagataatcactattcctataaagtgctgatcaggttcacccagaatgtccctctaatgtttgtaaacatcacgaacartgggtgaactgaaatgtaatcacccaagtgactccttcagctacaatctgaaaagacacacttataattactcttctccttttgggggccctgcctccttttggtcccaagtaatcctcaccaactcccttagacaacagctaaaatgttaagtgtacaaaaggtggctttctagcacttgaacacttaattgtggtactttaagaagtaaatctgctatgaaaaatctcagctaacattcactttttgggagttaatcttaccagaaaagttcataaagtgaattctgtttttctaaaatggcaagatactttatttgtaagatctcgttactttaacactgcattgttaggtgtgatttttgacatcccagtgaagcaaagccataatctcaccagaygccatttaacttatgatgtattttatcagatcttattttatacagtatattcaagcttaatatagattctatagccctgggaactgttagttttcaggactgcagaattatattgtctgagcttgtggtgcaaatcccagtacagagatttcaaatcagtgagtcttggagtccgagtattatcatcgtgaacattttagctcacttcataggaggccacaaccagaacaccagagtcatggctgtgattccgtcaatttcctgtagcccgtgagctctgtccacatacctcagtggggaccctgggacaggtgatcccactggagccagcaccactcccagaaatccaagcagaacgcgagctgtatgaagagtagaccagcagttctcatgcaggccacacattagcaacacctgggggagtttttttaagaaacacccatgacagccaggcatggtggctcatgcctgtaatcccagcactttgggaggctgaggtgggcagatcacctgaggtcaggagtttaagaccagcctggccaacatggcaaaaccccatctctactaaaaatacaaaaattagccaggtgtggtggtgggcacttgtaatcccagctacttgggaggctgaggcaggagaattgcttgcacccgggaggcagaggttgcagtgagctgagatcgtgccactgcactccagcctgggtgacagagcaagactctgtctcaaaaaaataaaataaaagagcaagtcatatcttacgtggatggcagcaggcaaagagagcttgtgcagagaaactcctgtttttaaaatcatcagatcttgtgagatctattcactattacaagaacagcatgggaaaggcccacccccatgattcaatcatctcccactgggcccctcccacaatacatgagaattatttatgggagctacaagatgggatttaggtggggacacagagccaaaccataccattttgccctggcccctcccaaatctcatatcttcacatttgaaaaccaatcatgccttcccaayagtcccccaaagtctcaactcatttcagcattaactgaaaggtctacagtctaaaatctcatcccagagaaggcaagtcccttccacctatgagcctgtaaaatcaaaagcaagttagttactttctagatacaatgggggtacaggcattgggtaaatacagccattccaaatgggagaaattggccaaaataaaggggctccaggccccatgcaattccgaaatccagcaggacagtgaaatcttaaagctccaaaatgatctcctttgactccatgtctcacatccaggtcacactgatgcaagaggtgggttctcatggtcttgggtagctctgtccctgtggctttaaaggatatagcctccctcctggctgccttcacaggctggtgttgagtatctacagctttgccaggcacagggtgcaagatgtcagtggatctgggctctggaggatggtggccctcttctcacaactccactaggcggtgccccagtagggactctgtgtggggctccaaccccacatttcccttctgcactgccctagtggaggttctscatgagagccctgcccctgcagcaaacttctgcctggacatccaggcatttccatacattctctgaaatctaggtggaggttctgaaaccccaattcttggacttatgtgcactggcaggctcaacaccacatggaagctgtcaaggcttgagacttgcaccctctgaagccatggctcaagctctgtgttggctcctttcagccatggttggagtggctgggactcagggcaccaattccctgggcggaacacagcatggggaccctgggcttggcccaggaaaccactttttcctcctaggcctccaggcctgtgatgggaagggctgccaagacctctgacatgccctggagacattttcatcattgtcttggggattaacattcagtccctctttacttatgcaaatgtctgcagccagcttagatttctcttcagaaaatgggattttctttgctattgcattgtcaggctacaaattttccaaagttttatgctctgcctcctctataaggctgaatgcctttaccagcactcaagtcacatcttgaatgctttgctgtttagaaatttcttctcccagataccttaaatcatctctcaagttcaaagttccacagatctctagggcaggggcaaaatgccgccaagctgttggctaaaacataacaagggtcagctttgctccagttcccaacaagttcctcatctccatctgagaccacctcagcctggaccttattattcatttcactatcagcatctttgtcaaacccattcaacaagtctctaggaagttccaaacttttccacactttcctgtcttcttctgagccctccaaactgttccaacctctgcctgttacccagctctgaagttgcctccacgttttcagttatgttttcagcagtgcccccgactcaaaagagaagcgattctactgaaggagctcagccatctgggagttcccatggcagacatctgttagggtctcacccttacttgccccttgaggtaggcctggaacgttactgggctccttttcccactgcacctttggcacattctctggttctcccttggagcaggctccctccaggacatgttacaaccctttcaccgaagccttcctggacaaccgattctaaaatgctgcctctattcatttaatgtttattataactcttcatttgttccacagaagtctttgttgattccagattgccttaggctatgctttggggtttccagccttggtgagtcttacctctttgtgtaggaactgtttctacttctttggagaaaagcaggccctcaattgatgaccactgaattgaactgaaagactagccagagatcaatgttgagttttaatgtggattgtatatttccatcatatgacaacactgtgttggtgggggttggggcatagaacagagagggcagttgagagtggcctctttttattttggggtgcttcagtttgtcaagagacagactgtataaaaagcatgcatcaggctaccaagtttgaccaacatgcttgtgtaagctttctgcaatatccaaggaaagaaaatgaattaygtgaatattaagagatgctcctgagaagttcagcttcttacccaagacagagatggatagaggtcaggcatgaaggcatttaagctgaaaaaaggagagttttttagttgacagtcagaaagttgctggctgttaatggatgccagtcatttgtgttgggactcagctgcgttgttcagtaagaatttcagtgcagcagaggtgggccgagtacytcctgtgctggccrgtgagctggctgctggcggagatgtgaaagaaagaagccaccctgccctcactgggcttccagatggggaggtggtgaagtggggtggagatgtgagggtggaatggaaagaatgagaagtaaaaggacactttgtaatctgaccctgctccagcaactgtggaagcgtttcacctgtgaggctttccagccaaagtctggtggatacagataggctgtctttgagaaggcggaagcacatggtgcttctgtctgaataggagcttgtgccaaaggccagtggtccccccagatggtcatgttccttcttgtctcttcatctatgtgattcctttcccatgactgggagcgagtatttcctctgagcccacattccctaggcctggccctggctccctgctaagaccagcttagctccctcctcgcagaggtttcctctggggctggttgatccctggcctctcatcctcgccaggccttatgtgtcctctgctccctgcctgtgcgctctgcagggctctgcacccctttagggtgagggtgttaccatcttcatctgcttctactccattactagcaygtgcaccagctcaagagtttctcactcataattctacttgccacaagactgtggagctgagcggttagactggagggcagaactcctggcccactgtggccaggtcgtcctgtaattgctcttgggctgtgcctctcttgagtctctccgggctgttctgtgtgggagatggaaaactggattaggccaaccattgaggggactgggtgggcctgttgaggccatctgctcttgttgctccctagaaagccataacttcttgatttcagagctacctcaccttgactgcagagggttagccctaggcaatgactctgtaatttcaggtccaaagatacatctaacagctgatgtgacaatggagagcctcgtgtgtaaacactgaacatgagtgtgggcgcacatcttccttactcagatccgaaatgatagccagaggggtttgaggtgaatgaaaccctttgccctacacagaggcccctctgagatycctgctgagcacagacggagacacttggtgcccttgggggcagcggatactatcagggagaggcccgtgcattattttccacctcttgtcctctctcagagtgctgagcagatcactgcactgtgcaggagttttaacgacagtcaggccaacggcatggaaggaccgcgggagaatcaggatcctcctccgaggyctctggcccgccacctgtctgatgcagaccgcctcygcaaagtcatccaggagcttgtggacacagagaagtcctacgtgaaggtaagggaagagctggcatttatgcattcgtgcytctttgatgatggcargtggtatgctggcagaggtccccagatcacctctgcccaggacacctgccactccccagggggggacacctgctccttgaatcagtgaattgctcaaggaagggaggggaagagtgagagggtggaagagctgaggagactcagaaaaaaattagatccttggcttattttgttaccaaggtagctttcactatggaaacagatgttctggtttgtcatttgcaatctgtgggaagggagtctgtactggtttagtataaggggagagagrtcactttaggtgatgaggaacttgggaacaatctgtacatacgtgacggctgatccaggccccacagtcttggcggtggcccgggccagccctgcctggtggttgtcatcgtgtagaactgggacgcacacactggggagtggtcagcacgtgggaatatccttgcaccattatgaaggggcagttgccgagtatcttgagtacccgaagaattcatttatccatctcataagcccccagtcagtggtttgagaaagattttatgaagaatactggagcctggggagcagagttcttttgctttgtttcctggagctttggtaccatttgaagctcgcttcatttgtcagttactgaagcagcgcggcacggtgcggtgggctgagggtccaggcccggctttgcctccctctggctgtatggtggatggcccccttcaactcccttatttggggtctgagacactcggtcccccttctctaaatgtcttccaactctgacgtgctgggtccatgaattaaggcttggcacacacgtgcggctattaccttgctctgcaagacagatctgagcttcccccttttgttgatgtcgctgttttaccaggacttcacctaaggccctattcacaggtagcttcccaaagccccttcttttggcctcagaggggagaaaggaaagttaggagagatgacagtttagtttcattttccattatgtcttgtcctgcatccagggtgtggagatgaagtgaacagccaggctgttcagactcaagttctgaataatcccatctccacagtcacctttttccaagtcgctgtgtggcgctgtagatattttggaagcttcagagcccttctgacatcttgagaatagtcatggagctcttgccccaagagttaagggcagagttgagaggagaatcgatgtccctttttggtaatagtgttgttagaatttcctgttaggccacgctgtactgggagggtcatttcagtgacaggctggcagagtactcagatggtgtcatgggtgaagtagacaaggacygactctcccttctctctgcaagaaacctgcactttgttttcttagggcccccctgggttgcagccctttgycccccgcagctctgcgcggacctgattttgctgyccaggaagtcctcccaggcagcaccagcctgtgaggcatgactgccaggccccaacaccctcggacaaaataacccacacttggcacctgttgtgattcacacacacaccacygtttcttcatttcttttttgttgctgacgtttaacacagaatcttgttgttttttaacctggatcccctgcatgctccttgaaatttttgacatctatgtgttccctgagatatgattcagtaacttccatcatctcccttctctgagyggtctggcgyggaatatggtgagggaaggccagggaggtttttatggtgaaagcatccgtgtcacaggccttgccttttgctctctgaactaaggccagaaagttctggggatgctttgggctttataaagctctgggtcttaggttcccctcttgggaagtgagggagttattatagctgactttgcagtcaactgcttctagtattttaggactcaaaattcttcagaataaaagagaaatcttttctatcactgaactatatcctggtcttgccttcaaattattattattattattttggagatggagtctcgctctgtcacccaggctggagtgcagtggcatgatcttggctcactgcaacctccacctcctgagttcaagagattctcctgcctcagcttcctgagtagctgggactacaggcacccgccaccacacccagctattttttttttttcttttttttagtagaaacagggtttcaccatgttggcttggctggtcttgaactcctgacctcaggtgatccacccgcctctgcctcccaaagtgctgggattacaggcatgagacaccatgcctggctttggcttcaaattattaaacaaaatctttcgctcatgggttttgtaactgcagtctactcccactatactgtcctgctggaacctcgtttgcaagacagccaaatatggcttagagtttagccattagagctgcagctctgtgggagttttttattgcctttgaatatgtgagtttgagattctgtgaatcagtcaaccccaaagttgaagggctccccagaacttgaccctcccagctccatgctggacctctcactgtgctccctgaggcagaagaggccaggagctggggtgcacctgacaccagtgccacccagacgcccttcctctgcagggaagtgagtgcccctgctgcagtggcctgaagaaagggtgtttctgtcaccaagacacttacctaagcagagggaatgatcgagctgtaaaggtgtggaatccagctgttgcctgtattgtgatattaaactctttgaattaggtgagcaataatcactacttttggggtcaggaatttcaacaaaggctgggtgtggtggctcacgcctgtaatgctagcactttgggaggccaaggcaggaggatcacctgaggtcaggagttcgagaccagcctgaccaacatggtgaaaccctgcccctactaaaaatacaaaaattagctgagtgtggtggagcacacctgtagtcccagctatgtgggaggctgaggcaggggaatctcttgaacccaggaggcagaggttgcagtgagctgagatcatgccactgcactccagcctgggtgacagagcaagactccgtctcaaaaaaaaaaaaaaaaaaaaaaaaaaaaaaagaatttcaacaaggcataaacttcattatcctgatgggagccttgggagctgctgccaggttgctgctacccaaatctcatgggtattttggagactaaagcgttgaagacactttcttctattttctttcaggatttgagctgcctctttgaattatacttggagccacttcagaatgagacctttcttacccaagatgaggtaaataaaatcaccttccttctgtccagtgatccacaggttagtctctgtttgccttttagcagaactcctatgagagtatctctgttgatcccaaaagaacatcccaagacttaacggtcttctgagagtcccaggcatagcctcctcctaaaccactgctgtggcctcggctgcatgacccagtggcagagtgtttacaaaggcagagggacggttatggtctttttgaggtagaagagagtgtgatcagaaattccttttcaatacatacctttgtaatgtgaaaccacataattagttctactgacttacatttttcttaatttgaattctgagaattttacatccacttaaaaatttactgtagtaatagagaattatgggggatggagctgtgaaactttctatgtataagccatatcccataatgaatgtgctgtcttcttaaaggatttactttctgtctgcttttccgtgaagaatttccttgtgatttatttgtgggcctaagagttagcgtggtgtccygaacttcatggctaatcccctcatttcaaatcctgatcttcacatagatggagtcactttttggaagtttgccagagatgcttgagtttcagaaggtgtttctggagaccctggaggatgggatttcagcatcatctgactttaacaccctagaaaccccctcacagtttagagtaagtatctcagatttaggcttaaagtaaaaatacgtggctatggtacgtatttctctcatgagaattctctcatgagaaagaatttcttgtcctgtgactattgactatttattgtcctgtgactmtttccttgcaccgttttcctctgtcaggtggtaaaggaaggctgtatatatwtttttttcctggcgcaggtgcttttggtagtcagaagtccagcagcacctccygcctggttgttgamcacgtacgtgctcttttctcagctgctgtgaaggatatccaaggtggttgcttctgaaaccagagctcctaccctgtgcccaatccttcttccccgtggtcatgtggatctgggattaagagaataggtttctaattgctgggctcaagccctctcttctatgaagcaccagtgctccatagcatccgtgtaagccgcagtgtggcaggaagcccctccaaggggacctggaaccatacagacagcatcactctccccaagcaatgcagagtcggctttattagtgaacctctctcagattgtttatatcccaccttgtcagctgtatttttgtagaactttctttgtttcttgtccttggattgcacactgtcagtaggctctgccgctggaaactttgcagtcaagctagatacctgccaggggagcgcctgggctgttccccacctcctgtgtggatggagcaggtttgaacttctccaaggcattagtgctatggaatctgacagaagccatggggccgtcaaatgccataagccagcacgcattgattaaaccatgtctgatttgactttcccctctgcccttctagaaattactgttttcccttggaggctctttcctttattacgcggaccactttaaactgtacagtggattctgtgctaaccatatcaaagtacagaaggttctggagcgaggtaagttgcttatgccttttatagttttttttttttttttgcatttttaactgttagtaaagggtaaatctgtatttaacaagtagagagtaagtacaattttgatgtattaaggtccatccttgaccttgacagtggcaaatattaaagggaaaggtttctgtttctgtcagttaattagtagctgggaacaagtatgcctaagagcagagatgttgctttgccatgtgtcactttgctgtcagttacatctggattcttttcttgccaaattcctttctctaaaaacttgcaaccccaaaccctagatgggagtagaaagaaatgcatgctatggtgtttttttttttttccttgttaatcttcttaagcctgaggagccacaacagcctaccacgaaactcacaagaagtgtgtcagctgaaagtaaagtctctctggtgcaactggaaagagctcacatttcccaaaggttgctcttcggtgtttctctctgcgtgggcctggagggcatctggaggtttatcctgacgcccttagtgctcattcatgtccacggatgcagctctgccattggattttaatccagaacgtcatgatatcccagaagaaaagccccacatttaaaaagtggggtcttagagtgcttcaaatgagcaagacccagcccaaatccatcttctccagttgctttagacagttgctgaactctgttgccatttcctcccacaaacaccctctttttaattaaatttaattaattaattttaaaaatgtaaaaatgttcgtagaaatgggtctcactgtgttgsccaggctggtctcaagctcctggcctcaagtgatcctcctatctaggcctcccaaagtgctgggattataggcatgagccaccacgcctggcccacaagcacctttgtattgacagtctgtagtacagtgaaagcataccaatgtacttgtcaatacatattgacagtcagtgcagtacagtgaaagcataccaatggcttgctccattcctcctttgtcataaagaagaggggtcctgtcaccacctacttggcctggtaatcacattcaaaatggtattgcatctcctagaatgttgtagattttgatcttacaacacaatcccaaataagggtgtatcttccttcagagtagctgcattccaagcaactgggcatccagtgccaactggtggaatccaagtagcactggtgtatccgctggtacccaaaccaaatgcacctggattcctacacacacccttcatggcactcagacaaaggggcagttttcactgccagagagggtcctactgccatgcctgttggaagggagctgtggctctaggtatgcgaaaggtgaatctgcttggagctgtggagtgaaggctgtaggctgcaggctgtggtgcctgtcaccttactttacaggagaaaagacactgctttccagataacccttaagtrtacagaatacaaataagcaacaactagagtgaggccagtgggaaaaacactggtttattttcctttatgaaatttttgtgggtatggtgtagggtctggataacattgcttaatggcttttttgatgttgttttttttgagatggagtctcactttgttgcctaggctggagtgcagtggcgcgatcttggctcactgcamcctccacctcaggagttcaggtgattctcctccctcagcctcctgagtagctgggattagaggcgcccaccaccacgcccggcgaatttttgtatttttagtagagacgggtttcaccatgttggccaggctggtctcgaactcgtgacctcaggtgatctgcccgcctcagcctcccaaagtgctgggattacgggcgtgagccaccgcacctggccacgcttcatggcttttaatgaattgtttgaaactcactttttaggccacctataacartatttctcatgggtatgcatgaaatgtgtctttaaagtcagacattcctgcattttgagtcrgtgttagtctttggggcgcagcctgcattccatcctcggaagctcccagcactccagggctctgtcagggctgtgaggcggaatcccacgctgacagctgggtgcctgacccactgatgtgttggggttttcattaaagaatggcattaggaggactatagaaatagatgatctataaatgttaaaagagaaatgaagaatttaattcaccccactgtgctcttctgaggtcttttatccatctgcttgtagctaaaactgacaaagccttcaaggcttttctggaygcccggaaccccaccaagcagcattcctccacgctggagtcctacctcatcaagccggttcagagagtgctcaagtacccgctgctgctcaaggagctggtgtccctgacggaccaggagagcgaggagcactaccacctgacgggtgaggcggcggcggcacctccgggcgagggcctgcacagggcggcgaggggctgccagccrtgncctgggcctgacagctcacctcttccccgcctagtggcacgtcctaagtcacttttcagttctgcgatggttaatcttaggtttcacgtgaatatgtgaaactagctaggcgtctgggcactcctttagagcttacaaaatacttgggtagaaatgatctcatccgggtagcgccatactcctcctatgcagggatgattctgtcttcactctcaaaataagtaaattacctcaggtcacgtggctgtgaaacagtgccsctggaactgaaaatcaggcctattttcctaccacttggttaagttttgtggggttcgctgcccragctgctggtcrgatttgttgggtgaggctccaccttgtggagatctctgagcagagctcggcttcaaaaccaaactcccaatgatgggttatgctttcaagtcgctactggtgtgttactgtttgaacctctgaaattactggcctgagacacaatttrtcaaaaacacaaagccttgcagtttgatagtaaatagaggatccttaaagaggggctttatttgggttggagatagtgatttgttcatatgttgaaactaggaggtccaattaaaccataggtgataaaatttatggggagagagaggcttattaacactttagtattactgaataataaatactgagaagagcgtaaattaaactggctttttttccatgacaagcatactttggtatcaaaatcaacaagaggaaagcatttttgtatgacagttaacttctataagtaaataatacaaattatgttcagcattcatactatgtaaaaacttcattttgtattaagatgatctttagaagggtttgatttaaaaaacttccttccaaacttccctccagttagaattaaaatgctgaattgggagaaaaaaaagtataaagaatactgaatttagaagtgacctaaaattttgctttttggcttttataaaataatgtatctctcatattccctcgcggaaagttatgaacatataccatatataaatgcaaacaattgttctgtcagtcagtcatgtactggggtgtttttaagttccatttaaacctagatccgggttcccagaagggcaagccaaactcgagagctggtgccctaagcccagtcaggcttgggtttgaagcctggctccattcttgtgttttcctctctggaactctggcagaatatcctgcactcacttttctcatctgtaaaatgggatggtttagtctttgagttattgcgggcactaaatgagatgattcacagaaatcacctgtcgtgatccttgctaagtagaaagtgctccagaaatgtcagttgttgttattagtgatacttttcactgatactctgtctcatttcaaaaagaatttgaagtaggagataattttgctgttcttcattctaagggctgggctacagtgggctgttgtgacttattctgaatgtaatgctcctgctagtgggtactggtctggaatcctgagttgaatcttgactccattcattattactgttggatagaatctaaaacaaataacagttatgaaataaatatgatttcatatcttgcagaagcactaaaggcaatggagaaagtagcgagccacatcaatgagatgcagaagatctatgaggattatgggaccgtgtttgaccagctagtagctgagcagagcggaacagagaaggaggtccgtgagncatctgcaccctgggagcctagtgcatgtggtgtggggtctgtaggtgaccttctagataggctgccctgttaggactttcctggaggagaaaatgcctaagatttttcttgataacaatgtgtctaatgaactacacaatttacatatagacatatcataaaattcattacactggtttaaaatataaccttatgtcasgttcacattgtctggaacatccntggagggtgagagctggcagagggtggggtggagaaaggacatgggaactggcatgtggagtctggggcttttcctttttgattttgccttttttttttttttttttwaacatcaaatattggtggttacctgcttacttataaaactagtccaagcaggatttgacattttctgtatttttcctttttatctgattgcttaatttagaatcttgtgcttctcaagccagcatgcaggaagtagcatagtttagggagaaaatggcaggaacaggaaaggactggagatcagtccttcactctggccagtttcaatgctggtgctcttttatcagcagcccgaatggagctcagaggtgayggatgtactagatcccaggggaaagcttacaaaaggcactctggaagaaccacggacactggtagagttcatcttatggaaactgagttggtcacaaggcatgtctcacctacatgtgcgtgcactggagcaaaatgccttcacctttatgttattcatcagacacttgggtgcttaactcatattttcaaaagctccaccgtttaaggccccatgtttacaggtatcataaaaattaaaccagctgtgcttgcattttagcaatgactgtgtgtacatcactatctaacaagagatcatctagcctgggatttccgtatcttccttayctcctgtttttacaatctaggtaacagaactttcgatgggagagcttctgatgcactctacggtttcctggttgaatccatttctgtctctaggaaaagctagaaaggaccttgagctcacagtatttggttagtattccattcagaagaatgcagactgaacagaggctgggattacggaagaacttcactagccgcaccagtccagctcactcctgagctccaggagtcagaattgctataatggttggggacttaacagggccagcccccaactatttgaaactccggcatcgctctgcatcctcattatcttgttctcccttctgctgcttggctcaggccaagtgttacaggaacagatccctgcggctattttgaaacctgctatctttttctttttctttttctgagacgaggttttgctcttgttgcccaggctggagtgcaatggtgtgatctctgctcactgcaacctccacctcccaggttcaagctattcccctgcctaagcctcctgagtagctgggattacaggtgctcgccaccacgcccggctgatttttgtatttttagtagagatggggtttcaccatgctggccagactggtctcgaactcctgacctcaggtgatccacctgcctcagcctcctggastgctgggattacaggcattagccaccgkgcctggccagaaacctgctatcttaatagtctgctgtatttcaaatgttttaattctgagagttgggagaacaagtgacagtatattgtcactgagatgaacacagtgtcctcagctttcaataaaacaaagagtttaaaaragccaagatcaacttctaatagtagcttttaaataagcaggtgcttctgcatagttcaaatatgagcgaaagggaagtaccatttattcactcatgttggcagagtgaggtcttagagactcatacgtttgragagtgttactctgttaagacgttcagctctagtttaaccttggaagagtttgcataaaataaagactttctttctcttttcctttctttagtttttaagagagccgtcatactggtttataaagaaaactgcaaactgaaaaagaaattggtaaggcaaaaattcattttaatttaagctaccttttcatagctgtatcttcctattaacgttgaactgaaaagcccactgagcaccaaggctgggctgactgatactgcttactctgagggtaactaaccccatcacatactgagagcgtttctgagtctccccatgaaagatgtctgttttaaaagaagatrtacagctgggcacggtggctcatgcctgtaatctcagcactttgggaggctgaggcttgagcccaggaatttgagaccagcctggccaacatggtgaaaccctgcctctaccaaaaatacaagtaactgggtgtggtagcacgtgcctgtagtcccagctactcgggaggctgaggcaggaggatcaattgagcccaggaggtggaagctgcagtgagccttgatcatgccactgcattccagcctgtgcgacagagtgagaccctgtcaataaatacataaataagtaaataaagtagataaatactcatatgggggcctacatagaacatcgacttttatatccctgaaaatggcccatgtttgttccataaacatagtctgtgaaactttggtttattttcaaatgccttttaccttcactcagaaaaaagcaaagcctagctgtggataccatatgccattggtttaccattcagaggcagcgtcagggcgtggaagcyttggctgctgttcttgctttgagacctgtaactgcttctgaaccacaactctgcctccgcaccttccctagcatgtgaggtctttgagaactgggtgcgtagctgattgacttctgtgccctgaacacccacatggctgctcggagactcgcccacagggagaacataaacttctattcactgtgcacacatcctccctcagtgacagcttccctaacacttttcttggtgggccttcatgttacagccctcgaattcccggcctgcacacaactctactgacttggacccatttaaattccgctggttgatccccatctccgcgcttcaagtcagactggggaatccagcaggtaactgtttygtgcagtaygatgccagaaaaagcattttagtagacttaactgtggaatgtaaattaagaaaggaccttggggataatttttggtgccttttattttatagacaaggaaaatgaggacaagagaggttgttttgatgttccttagcagacttctgggagaaactaaatgctggtggatagctttttctttgccaaatgcctttcattgtttccttattttccctatcartagttttcaacattttcctttctgccttgataccctaaaatgtgttagaaraacaaagatccacaaatttatgtttttacaaatttagaatatagcagaaaattccttaaggttaggtagtactgtaggtgatataaaaagaaaaaaatctttgactctggaaaatgttcagagatccttccagagtaaccttgttttggtgacaggtatctggtgacagaagaggccagcaggctgagtcatgcagtgacctgctgggcttctgtttaacttttgtcagaagtgcttatgttttcgagaaaatgaccacatttggggcaggcctcttttacctcaagtaccccagctcctgttccttccaaggaaagggcaaaactgcaaaggaggttgaagaataggatccactgaatctcctcttccccagagaggggctccagagagagggtgaaggcagttcagatggaggaaaatctgcagcaggaaatgtaaaaagtaaccaaaaggcatttcagttcttgtaactgtgaaaatcatacatagaacaagccacagaagaaaatgagccaggactgggaatattagactttcttaactgatgagatttcaactttacaagtgttcttaaccacagcattttgggcaaagttgtagactcttgtttccatttccttttacatagggacagaaaataattccatatgggaactgatccatacgaagtcagaaatagaaggacggccagaaaccatctttcagttgtgttgcaggtatgactgacttccaaagattaaaaccaacagaaataacatagaattatgtctcttaagggaatttatatttagtgccctcctgaattttgatgatatcagggtcatactccccaccctccgaaaaaggcaactgaggccgctagtaggagactatgttgattaaataaatatcaaaatcttaagagtgatcaattctcacctccttctgtacgggaggccacatggcactgctgytgggtggctggctggcagcctggtccagcaggtgcaaggcacaggaacacaggcgggcgtggaatggaagcacgatgaacactgtggacacttctgctgttttctctcccccccsacccagtgacagtgaaagcaaaaccaacattgttaaggtgattcgttctattctgagggaraacttcaggcgtcacataaagtgtgaattaccactggagaaaacgtgtaaggatcgcctggtacctcttaagaaccgagttcctgtttcggccaaattaggtgagaattttgctagccttgtgtttattcaacaaaatattatgagcttctgaaaaggatatatgctcttgtaacatagctgtgacttttcactttgtaagtcatcgaggtacctttatctccttttaagaaacctaaacatgcctcttgctcccagacrttctactgtaaaatacagccacccccaacccccagtcccttgtcttcctacccgctgacatagtccaaatgtayrattttgtttcttccactaagatgtgcatgggtccagggactttgttttcctcactgctgtattcccagtgctcagaacagtgccaggcatcctgaaggtcaatgctgaatgaagatcaagaaccttacacagagggtctccaccttctgatggttcaacctacaatttttcgactttaccgtggtgtgaaagtgacacacattcagtagaaatcgtacttcgagtacccagacaaccattctgttttttgcttctagtgcagcattcaatacatttcatgagatactcaacacttaattataaaacaggccttgtgttctgcccaaccataggctaatgtaagtgttctgagcacactgaaggcaggctaggctaagccgcagtggttagtaggtacattaaatgcattctcgactttccatattatcaacttaacaatgggttgattgggatgtaatgccatctaagttaaggggcctcttatactcgttcttaatcgatarggcaccaagtaagcatttcaaatcacgttgttctttctgcttgtttctaaaatttcagcttaagttttcagaaccttatttctacattaactattttgttattatctttcttgtttttaggcttagaaaatgtaaaacttcgctttttcatgtcaaatcagtgtgacctcttcagatctaccacatatttactattttctccattgtcaaaataaactggccatcaaaataacatgctgttattactttgtagaaacaccaaaactgagaactcccttccttctttcaatccaagagaacagaactacacacacacacacacacacacctataacataaaatttcagaaagttgttttgaaattccagcagagacagttctcatatgagagataaagagcattttctaggctgggcatggtggctcatgcctgtaatcccagcactttgggaggccaaggcaggtggatcccttgagctcttgagaacaggagtttgagaccaacctgggcaacatggcaaaaccccatctctacaaaaaaaatataaaaattagccaggcgtgatcatgcgcacctatagtcccaactactcaggaggctgagatgggaggatcacttgagcccaggaggcggaggttgcagtgagcagagatcacaccactgcactccagcctgggtggcagagcaagacactgtctttaaaaaaaaaaggggggggggaggggcattttctacttttaattgagcagcaagggaaatccacaaggtgagaagatgcataggaatatggtgtgatcttcatgatcaaattacaaagcaccttagtgaaagaaaggagcctagatttattattaccaattaacttttcaacttactccttggcaaaataagaatcttagcccatgtagtagtttctagtgtctagttctatytacatarttgagctctggtaatctaaaaatgctgaattgcctaacttacaactgtaaacctaagtcaaaaatgtccatgttttcagtagctacatttttgcctaattaccaggatagttgctaactgaagtcatatcataaaataaaatcttaatgttaaatcttacacaagctttgaggcaaacattacacattgtgtaacctgtttctgtatcacagcgaaatgtgtttttctcactgtagcttcatccaggtctttaaaagtcctgaagaattcctccagcaacgagtggaccggtgagactggcaagggaaccttgctggactctgacragggcascytgagcagcggcacccagagcagcggctgccccacggctgagggcaggcaggactccaagagcacttctcccgggaaatacccacaccccggcttggcagattttgcygacaatctcatcaaagagagtgacatcctgagcgatgaagawgatgaccaccgtcagactgtgaagcagggcagccctactaaagacatygaaattcagttccagagactgaggatttccgaggacccagacgttcaccccgargctgagcagcagcctggcccggagtcgggtgagggtcagaaaggaggagagcagcccaaactggtccgggggcacttctgccccattaaacgaaaagccaacagcaccaagagggacagaggaactttgctcaaggcgcagatccgtcaccagtcccttgacagtcagtctgaaaatgccaccatcgacctaaattctgttctagagcgagaattcagtgtccagagtttaacatctgttgtcagtgaggagtgtttttatgaaacagagagccacggaaaatcatagtatgattcaatccagatatgggttaaattcctcattttacttttaaactggtggtaaagtggaaattgcaaaaaaaaaaaaaaaaaaaaactgttcattcctgggttttgtgcagtatacattttcccacaaaatggttgtaaagatttaagttattttaatttattgtggatcagaaacctagatgaaactggtcagaatctgtaaattacttagtttatatccactttgagcaggtatcaaatgatttaggatccttaaaattacattctaataattaagttatgtggaaaaagtaaggctggggaagtcgtgattaatagttttcaaagggccattttttwaaatcctctgggcattttctttcagctgtttgttagtttttgctttatttaaagcatatttaagttattttaatgtggtttaggrgcaaaatgtgcagatacttcatttttgtaagattgtaatagatgctgtttatactaaacatgtcatawctatctatacagtatatattaaaagaaagcttgtactgtatcttatttgatgatatttattttctctgccaagctgtatagtaaaaggaaaataagtcacatctggtcattggcatttgtatcgtcattctgtaaagacaaaagagtacctatataagaagctccacgtagtgcaaatcgacatctggtaggctgctcgcccccaggcagcagctagagtctgtaattctctgcgtcatcctcttctttttcttcatttttgctttttcttcgcttgagttcttctctgaaattatatgcaaagagttgtgggtcttcatcacacatttttctgtatacatcacagaggctcttaaagtgtgagatggagagctggcggggccgaagagtagggtctatgtctgccaactctaacagcctgcccgtgctttccaagcgctgcgcttcagggaataacattctgaggggaagacagacagacagaaaaatnagaattttacttaaattctgcaaatcatgacactttttaaccctcatttgaaaacaacacaacacagttgctggctactgacagctggagagagtggcaggagcctcttggattatatagcaccagataagaggcacggcccgccactgaggcrgctctaacctgaggcgcgaggcaagcacacaatgggaaagcattctccaaagctaaatcagtacatgtactttttaaaggtaagtaagtaagtttaaagtaacatctgctcagctgcattcttgtagaaacataagcttgatgtgcctcatgtttcgatgtgaaagttgtattatttcttgtgtgacaaatcatcagttttgattctctagaatttgaatgtatcagcctttagaactcttcacgctaaaagagttacttttttttgctaaaagtttgaaaatatagctgataggaaaatataattattcctcttgttatttttcaagcatctttaaaactgatttgaagtagaggatatattttaaatttcatctatccaaattgaaccattgttttaaaatgaatagcagaactgcttgaaatgctgcggagttaggcctggattgcatttttcttcaagtctcagggctcttacagagctcatcccaaggggcttggaaggtgtcatggccaggggagatagatagcatgttgcttataggctgatggtcctttcaacaaggaattgcatgtcccccacactttcagggtgaggtgacagatctttgagttcagtttcatggcaaagagggcctgatggcagtttctaatatctgaagaacaccaataagtcaaagtcctttgacctgttaccctgggtggcacagtatctggtccatgtctgtcctgaggatggtgtatctgaaatgaatagggcccttcacttagctggggggttgccttggaaacgctagtgccagctctaggctcagaccaattccaggatttccaaaagcacataaaaggacatagttttgtgctcccccctcccccatgaatcagggctatcaggtacagctgtgtgggtcctgctctgcgtgaggggtaagtgtgagccgaaatccagcttctgtttcactcaccagcagtgcacagtagctgggggctgcagccaaaatggctggccagtggcatctctgtcaccagctctgcaccttaagtctctgctagagaagcaggaactatctggtaaggtgggaattctggcttaattagaggcaacaagtggcaggctgaggctccagcttctgccatctggcatcctcagcaatgggctttgtggactgcagcactcttaggagctgatgcccagctggcccctaaaataatctgctgtcatttcatatgctaaagggacacttcggaccttgtgaaagagagaattacaatgaagccatgtgaggaggttttagaaaatgagaaatatgtgcctctcacgccgagcctctttaaacagcggactatggatagattatcgtagatggaaatcktttacaaatacactttcctgccttcttaagcagactatcactgggcttaactaaacagcttcttggctctttctggatctgcaacaaggctgtggtccttcagagcccatcgaggtgggcgacctctagaccaccaggccctgtcaggttttcccagtgattcctgagagcctcttggcagcagcagctttctgtgagatggaaacgtgcttacgtgaggacttcgtgatatgattttggctgctcagaaktcatatttgcttcctagttctcaagtgtgtccttaaagaagagatagggcaactcggtagaaagcaagcatttaaaaaacccattattatctgtcttgagtcctcactggggaaccacgagctccctggtacagagcctctgtgagctgtgcagtcaccaaytccaggctgcgcttatgtttaagccaccctgagagaggccacctgaggtctagcaagtctttgctctctcctcattggcagtgaagtcttgtccgtcacaggmctgaactaagtgtaatactcagagctttaagaatagagcaaacaaggttctcactcttaaaaagtgcctgaggattttataaagactgcaactgaagagaagaaaaggcattcttacctgagccctcgatggcagtatttccttcggaactgaaatacattctgaaccactttttccaccagcttgaatggctgctctatcttgggctgtatcaagggagtgaagtgcaccacgcccacgtccaccttcgttgtaagcaaacatattatcattctgtggcatgatatgtggcatagtgtgatcaatcaactcatccttgtaaaacaggargatgggctgtcaacagcctgttttcataaacagacctttccacgtacttcggtttcatctctaggcatggaagatggtacattctggattcgcaaatgacatggagaaatcagccggctgcacctgttctctaatgacatccaccagacctgtgcttgatggtcacttaattttaaaacacagtttcacaatggcttaaaaatcaatccaaatcaktaaagtcagtcagcagataatagatggcattagaatattttagtttttgaatgaggaaaaaaataagcygcagcagcagcttcaagacacagagagatggcagacaggcccccagggaccactcagtgctaaacttcccagatagagacaccacttattttcggtagacactgattaatcagctggactgaattcatgagtgtagtctgaaaagccacagaactttctagtagcaattttaaatgccccgaaaggcataggcaggactgaaattgaaaatggaaaccatcaaaaaatgtcactgtttgatagtgtttaagctactgccagctgtggagattctttaattgtcagaagataaaacttttcaggcatatctgataagagatttataccctgatttgttccaaaaatggactcatggtgattcacaaggacaaattcaaataccaaaggaaaaacatttaaagacagagggaaatggattcaaaacagtaactacacacacaaaaatgctaacggagaccatggtctaggaaatgggaagtctcgtcataattgacaaaagcctcagtctccaggaattgttaaacttgttaatgaggatctcatacagactcaacaaaaggcgaagaaagtacggcaatttaggaggtgtgggctgcaccactgcttttcaaaaggaactccattgttgaaatcccatagaggttgtcattttctcctaagaggacttgcttctaaagatccttgtggctacataattccttaaacagatgaaaatgggagactggcttttctggttgtgtttcttttagggtagaaggaaaacaactgaatatgatgtgagactttatggacaagaaagtgaaaataagctgtgctcagcctcacacagcctgacgcgcttgtgggaggtgcctgtggtgcctgagctgtgtcatcaaggccccggacccctgagagcttgcacctccctatttaaacaatcaatgagcctgtccccgaaggtttcaggtcagctacagctgctcctactggatggaatgggaaatagaaggctttggtggtaaggggcggtgtgggctggcgcatgctgagaatgtgccaagcggcctttccacaccccaaatgcccacccccaacatccatcagccttcttgtgaagtccagcaggctgttcttgtgaagattctatggtggaacagtagttatgaacagtgacttaactaagatgtcaaatgctcttaataaattttagtaagttttttgaattgtgtgctatatgttgtttcatgtttcctcaagtttagtaacaactacctcttcctacaggacttcccttagactttaacaaaacgcaccatagaacagtgcccagcttggagaggtctgtggtcatcagggaaagagggactgaagaagacaaggggctgtggagtggatgcagggtgtaggtggggtagatgtactgctatagggagagaagaaaggtggtttcagctcagggcagttctggggaaggaaaaagaagacctgatctatgaatggcagagtgcaggcagcagcccaagacacactccactgacttcagatgtcaggttccttcccacaaactctgaactatcctgcctacctcgcctcctcctgatttgtatagagaagtggtcccaactgtcaggcatgtgtctggccactctctacacctcaccagccttctctcactggactctccatttccctttcatcccctgagcttcctggcacccttgtccctgcctccccttctccaggactcatctcctgtaacccttcaactccagttctcccagtgacacagagccaattctatcaattcttactagcagcctgctagtctccagaagaaatactcttagcaaaatctgagataaaatctaatccctgcctaggcctaaaaccatgaaatattatcaaaactctacataaggcttacaaactattaagaccaaaagcacaaatacagagatagatgcactctcttccagtacagaaactgccactttcagcttccttagattttaaattttggcctcatctttatttgcctgatttcattcctttgagatatagttggtatttgcaaatacaggaagtgtctaacttttgcttgatttaaataaagttttaaaaccctgaacaaatatagtagtaccccatgtaaactatagcgtcgacttctaaagtttgaatacaattccaatactctgttaagttggcttatattatgtcacggctaaaagagaattcccctcacaaatgcagttactatttagtgggagattctgtaaaactcagcgtcaacaaagctcttccagttatgtctcctgcttctgggacggccaggacctctcctgtaccaccccttcctctccctttcccccaaaggcacctttcagaattactctgaatgatggagcccatttttttctagaactataggaaagctgcttggtaactatggtaacgaatacaaaaatgctttttacttataattgaatgcttatttaaaattacaagtattattttttcttccttgagttttaagtctattaatgggtttgattacaaaaaagaaatcagtacaaaggcatcagaagtacttaaaatattctagtttaatgccgccagccttttccaaactcagtccatcagtataccaaaatgacctactaaaatttcaaatgaaaggatttaaaatgaatttaaatatttgcctttctaaccctatacgtcaacgctgtaacaagctaagactgtttctcagtgttagcagccttggccataacaggcccgaggcagatgtcctagtttccaggccagggtgtctaggacgtgactggttatcagctcagagcagcacttggaactcacaagggacccgggctaaggagatattaaatcttaaatcttagatattagatattacaactgagaactgtaatcaacatgatatacagaggacactgaagagacgtacaactcagttcctgatgattatcatatgcccaaaagctaagtcacgaccacatgcacagacacagaaacaatgctggccactgtctacaaaagggtcttcattcaacactctcacggtgttcaagaccattagaggacaagatagtggagatgaaaaaatgatgaggaagttactatgtaaatagccaagacacagccataacttaagacaacagaagggctagtggaaaaaaaaaaaaagaccacagggaataatcagtaagactttaaagaacaacatataagaaggattcaaagttcgaagtgggatgatcacgggcagacctgggtggttgggaacaggaagcatatggcatcttgcaggctataggcaccacaagatggaacgcaggaggacaggggcttgggagagccacttcactgtcgggtaaaacaacggagcaagatgagtgcctccggatgcttggtttccccaccctccagtgtctgcttgctcttcaagtacctccaccaagctaatgacagtccactttaggacatcacgggcctcgaggttacaactttcccaggtaaggagaatcccaggtagaggcagcaagtcactgatgcctgtgatatgataattatgcatgtcatagaaaaagaaaatactgacaaatgtgaatgtagatcacattttctggaattggttcactctacctgtgatccatgtccaaaagccaatttaaggaaagaatttccactgtaaaaccttaaagctgacagcattctaagtatttcaaaccaactggttcaataaagatcaactacacggtcagtacctatcctaaagtttacaatttgtgttattgtaacaatatttatttctgcagaagttctgtcctcacccttttttcttcctacagatctttgtttttttctctttcttcttgggatcataaaaaaagaacagattttaaacagtcacatagtgtttcctctcagagcagatgtggtaggaagaactgaggccaagagaatgacagcaaactcagatcacaagagaaataagactaagaaatgtggtgagggggatgaagagtttttttactgtgtaaattatgtaaatgtacatatgtatgtatgtaaattacacctattagtaataacaacaacaagatgagtcagtgtctcttggtcccaagagattaaacaatttcagggagatgcacgtgtaatcctcaagaaagcacaaatggaacaagaactgacaattgttgtataaaggttttctgttatatttaatctggagttcctggatgatcagagggaaaagaccttcctaaaactaggccttttccacaaaccacgcccttggtgtctgtgaagcagcagcatctggacgtgccctgtgtttcctgtcccgggctgtgctcccgcttgggtttgtggatgtggcaggagctgcctgaggcagcttcgaggctgcccagccgggccatgggtgtggcagcacattggcaactgccagggtctggaccccagcgctgcaggtcctgagcaactcccgtccctcagagagaagacaggacctcagagaggctctcaatctaaacaaactcagaaggcacttgataaatgctgctagtaatattattaaaagactgagaaatagaacatgcatacaaatatagtaattcataataaaccataattatcaaacggactagacatcacactgaagatgcttggtcagtacattcgtatattcatagctgatactgttaatttcctaaggctgggacagaagaacattattttaggattaggtcaaatcactttaaatttgtagggctggaacaggtaactattttatcttactctgaactgtcattattttcaagattgaatggaaagcaaagaagaaaaaacatttgtattagggttctctagagggacagaactaatggaatatatatatatgagtttattaaatataaatattaaatatatttatatataatataaatatatattatatataatatataatatatatttaatatataatatgtaaatattaaatatatatataaagaagagtttattaagtattaactcacatgatcacaaggtcccacaataggccatctgcaggctgagaagcaaggagagccagtccaagttccaaaactgaagaacttgggagtccaatgtttgaggataggaagcatccagcacgtgagaaaagatgtgggctgggaggctaagccagtctctcttttcacatttttctgcccacttatattctagctgagccggcagctgattagatggtgcccacccagattgagggcgggtataccttccccacctcactgactcaaatgttaatctcctttgacaacaccctcacagatacacccaggatcaatactttgtatccttcaatccaatcaagttgacactcagtgttaaccatcacaacattttttttaaaattcagaaccccaacttttcattagaattaaatggacagcatttgaaaaatacaaggatggggctccatcccagaaaattaaataagagccactgggttgggcctgagcctcttggggcttttccaaagccctcgtgtgggcagaaatgagaatcacaggtttggggaacaatcctagttgcttgggaaagtatcacacagtcaactcaaatcctggagattaaattcactagaagtgcagctagagccctgtgacacccccaaagccagcctgagtccctgctggatacagctcaccaggggggatgaaaagccagatacaaacttccccagtctcgctcacagttaagaatgaccaaatgaggccgggcgcggtggctcacacctgtaatcccagcactttggaaggccgaagcgggcgaatcatgaggtcaggagatcgagaccatcctggctaacacggtgaaaccccgtctctactaaaaaatacaaaaaattagccaggcgtggtggcggccgcctgtagtccccgctacttgggaggctgaggcaggagaatggcgtgagcccgggaggcggagcttgcagtgagctgagatcgtgccactgcactccagggtgggcgacagagcgagactccgtctcaaaaaaaaaaaaaaaaaaaaaaaaaagaatgaccaaatgagccagttctggaaagtgagacattaaagcatagtctggggtggtggtgggagaggggaagagaactctagaatactttgctgcctttttttttttttttttgagacagagtctcactctatcgcccaggctggagtgcagtgcagtggca

SEQ ID NO: 94105 - DNA, 13056 bp, Homo sapiens
aaaaatacagaaaattagctgggtgtggtggtgcacacctgtagtctcagctacttgggaggctgaggcaggaggattgcctgaaccagggaagttgtctgcagtgaaccatgattgcaccactgcactccagcctgggcaacaggagtaaaaaaacactgcctcaaaacaaagaagaaagaatatttgtagaatatataaaagttctctaaaagcatcaacagtgggtaataggaaagaatcactattgtaatactcagaattgtcaagttataaaatgtaaaggaaggacagctgaatacgagaaaactatattttgaaaaataacaatgtgggccaatttttaaataaaccatataaataccagggctatgtaggaaaatctcacataggttttgctattgtttttctatatgccttataactctggttcctcgttcctgcattactgtcttcttttgtgtttagctggggttttttgtagcgtaatgttttacttttcttctcattcccttttgtgtatattctataaccattttatttaaggttgccatggggattacacttcacatcctgaagttatgacactctaatttgaatttataccaacttaacttcaatagatacaaaaactctgctcctatactgctgactccccacccctttcagctattgatatcataaaatatctttatacattgtgtgtccaaaaacatagactaatagttgttttttaaaatgtattagtctctaaaatgatgtagaaaacaaaatgcagagtctcaaactgaagttacaataatactagctcttagactaataattgtattttataccggaaattttatgctcatttttacttctacataaatttttttaaaagaagcattttggttgagagagaagaaagaagatgaggaagatttttttaaagactaagaagaaaaagtagaaaggggtaggagaaggaaaaggaaaaagatgcttatttagtctcaagtgagtcatgacctatagcataatgctatagttttatacatgtgcctttagcaaaataatactatcactaagtaaagctcatctataattgtagatgtttttagatttaaaagttgaatttaggatctttatggggtaattagaactggtattaaattcctattataaacaactagaaaattggataaaatataagaaaaaaaaatgccttcggacattgaacaacaagtaacccaggagagaaagcacagacacaaagtaagccttacagtttccctggctttctgcattgaggtaatttctgaaccacagacattacagagcagaattccaggaaggagagaactatgcaggaaaaagagctccagaaatctgcatgggagtttcctcaagtcaagactactgggccatgcacacatacagtaaaattccacaaggccaggggaaaagtgggatgatatcaatgataaaactgaagcagagcagaggaagaatatggaaatttcttgggtcaaacattaacatcaaggggtctaggaaagaatagaggtttaatgaccaatttgtggtaactaacagatctacttacccgttgggcctgatcttagcctggaaaggggatgtggaatgaaagtaatgaagaaagactcaacagctcactgtagctcttctttacaattctccatgagggctttgtaagttgttgaaggtattattcaaaacctgccaatttaattcaaagtggtggaattgcattctgaacgatttctaaaatactgggtcaaatcaggatagctaagttatgctgtggtaacaaacaaccccaaatctcagtggttaaagacaataaaagtttatttctcccccaaattatatgtctcatccaggtgttgactctgctccatatagtcactcagggaactaggctgacagatgctccactgtcttgcagctatgccatctggaatgcatagccaacttagtcaccagagtaagggaagagaaaaaatggagaatttcatgtgggttttttactgtcttaccccagaaaggacacatactaatttccactcatttttcattggctagagttagtattgtggcttcacttaactgcaagggggccaggaatagaggagcaaatggaatatttagagagacttactgtgtttaccacagctagaaagctggtgttaacatttctcaccacccaaatctaaccttcacttacaagtgatgggggagatggtgagctgcctgctccccattcagaaagaacagtggttgctaggtagtgtctcctgagagtgttgaccaggcttggctggtcttataggagacattcagtggcttcaacctactctgtgcagtcagagccctgcccttcagacactaaggctgttttatttttagtttcagaaaaaaccctgctttcagaggaacttcaaattatatttgtctgtgtgtgatccaagagccaaagacagattaaatgattccagtggacatactgctctgattatggtgagaattttcacatggttagaaacttccagttagtttccattttccttgctacctcaatatttcccttggaaatgtggcacatgcaatgaagggcttatattcaaatatcgattttttacttgactctgaggtagaagctcctacaaaaattctaccgccccaaccaaacatgagtttggaagggtaagccttgaggaatcagtcagcataatggctgagagacaggagaggggaggtttagtggagatgtgggatttgaaaggatcatactcgggccctttaccttctattttggtttcctttccttggtacaacacctcttctggttgcatcccttctccaagagggtttttcccttctattgcatgatcctcctaagacgtatccttggcttaagcaggtgaataaatgtatctttagttaacttcctgtcataaaaaaactagaaaataagaatacatctgaaaacccatgaggaaggtacagaatgtaaagaataaatagaatcaagctccttggccttttaaaaggccatttagatggcaatttttgcagtttttagatagcaaaaatttggggtgagaggtgttagtatgcagagggagaaagctcaggaaagaataagccagtgataccttgaagtacgaacagaaagggaaagggtaagaaaatggcacctgtgtgcttctctaggaggaggtacttaaaatccatgtgctgcccacatttctctgcagagctacatccaacccctggcagcatgcatcattgccttggaaaatatgtcacagcaattatatccttattcctcttgagcttcttcctccgtgagaaaatccaaaatgctgaatataaacttctgttggtgagtaccagaacctgatagtggaatccattttcaattattaagtaggaaaatagctaaataaaagtcaacatttaggccccatctatgtgggaaactctagaattgctgtaaatgttctcagaaaagagaagtaaagacagaatacttttttaatcaacataaaggaagtgaaataattttgttttgtttttcttaagaaaagatggctgggcgcagttgctcatgcctgtaattccagcaatttgggagaccgaggtagtcagatcaggagtttgagaccagcctggctaacatggtgaaaccccatctctaccaaaaatacaaaaaattagccaggcctggtggtgcacacctgtagtcccagctacttgggaggctgtggtgggaggatggctttagctcaggagggaaaggttgcagtgagccaagatcacaccagtgcactccagcctaggcaacagagtgaaaccctgtctcaaaaaaaaaaaaaaaaaaaaaaaaaaggcaatttactttctgtaaattgctaacccatgaaagaaatacatgagtaatttgttataaccatcaatggtgacagtggagaagtatagataaataaaaataaaacagacatttccaggggaaaacagagtagtacaagacataggagacaactgacaatgagatgcctaatttgtggttactaggagactcgcttgccagaggggtatggaataggagtgatagagacttcctgtagctttccttcaaaaactctgcaaaggacttgtgtattattgaaaaaatcattcaaaaccaacactaccagcttgattcacagttactttctaaatccctgaatttaaaacagccactttccactatcccttcatatatcagcgggatttgactaggagcagggaggaagaaaggggactccaggtgtggagagggcagtgcacacccacctctaaagtaccaggctgactggcaggactagcaggcaatgaggacctgggtgctggccacttcccaaccaggacctagcatggagatgtgatttttcccatttctcacatgaaggattggaaatagcttccctaagtggacaacatctgcaagtgagaagaccaaaccccacacagttcctggccaggctttgaaatccacatttttgctaaaatatctcagaccagctggagctaagcacagggcaggtgtggggagtggttcagaaatgtgtgcacggtcagatgtgagcaaaagaaaggactctagaattgaggcactggggcctatgttccttgaggacagggccaggcactgggtgccagcacatctcacagaacctagcccaggcctaagccgaggtagacgacactggccagcctgacaacggtgagggcaggcaagtgcttactccgcacaagacttaacccttcccgcaggcactccacacaaaccagggagccccacttcccaacccaggacccatggcctctgctggaaagccctgtgtggtttcatgatgaggtggggaaagtggttccctgagccccacactcggcttccctgggcacaggaagctgaggcttgcccagcctgtcctcaaaggctgctcctcaattgtctccagggaatctgggggtgaacctcaggaatgacatatcttatcctcagaaggaaaaggaggacatagcttggaaatagctgtcaaacaaatcaactctgaaagcaagaaccatctgtgaaccttcaaggagatgcagagagactcccatcttctccagcaggctagctaccaatccctggctggagcccgtccccaggaaaagagtgagtacctgggagggagtggcctgactgggggaagatcagccagggtattttggccagaaaaaggaaggagggttgaaaagggaactgactggcctgtggcaaggaaagagtgtgtgtgctctgaggcagggccatgctgtggaatttgatccatgttatgatcctgagtgtgttttcctcccacctggtcaccccttgaatgaccaacaggacagaagggccayagtgaccctgggaaggagctgtcccatagtgaagctcagtcatggtcggcccccagggaggggaaaacaggaagggggaggagccggagggagcgcgggaaaaggcattgggtagagggtaggcaaagagggccatgtggacttcagatctcggtgcagtagactattggacccttgggtttacatagatttccagagatcctctaatccaggtctggttgacctgtggtagctgagataactctgaaggtcaaggccaggctaagatactttgccaagccagcaatttgcctttggtacccggcagtcttgcccatgagagagagccttgcccttcataaagcttccccaagagccttccaaatattgaccaaaatactttgaccaaagaaaatcacatcacaatttctgatcagatattaacctcctatctggactacatgtcccaggaaaaggaatgtgaattgtcactgggatcagcctaaggagaagacctgggaggagagtcctaggaatgcttcaccatcctgaagtgctcatgtgcctcatgtctcccccaggactgctgaccgtggggattgcctcaatgcagcatcctcgtgggagctacctcttggacaacctgcagtccatgttccaagcttcctcataacgtgagctggagtatatcgtggtgctggtccacctgtcaggtcctgaccctgaatggcttggccaaacagctgccactatttcaggtctcttcacaccacagattagggcmgggaagctgctggtgatcaatcatagctcccctctcccaggagatctgagtgacgttaatcactcatcactctgtgaagccctctattccagrcagaaagtagatcatgccctcctcatgaactttgctakcaacctctctgattactttcttttgttggaagatcatattcattgcacccccaaattcgctgctgccatctcttcggccttatcagcctggaaagaactaccttgggtgatcctggmgttctcccacctgagcatctctgggaaagttttctgcaccagtgacttctcccgcctgaacacttytttcctcctcttccataaggacactcctactcacttgyttctctctgaatttcgtcttctcttggcccagaatattcctattcatttcagtccctctgtcttccaccacacaggcaattattctgtgtttgatgacatgtgcttttctgtggagaaggacagggtctttggtgaaccagacaaccctgttgcaactgtccttactgacatggtatcaatgttggctgtgattctacaatacacttatacactgaacaaggagggctactctaccttaaatcctttaaaaggaaactacttgacagtgattctggacaggccacaaaaaaacacccagatagcagtcgggaggtaccgactgcagcaggggcaagtggaaccgggctatgacccccaggaggatcccaaaagctgtgctcrctatgccctgctagggccactggtgggaggaaatttggaccaggtagtattttctgaagaagagtctgtggaacagttgaattgtatccggctgctggtgttggcatctcaagagtcttgactcctgatcaagcagatcaaagtctggactgagcctgaggaagaggagagatagagggcacaatggggattctggaagaattgggtctgagaatggaatctacatggttgggaagaaataaactcaggcaccgatcaaaagctactcattttagtagagtggtcatacaatttattgctcaaactagaacactttttctctttctgttttttttttttttttttttttttgagaagagttttgctcttgttgcccagctggagtgcaatggcgcaatctcggctcaccgcaacctccacctcccaggttcaagcaattctcctgcctcagtctcctgagtagctgggattacaggcatgcaccaccacgcctggctaattttttttgtattttcagtagagacggagtttctccatgtttgtcaggctggtctcaaactcccgacctcagatgacccacccgcctcggcctcccaaagggctgggattacaggcgtgaaccactgcgcccagcccaaactaggacacttttgaaagtgaaaggaaaggaagcactcttaaaaactgcactagaacaagagatataaaccaggactgtcccgggcaagataagatgtaatgtccccctaatgatgagttttaagatagatgacacagtctgatgaggggtgaagccaagacaatatccttctggcttccaagcaccagggagagggaaggtgtcaccatgaactgccttgttcttgtctatatacaggtataacgccctcagatctctctttgagggaattattgctctatttagagtaggcaatagtcttaatagtatattcacgagggtggaactgactttagttcacatctgtagacccaaacctccaatgtaccaaggttgagacctttccagagcaaagtttgctgagctgggtttcagatggatgcttcaagtatccgttaatttcctagaactatgtgcaaaatttgttgtaggctcatatgtgcattttttctaaggagaagatactttactttcattcaagcattgatatgttccatatcttctcctaaaaagttaagaatagggccgggcgcggtggctcacgcctgtaatcccagcactttgggaggcagaggcgggcagatcatgagatcaggagatcgagaccatcctgcctaacacggtgaaaccctgtgtctactaaaaatacaaaaacattagccaggcatggtggcgggcgcctgtagtctcagctacttgggaggctgaggcaggagaatggtgtgaacccaggaggcagagcttgcagtgagctgagatcacgccactgcactccagcctgggtgacagagccagactctgtctcaaaaaaaaaaaaaaaaaaaaaaaaagagttaagaatatctaaaccagcagctgtaaccttcttgagggaagaaacaatatgtcacttacagcagaatctttctatttccactggaaaataagaagttaggctcacacattctttcatgtatctaatcagcaaatatctggatgcatacttagtgttggatgcttttaaagatgtatgaataataagatgaaccaaacattgatgacagcaataagggacttaacagcaaaaatcagtaatcacacctgtaatcccagcactttgggaggccaaggctggtggatcacctgaagtcaggagtttgagaccagcctggccaacatagtgaaaccctgtctctactaaaaatacaaaaattagccaggcatggtggcatgtgcctgtaatcccaactacccaggaggtttaggcaggagaatcgctggaactcgggaggcagaagctgcagtaagccaagatcacgccactgcactccagtctgggccacagagcaagactcaaaaaaaaaaaaaaaaaaaaaaaaaagaaaagaaaaagaaaaaaaaaagaaaagaaaagaaaagaaagaaaagaaattagtaaatgttaaggccgggcgtggtcgctcacacctgtaatcttagcagtttgggaggccgaggcgggtggatcacaaggtcaggagtttgagaccagcctgaccaacatggtgaaaccccatctctataaaaaaaaaatacataacttagccgtgtgtggtggtgcgcacctgcaatcccagctactcgggaggctgaggcaggacaattgcttgaacccaggaggcggaggttgcagtgagcagagattgtgccactgcactccagcctgggcgacaaagtgagattccatctcaaaacaaaaagaaagaaagaaagaaagaaattagtaaatgttggctgggcacggtggctcatgtctgtaatcccagcacttcaggaggccaaggtgggtggatcacctgaggtcaggagttcaagaccaacctggccaacatagtgaaaccccatctctaccaaaaatacaaaaattagccaggtgccatggcaggcacctgtagtcccagctactcgggaggctgaggcaggagaatcgcttgaaccagggagacagaggatggaactgacttggcagtgccaagatagtgtcactgaactccagcccgggcaacagagtgagactccctctcaaaaaacaaaaaaaaggaagaaagaaagaaagagaaagaaagagagagagagaaagaaagaaagagaaattagtaaatgtacagggagctaaaattgttttaacttacactgaaacagtaatttctcgtttgtgtatagatttctaaatatataactatatactgaagtgttcgtttttaaatatatttaatatgtgtgtatacatggttatatattgagaaagagggatgctaatcagggttaaagtattctaagtttctagttcaacggaagagtaatcatattaactataaacattaagtaaaaatatatgtgttaaatttttaggataattccaaatgctagaaatagtgtttaatgcccaaactagagagaaaaagaaatgtaatggggaagaaaagaaaaactcaaccaatcccaatctttttaggcaataaaagagggaataaaaataaaaataaaaggtatgtgctgtgatataaatcacattggagataaacaaatccataaatataaatataatctattaaaaacagaaattaactacattttggcattagccaaaaacagactgtcttactcagttggaaaacaaatacagcttttcctgtcaataagaggctcacctgaatctaataactttaaaaaagttggaggtaacagcatggaaaattatacaggtatatcttgctttactgcatttcactttaaaatgtgctttgcagatattgtgtgttttacaaattgaaggtctgtggcaaccctgcattgagcaagactatcagtaccatttccccaatagcctgtgtcacttcatgtctctgtgtcacattttggtaattctcaaaatatttcaaactttttcatcattattattatatctgtcatggtgatctgtggtcagtgatctttgatgttactaatgttatttgggggtgccatgaactaacccttataagacagcaaagttgatcaataaatgttgtgtgtgttctgactgctccaccaatcaaccagccactccccatccctctccttctccttgggcctctctattccctgagacacaatgttgaaattatgccaactggccaggtgtggtgactcacgcctgtaatcctagcactttgggaggccaaggcgggcagatcacgtgaggtcaggggtttgagaccagcctgaccaacatagtgaaaccccatctctactaaaaatataaaaattagccaggcatggtggcacatgcttgtaatcccagctactcagaaggctgaggagggagaatcatttgaacctgggaggcagaggttgcagtgagccaagattgtgtcactgactgcactccagcctgggcaacagagcaaaactccatctcaaaaaaaaaaaaaaaaaaaaaaaaaaagaggccgagcacagtggctcacacctataatcccagcactttgggaggctgaggcaggcagattacctgaggtaaggagttcgagatcagcctgaccaacatggagaaaccccatctctactaaaaatacataattagccgggcgtggtggcacacgcctgtaatgccagctactcgagaggctgaggcaggagaatcacttgaacccgggaggcggacgttgtggtgagccgagatggtgccattgcactccagcctgggcaacaagagtgaaacttgtctcaaaaaaaaaaaaaaaaaagagaaagaaagaaaagaaattatgccaattaataaccctacattggcctctaggtgttaaagtaaaaagaagaatcacatgtctctctctttaaatcaaaaaccagaaatgatgaagcttagcaaggacggcatgttgaaaaccaagacaggctgaaagctaggcctcttgtgtcaaacagttagctaagctgtgaatgcagataaaaagtttctgaaggaaatttaaagtgctactccagtgaacatacgaatgataagaaagtgaaacagacttattgttgacagggagaaagtttgagtggtctggttagatcaaaccagccaaaacattcccttaagccaaagcctaatccagagcaaggccctaattctcttcaattctatgaaggctaagagaggtgaggaagctgcagaataaaagtttgaagctagcagagattggttcacaagtttaaggaaagaagccctccccataatataaaagtgcaaggtaaagcagcaagagctgaagtgtagcaagttatccagaagatctagctaagattattaatgaaagtggctacactaaacaacagattgtcaatgtgaatgaaacagccttctaatggaagaagatgccatctaggactttcatagctagagaagagaagtcaatgcctggcttcaaagcatcaaaggacaggctcactctcctgtttggggctaatgcagctggtggctttaagttgaagccaatgctcatttaccattccaaaaatcctagggccctaaagaaatagctaaatctactctacctgtgctctagaaatggaataacaaagcctggatgacagcacatctgttgacagcatggtttgctgaatattttaagtccactgttgagaactattgctcaaaaaaaaaaagattactttaaaaatattattgctcattggcaatgcacctggtcacccaagaactctgatggagatgtacaagaagattaatattgtttttatgcctgccaacacaacgtccattctgccatctatggatggatcgaggagtaattttgactttcaagtcttatgatttaagaaatacttttagtaaggctatagttttttcggttttgtttgtttttgagacagagtctcgttctgtcacccaggctggagtgcagtggcacaatctcagctcactgccacctccaccttccagtttcaagtgattctcctgcctctgcctcctcagtagctaaagctacaggcacccgccaccatgcatggctaatttttttatttttagtagagacggggtttcaccgtgttgcccaggcaggtctggaattcctgacctcaagtgatctgttggcctcagtctcccaaagtgctgggattacaggcatgagccactgcacccggcctagtgaggtgatagttgcttgattcctctgacggatctgggaaaaataagttgaaaaatctctgaaagcatttaccatttcagatccattaagaacatttcttattcatgagaggagttcaaaatatcaacattgacaagagtctggaagaagtcaattccagccttcctgaatgactttgaagggttcaagacttcagtggaggaagtacctgcaaaggtggtacttctggttcaagagaactagaattagaaatgaagcctgaagatgtgactgaattgctgcaat

SEQ ID NO: 94106 - DNA, 223051 bp, Homo sapiens
  misc_feature (1)...(223051): n = A,T,C or G
gacggggtcttgccatgttggccaggctggtcttgaactcctgacctcaggtgatccacccacctcagtctcccaaagtgctgggattacaggcgtgagccaccacacctggcctcttattctctcttcatacacagctttctttcttttatggctttgttcatgagctctcctctgactagaatgatcctcctgtgattaactattaatcctatttatcgtatatgtcttggtttagtaattactttctccaagctgggttgagtgcctttcctcagttctcataatgacctctgcctatagaaattactgcttttaccacttgagtttataataatctctttatgttcctttctctttggaaacaatgactggttcataatcatctttgtacatactgatgtccagcataatgcttggaatatattaggtactttaaaaaaggcacattaaatagatgagtgaataagaaatcagaaattttagctgataacataaagataggtgcctaataagttttgtcccctaaaacaaacaagataattaaaatagaaaaagatcatttcctttatactgagaataggaacttgaaaaccaatagggaagactttctgtagatttgcaatatattagatctctactggcattgttagagttacttctgtaggtcattttcttctgatttctatatttgttttggatcttgatatgccttcttgagtagaaaaatgaacatataactggtctatgttaattttattctgattagcagttacttttcatgtaattacatggtttttacactataacataatccatgaatttaggtttattacctacaccttttagggttcaatcaccctggataaatttgccaatttcctcatctggcaaactgagtggtgtgatcagtaccaagatccccttcagccttaaaatttctgaatttatattgttaattaaaaaataaaaataaaaattcagtgttgtatttatttggtattaatcaaaatgcatggggactgtagagacactgttataacaaattctaactttacattcttcacaaaaatcttgagggaaaagaaaattgtccattttttttgaatcatggcttcttagggaaacacaggaaacgtgagaggggcatgaaaaaaatatagaactgagacaaaatagtaggtttactccaagtttacaagtagcaatatttaatgctttggtataaatcctctttattacagagaacaactaccaaataaatcattgtgtggaaaagaattgatttgggaatcaactgtctgggaaagaaaatcacaaagaagtgattgtgaagacattcatttgttcttcagatatgtaactgtttaatctgaagtaaactttgggatggaaaactattaggaacgtttcttgcttaattttgccattgtacgctctgatattgattgttcaggattattgagcacacatgctgtaatgagaattgtatataatttactatatatacttacatatgatagacattaaaggatatatgtgtctagtaatagcagatgcatgtttctgcccactaaagaaatggttgcagcttttaataaatatggctaagggaatgatgttaagattacgtgtgtgtgtgtgtgtgtgtgtgtgtgtgtgtgcatgcacatattgttctggatttcaaatgagtatacaaaattatcattatcttacaccacttgcattgggatcttcagtttttccttcaagaagtgaattattaataatatatttaacttttagagtattattgtggtaggactcgccagtttcttgctacaacatctattcatccctttctctttagaaacaaactagaatttttatattgcttcccataataaaaaacatattgccttccagattttgcagctaaatttggctatgggactaaattctggccttgagttgtttaagagagatacttgtgagagttctctgaagattggtcaaaggaaactaactcagatggaagatccatttgccctcctgcctttcctcttagcttttagcctgaaaatcagtggtgatggctggagagccaatagccatcttggaacacgacgtgattctgaaggtgggaagcaaggctgggatggtacagaataaagataggaacttgggtccttgagaaaattgtggagccaccatatctacctgtaattcctactttcagacctttttctatgtgtgagagatttatcttatttaagtcattgttatttttgttgttaatactgttgttgttaagctagcattctagttgagcccaagctaggactcagagtctggttatatctgatgagcccctggatcagcatccctcaatgccaactattaaatgtaatgggttaatgatgaatggaactctatttcacgtaacaaagaacaacttgttatgcccaaatattacgaggtcatattgctcttatttctctctaacctgagatttgggtccgtgttctctatgagaaattagaaatttctgttgtggtattctgtttttgtgttaggatcgtcactgtaaatctacttaatagtaaaaataaaatcgtgcttggaattgtgaattaaatgaattctccattgtgcagaaacaggaacagcattatattttgtatgtaatactcttaaacagtcaattcatttattcaattaatatttttgagctattatgggttacataagttatggaggggctttgttatttagtcaactcatgtccaatatcacaggggtcagttgtgaatttggaaaaaatagaagaaaagaaaaattaaagcaaatgacaaaagtctaaatattttcctcaaataattgtcttttttttccttaatgtcttgtgtttacagactggaatttaagccgcatttttctagatggcaccagcctattggtacatatattaatgtcaaacagtaatgctcaaattacacgggttcacagctgtttctacataatttcttaagtattcttgccacgaagtctccccctcttttctgggagacctgggggaagggtctcacatgtccttatgaccggtttgctcacattactcacttactagccacccttgtgcttacaagatccttcatgtaggagctccaccattctgtcttatgtcaggatcttccagtagaacactgctgtcccgtaataaggccatatacatgttctttctaggttacaatttcccacactgctaactgatgctgcattcactttaaactgcaccctactggggactgacttgttctatagaaatgaggtgactgtttctctagccaactctgtcagcttgaagtactactgcttatgtcctaaaatctcttatggaaacatttctttgtcttcttatttatagtcctgaagcatgcatctttcattgtgctttatctcttgtgtctctactggagacacccggggtttgaagttttatcccagcagttatttattccccgtgcacatttactttttctaataattggcagggaggacttctactgctccatcagtttatgagagaaaaccaaactgaatccgagtttcagctcaactgggaaccctgctacaccagaacttaacctggattccagattgcttgataaaatagctagttgatgataagctataatttcttgaccacacacacacacacacacacatgcgtacatatgtacatacagcagttcccttcatccacaggatatgctcaaacccacagtgcatgcttgaaatctcagaaaatactgaacgctatatatactatgagtattccaatacatacatacctatgataagtttatgaagtagtcacagtaagagattaataacaataactattaataaaataataacaatatgctgtaatacaagttatataaatgtggtatttttctctctctcaaaatatctttttgtactatactcacctattttcaaaccctggttgtccacaggtaactagaaccaaggaaagtgagatggcaaataagtggtaagggatgctaccgtatctcacatacatatatttcaaaatacgtcaaaccatacacctcaaaacttgtaatttatatcaacatgatatgcttgataccataggcaatgccattttctcattaactcatctctttcagttgcaaaacaccatataaaaggaatggcacatgctataacatgtattttgggtattttacatttatccagatatgaatataagtaatatacttagttataatgttcccttaagccactgttttgctacatgcttctacacattaattcttttaaaatttattttaaaggtaacacagtttttttcttttacagtctccccttagtaaatgtagctactacgactatgagtaaaagagatatggatgggtggaggagatatggagaggccagcacttttgtagataaatgcaatgtgaaaacaaggaactactctttaattactggcacagaaataatgacaaggaaacaaaattacttcctgaatcacactttatcacctgactggttgcaaaggcacattttttttctgttttcgtcaaattaaaatcttaaccatgtaaattcaaggctgtaaaggaaaactcaggatccttcatagtaataattacagtattaaaattcttagttgctagaaagtggttagaaccattgagaaacattttatcaggttacgtggttagagcaagatttgaaaaaacaaaatcaaaaacaaaaaacccaatgtaaaatatcagaacatctgagatgtccaagctgaaaagtgtaataaacgctatcaactgtagtggaaagaaagttccaaagtatgaagtccagagcaattgttggtagcatgagtggtgggattgaagtaaactgaaataaatggaaggcatttgtttaacctatgatattgctgaaagacaagtcccagcacagtagctttctcctttaaagactagccagatgtcggcctttttaagagcacaaagaagggagccacagaaagaggtaacaatgctggtagagaatggcagctacagtaaggttgtttttaaatggatagaaatctatgtaaaggtgactccgacaaaacacagtagctgtctcctcctcagtcatttaggcagaaacttgcactaagtaaaaaggtgcaaggtatttatcagcaattcccattatctggtacttttattgctttggcatgattagcagagactgtttggccagcgttgtcaactatttgctttttcatcagcctgatgtttggtctgcaatccctctaaaactaacagcaaaagagaaactcggaaacttgggaagtttcagttggcattcagatgtcaccccagcctactctctgtgagatttattctgcattttagaagctcagtggctgttgctctttttgatagccaacaagaagcaacgtcatagacctgtttggctgctgtcctgggtagaagggtttggcagccctagggagatgaatttctccagcgttggacccgcccagagcggagaagcaacacccttccagccactactctgttgctatgaaacaaaagactaggaaggtaagcgaagcaggaagtcccgcctttcagccccagatggctttggctcccggtcccgacgctcacgcccacctgccaccccttattggttagctccttcgtgccttgcatcccttcgtccatttcctttcccgtttccactttcgttcccgggagagtccaggcccctcatttctctccgagtccaattcctttctgatgtgctgcgagcgggccttcctctggggccattgtgtactgtggaggacgtggacggggcggcagcgcgaggaggacgggcgcctcccgtccattggctgcacccgctgtcgggcagtgcgcggttgcgcggcattggctcagcggcgcccggccccgcccccgccccgccccgccccgagcctgggtcctgtgtgtgccacaggggtggggtgtccagcgagcsgtctcctcctcctgctagtgctgctgcggcgtcccgcggcctccccgagtcgggcgggaggggagagcgggtgtggatttgtcttgacggtaattgtkgcgtttccacgtctcggaggcctgcgcgctgggttgctccttcttcgggagcgagctgttctcagcgatcccactcccagccggggctccccacacacactgggctgcgtgcgtgtggagtgggacccgcgcacacgcgtgtctctggacagctacggcgccgaaaggcaagaagggaaggggtcgccggggaggctccacacttcttgccggcccgggggcccggggtagccaggcgcgggccaaggaggaagaggggacagccctggctctcagctgcctttgccgccgccgtccagtttgaagtggggcatttaaagaccagaacccgcaggccggggaggagggagagggcgtccaggcagacggcggtgaggactgcagcaggcggccgggaggcgcgtccacccaggcgccgagcccacagtgtccctcccgcgccctagacggacggtgctgcgggcacgggagggacactttgtcccctcccagtccaccttcctcctgcagctcagacccgaggggccgggaaggggcctgagcagggaagggacacaggcgtcctgaaacaaagctttgggttgagggcagaggcgaggagccagagaagtgaactcctcctttccgtggccgctcttgtcatttttctcttttctcttttcaaatgggctatttgtgtgttaatttcatttggttcttgggaataacgactcaccgcgttgatttaaagaaaggtgttcgtgtgtccgtacttggtggttttagtgtgggacatgccctgcgcttttgttgacaacagagctgtcccttacgtttgtgtaggataatctttatgtttatgtaacttggagaaatctaacagagtgaaagtgaagtttctgcgtaaggctcccaaaatgtatgataggaccttcagttgttctggtattttgaattggaattaaggcaggaggggaagaacattctgtttttatctaggtgggggaaacctgtttaagttttgtttgttcttttttttttttttatgagttgrgtattagttcagccttagctacttgaaacgtgagcaggatgcatctttaactcttagtattgtaaaagcaaatctaggatcactgctcttaaaactactgtgtgtaaagattgagagtgtaaattcacaagcttattgataaagatgaatccggaacttttggttttgctctaatygatggaggaagatgcagtggtacaagttagtctctagttttctggtgggtaaatattttcaaaaccaactaacttttctttttttaaatctgccttttaaagaactaaaattccagatggcaaactcaatgaatggcagaaaccctggtggtcgaggaggaaatccccgaaaaggtcgaattttgggtattattgatgctattcaggatgcagttggaccccctaagcaagctgccgcagatcgcaggaccgtggagaagacttggaagctcatggacaaagtggtaagttctgtctgacgttgcctgtgcgaaacactattcactttgtctgtggtttctccagatttatttatactgttaattaataccaaccattgttatggcaacaatcttttgatttcaattcatcatttttcttcaactctgtgttttttgaaaagttggattcaaagacttttttgttttttaacctttcatcctttctactctttaaggttcaragttcctctacatgactcagtatgtaaagttttaccattggctgctttttgttggtgtatggccatagaatgcttggaartgtttgttctgtcttctgtgaggttgtgttgctcttagataacaaaagagtaccagcaggttatttaagtctttgaccactcatgacaatcatctggtatgatactgaaaatatttactggggaaagaaacagattagttcttaagtgaagaagcagtagttgagggagtttccattttcatctttgagaattcatcttcattaagaaactttttttgttgttaatgggagagttaacagtttctttcatctactattccattttgaaacaggaaacctttcgatggcacattgtttattgtgaaaggaaaatttatgttgggggtggtgaggctgagagtatcagaaacctctgtggtttctgcatgttgctttcagacaaactataatttcacaagaagaaatcatgatgggtgtcagtatccagagaagtcaatctgaataccttacagagatttactcagaaactgtagctgtcagtatcctaccttactaagtatgattataaaataaatttaagatgtagcttgctgctttgcaaaaattaataattcttttttttgaagcagtagcactgtcctggatttattagtaaatgtttggaacacattatgactttatttcatagatatctggggccaattataagtttagttgaggcaagactcagtatctttataactgaagaaatggaggttttawaaacaaatttctgtgtaaggatgtgccaaagcatccatgaaatcatgtgataacattcatctttgctttgatttgctcctgtctgtaaatattggctataaaagccactatcagtagtagtagcaacatatgaatgtgacaagatttccattattttcatttattctgatggaagggacacacagatgaatgactggcctgtcattctacaggcaatggtgctaaatgcagagccagaatatttttgccagataaatagccttagttttgggcttcagtgtgacctatttacgcttctgccaatttattcaaattgttatattaaagtgctccagacagaatgatgtcatagtgtcagaatattgcaacttgctgcttggggttcagttttgattttagcattggatactttagaataaggactattcaattggaaaaatagcatatatttgtcaagcacaatgctgcctatcttgtctttgctaaagagtgtgcatttgaaggtcactctcactgcctaaatcattagttggggtaagagaaggaattcaaggtttttctctaacttayctgctacgtaagtggacagcaaatggttcagattctataaaggggctgttctttttcccccaccctccaactttgagtggtcagtgtttgtacatttgtgttaggacatcaaatcaaaaagatttatataaggatgtggtgagctatagttactataaaatcattatttttgaaacattaaaaatgatgtacacaattttggtctgtaactggttgttaacataagttttattcacttttaattatttcaccatgagttatggtaaaatagatggttatttgatagttaaacatctgctattgtttattttattaacccttctgtgggtttaggtttagtctctccaattgagaaacttgacccaacaaggaaatctattatcaaaagtctctacttagtgggatgtgggtgcgggtgttggcaaatgtacattgcctgtttgtcttcattatttgtcaaagatgaaaatggttgtgttcatttgtgaatgtacccaggggctttgtggagagaaattgcataaattattatgaaagaattcagtatgtttatttttactgtaagatacagtaaatagaaaggcattgataattactaattggcagtatataagtgtrtagtacagaaacatccccctcttttgtttatcttttcttatttgttagtggtgaaggaagtggctcataatatcaacattgtcctgatgattacatcaggaactttattattagttctgaagttaatcccttgacacattrcctttttaaaaaaataactgcaatagcatgaatttagtttgtgaataacagaaaatagcaattttcaagtctaattggtaggtatgtaaaaggcagagttaagtgtatagttaatatttttttcttatgaagcctctttgcaagggtagatcttggaagtataaatatgaacacaagcttcaatttcagtgtgtttcagctaccaataaagtaaaataactatttttacagggaataatgaagcagtcttgggttgtaggggaaatatctagtgagtatgtagttttaccatttcttggcctctggaatttaaaatggtcaattgaaattctttccaattaatgttctgttttcagagggcaggcttttgctctaaggtcactgagaataggagagcgtaattgctcagttgtgttccttataagatgtagagtgttttgtaacagaaaatcagtagcacagagttagcatagtctatgttttgaggaaaagaatagtagatagtagcatatcccaaaacatcccattacagattttctggccttagctctgtgtatgtgtaatttgatagccgacccagaagccctcacatcagtggatgcttatttgatacagtgatagaagtattaatcatgaatacatatctaggttcaagtgcgccagaatgaaatgtggagtctgttctgaagctactcaagagacaaggtttcttaaacacttaataaacattttttgagggcctactgtgtttccactgagtgctcgttactggggatatgaagctagacaagacataatcccgcctttgacctgtcaaggaactcagagaacagtatcagagccaaacacataaatggataattgccatgtagtatggagagggctrtattacaaaccccaagtacagtgggaacagagtagagaacatcctccttgtttttctggccagtgttgagacagttttctgtctggattctgctggccattgccttttaggaacagcattattgtgttcttgttggaaatgctgaggtgagagtaaggaaatgattactaatcagtatggttggaatgataatttattaatgtgaggttcctgagcatggttttcataagaatcttagccaggtgatggaaaatagaagaaacaattttccatctaatagatactaaatgtactgagcatacatggatgcttaggaaattagaaaataattaattgatgctgaagagcaaagcactctgagtacctgcctcaaatttttgttttgctgtcctcgtcatttattttaaattacattaccaaaagaatttaaaaagcatttaggaagtgatgatgcccagtaggcttttcctgccttttgccctcagtctatttagtacatttttcaagcttgaaatataatttacactccttttaatttaattgtgatcataatatattttaaagtttgtcaatcaaggatgcttggattatatataaatattttaaagaatacaagtcaactttcttttctaagctgagttcctcatatctctgaaagatattccatgtggactaagacaggttttagatgcctgttgtttgtgtttactaagttggagactcttacattcctagagccttaaaaccagggatatcattcatttgaattatacttcttgacgtatttccttttcctcactgaagttgttccaccttagcagaatcatgggttgtggtagacttggttaggggataataacaaattgtctggacagttttgtttagtactcagttcagttttgaatttgtgttgtgataaatgaagtgatcccaaagtttggtacatgacttcttagaaaagctattgataaagtgaaagatttaaaggaatcatatgaagacttaccttggtttatccctgtgatataaggcattcatataatgcaggccttaatcagttagtagtcttttaaatattacagaatttttagcattgagattttgaatctatttctttcttctttttagaaggtgctttatgtgctatctgttgatttcatcattcatttatcaaatctcaactatggaaagacagacatttccaaatagctatgccatagagtaaaatgtagtaagtgctttaaggtagtataaataaagtgctgagatgtagtacgtggtagaggtgaaccgttgcttgctaagggtgaaaagttggtgtagaatgaagcatggaggaggtgctggccagctcatgggttggagtccagtgagatggaggacatgttaggttgaaggaatgatagattgttgagtaagagaggggaagttagggtaagatgatagaggttttgattgcttttgtcaaataattttgtcttaatttatttggtagaaaaccattgaaggctgttaatcagggagggaaaacttcagggctgtgctttgatagaatacttacttgactctgtaaagcttgaattaagagaaaaaaactgaaagcaagagtaatgatcaagaggaattaaaacagtctgggcaagaaataatgaaatgctggcctagatacttggaagtaggtgtagcaagtgttggttcagatgtgggaggcattttggaggtaaaatctacaggtcttggtgaccccttagaattagaggatgaaagagaaggtgcagtgaaagtgactcttgaggttttcagcctagttgactccgaaggcagtgatgcacttaatgaggtaaggaacgtaagaaggaaaagaggaagtgtgcgggttagtttttggccatgctaagttcagtgtaccagagtgaatttcatttaaaatcagaaaattaagtgtacagttcaagagagaagtagaaacaagagacacatatttggtagatattctcatagagatagcatttcaagctatataactgtcagagatttcggaggaagaatagagggagcaatgcagagaaaaagtcagataattgaattctggggagattgaggggtgtaattaaataccagagaaggaaagagaatcctacatagattagtgatgagaaaggtagaattaaaccataatgacatcctaggtacaaacagctttaagaagaagataaaatctgaagttctgataaaactaagttcagattcaagtagagaaaaccaaacagggtgaaaaattaagaagtcattgaattgtatgattagaggccattattgacctttgtggagcagtttaacttatgtgatggggtgagattaaaatgagtatgtggattatttaaaaattgttctagaactgtaacaacaatgaaaaggaagggagttctgttagcttgaggatttgaacatcattgaaataactctgtgtgtgtgtgtgtgtatgtatgtgtgtgtgtgtgtgtgtgtgtatgtgtgcacacaccataggagaggttcaaagattggtgggaaaaaaaaaagattgatgggaaaggatgtagttagggaatggcctaagatgcaagggaaaaagaaatagttgaagcagtagcattctagattaaactgtgggagggaaagagtaggaacaagtagaagggttaatcttggcgaataaatgtaacttccacttacacaggaggaaagcaagggaatatacagagaagttttgagggaatttgtaaattttatattgggttgtcaggaagtgatttaaggcataatatttataatgtttaaaccatgtttttaatttttatatcatgaaatatgcaatatatgtattttaactagtcttctagcatttaagtgggtaaataagtaaaaaattaaaatggaaatcaattctcatctttaatattaagttcatcttattatacacttgctgtgacttagaggatgccacagtgctatttttatctactctgcttgggcatatattaataatattattacaattttactaaaggttttttttgtttttaagtatttgtaggttgctaatttttttcaagtaatgaaagacacattttgaaaatatccaacacattttataggtttttaacatagttacatttagatgattgttgagcttatattatcttacagtatcaatgaaaaaagtattaatagttataatattctacctgttaaaagatttaaaaaaatattaaagccctacgtcttttcctgagagcctcttgggtttgaagaaaccagaggattccatgtcagctgacaggaacactgacctgggcttagccttatttcctgcttttctgcacagaacattccaggctttttaagggttttaggcagcatgagtaactttatgagctaaaagagcttctaaaaatcatgatcctcaacaaactgttcagtgcccttggtctaattttcatacctttgcaaaatctgcagggattttgccttgtgatggaatgtaaaatatggaagggagaagaaatattaagaaggagatagggctaactatgttctggacacagtgcatagcactttacatttcctcttgtaagaattataatatcctaagaggtttcccgaagaagaaccctgcccaaggttgtaaagctagtaaatgttagggccagatcctaggtttgcttgattctaatgtctgtgttcacagtatgaagagtgaagcacactgctccatggaataatatgatgcttcctttttccaaaggaagtaaatcaaaagggcatttcccctcctccacttccatatttgatattatcaaattcttctccaaactttgtactcatttttaggcagctttattcaatgtagttgtggatatgctatttgtaatataattttcctgagaggttcgtccttaccttgtttgcttcctcctcctcttcctcctttctgccatcaaatatttgttgcacatctactatatgcaaagttccatattaggtgatagagagagaccaatgagaaagactgttcttcactttcaaggaagttccattctcatttggaagaaagagagtgaacagaatacacaattgatattttaattacaactagtcagttctttaatggtgcttcttaatgtcaatcttctgaagacatcttcgtggaaaaccataaaggtcttggtaattttctgtaaattcagctgtgctggactcatgatcaattttatatgccaactttgttttgcccaattaataatctattaaaaaagtgtatttttatacttttttacactgtacatttttatacttagtaaaatacatttttataatttttatatttagtaattatttgctgcattaaaatggaaagaacccaaagaactcttcggtacctgttattataaagagagagatatatatatacttyaggtcactgtaataagaaacctcttctaacatttataggaggaggacagggctttctttttttttttttttttttgacacggagtctcactctgtggcccaggttggagtgctggagtgcagtggcgcgatctcggctcactgcaagctccgtctcctgggttcacgccattctcctgcctcagcctcccaagttcctgggactacaggcgcctgccaccacaccctgctaattttgtttttgtatttttagtagaaacagggtttcaccgtgttagccaagatgttctcgatctcctgacctcgtgatccgctcgcctcggcctcccaaagtgctgggattacaggcgtgagccaccgcgcctagcccagggctttctatattgtttttaagaatgaggcagttcacttgagagtatatgacttgrttcagtgtaactgaatgctccatgaagtgaggcgtgttttataatgaaagtcttatagtataggcacaattccttactgttgaaattttcattttatttggtaagagttctttcctatgtttcacaggctggtttgaaccttgtttgcaaggaatgtactatctgatctaatacatttttattaccttttggctggaagttttaattaaggcgcagtcagaaaactctttaaatgcaagattattccaagaataagtaatgactttgaaaattcttatagcattagtaaatcctgtttttgtatttgtgcttttgctttgatatggttgaatatatgtatctaaatacatatttatgtattggaatgcatagccaatatattaataatatatttttattcatgtgaaacaatgcatgtacagagagagtctccttaaatatttctaatacatttaagcaaatacaaaactcagttgtatattggtatggagacagttcctgattctcaagtccagctatcagggttctgagcagtaaccttagttaggttctagttctgtatttcaatattgacacgtcaaaaggaattggtcctggtaatttccaaattttttgagtcaatggctatagtggaattttcagcctaattccaataataaatgttttgccttttagttcaacagaaaagagcaatattgctattgaaccaattcttttatgcaccaatcggtgccctacaaagttcatcattttataatgtgactacagatttgttctttgtcaaagctcttctgtgttagtaccaagcttcattctaggaagcaatttaggtatttctagaagaggtgtaaccatttgaatctgaacttgaccctggtggtgagcttgattttctctctaatatactgcctttagaaaagcaatttttctttcctggcttttgcagctccttgcacatagcaggtattcaataaatatttattgaatggaattgaatttgacctgcttagaagtcatagtcctgatgtagggttattcatttttggcagaagctgtcataaatcacagggtttaatagtaatccaactgatgaactgcgcacccagtggcataccgtagttcagcattgtatgttgcactttcccaagtgcaaatttagaaaacagtttagcctacagggccttgatgaactgactctggcctatttcagatctctcgtactactcactcacagccttccttcytatgctctgatcttttagaataactgcatttacttctctcttaacatgcttgctctctggtgtctcttaagccttagcacactcctttgcctagaatactccttttggcaaatttaagtatgtatttcctgacactcttatgtggagatgagtgagctgctgcttttctcctgtagcagtttgtacttgcctccatcatagcactaaattctcctgtaattcttttcctaagccaccagtctttcccactaggcagctgcttgagggcaggtgtgtgatttattcctttctgtgttccctagagcctgaaacaatgcctgccacataaatgtttgttgaattaacaaatgggtcctgaagtttacgtaaatttgcaaatggaataaaataaaaatgtaaatgagtttagcagggatcattaattatatgcctaattttaattaaattgtgatacagttagaaagatcagcccgagattcagaagatacaagctcttgtattggattaaygatattttaatggtcccttaatctttctagttcttagtttttttaaatctggaaatgaatggattgggtggaatctttactaagatcccttagagcaagaattacattgctcttaagttaattatagagaactacgtctcttctgccagactctttgcatctctttgaatcaggaagtatgttctagtcatctataatttsctagctctaagctcagtacctggcatatagtagttcaagcaatttccacctgataaagcaataaattcccacatggaattacagttttaaataaagcaaatgagaaaaaagttcagataaagaatagtgaattaaatatttgtaaaacataaacgtttctgtcaaagaatatttatgtggaatgtctggaaaaaaaatacctgacagaaattttgtatgtatcagttaaaaagttctctagtagaggaaatgaatttgaagctacctggtccccaaactagaagaaaataatgtatcagtctgtgacatgttacaccaagttttatgttgctgacattaaactatgcctgctgtagaatgttggtggcaatattcttggtatttatgtatacttgtgatagtatttttggtttaaataatttaaaaaccatattctttttcaagcaggatttgttaaataattggcatatttgggacttaatctttagggcagaatgaactctgattatactaacgtatcacgtattaaaaagggggtaaaaaaagctctgtcagccattttcactatactttgtaaagatttgctgttatttagtaaatgagatgacatcttacctttccaaggactttcttggagataaaaatactattattactttttaactaagcctatacctttggattattaatttgaatacttgatactttagagttcaattgtaaaaataaaggaaataatacaatcaaactatttgtgaaaaaaaaatagcagtcaaccaatccattaatttgttggttatgtactcagcaattctgctttaaggcattgtttacaaagaggaagaatataagatcatgccctgggttaatgtgaaaaacatcttaaattagaggctgatggttggaaatttgaaccagatttttctctccatctactccccctgaaaaaaaccctgatccccagtgatttcttttttttttccttttcttttttttttttttttttttgagatggagtcttgctttcttgtccaggctgagtgcagtgatgtgatctcagctcactgcaacctctgcctcccgggttcaagtgattctcctgcctcagcctccttagtagctgggattacaggcacctgccaccacacccagctactttttgtatttttagtagagacagggtttcaccatgttggccaggctggtctcgaactcctgacctcatgatctgcctgtctcggcctcccaaagtgctggggttacaggtgtgagccactgcgcctggccaatttctttaagaaagtaagtgtgatagtgtgtataagagtaccctttaaatttgttagttccttgatttattgtgttcgttatgcttgaagttattatagttcgattgtttatttgtcccaggcacttttatgggtgcccagaggcagatccatgttttatgtcccctgaaacttatatgatttgaaagaatctttctaaatataaagaatacgaaagtacaaacatcaaattgtttatgaaagtgaattttttttagaatgagaaaaatccacaaagcastatagtttttaaaaagccggtatatctacaagtgattagagaaataatctagactagtttttggctctgtacattttatactttgattatcttccgttaccgcatatacttccagttttgggtgccatgaaacacattcaaattgccagatttgaattggatttcactgttcccatggtaggctagtcagcattgtgggcacctcaggtatttctaaaaccatcttttaaaaaaagttctattacagatttaaaaaatattgtatttatttaaggtgtataacatgatgctttgatatatatacacatagtgaaatggttactacatcaaataaattaacatatccttcaccttccataattacctttctgtggtaagaccatttaaactctgttctcttagcaaattttcagaatacagtattattagctataggcctcatgctgtacattagatctccagtattaattatcctacataacttcaaatttgtactctttgaccttcttctctccatttcttcccctccccatccctggggcccacccactgttctactctctgtttctttgttgcttaactccttcttttaagattttgcatgtgaaaatgagatcatatattaatagtatattctttctttgcctgccttatttcagtttcattgggattgctgacagtaattaaaccattttacaggagtgactgtatgcctcacatataccttccattaaacccaaagtaaatgtgtcttcaattcaaatttccattagccagattccaaaaatacccacagccactccagtgccacccaacaggaggctttagccaattatgtttaagatattatactcttaggccgggtacggtggcgcacacctgtaatcccagcactttgggaggccgaggcgggtggatcacaaggtcaggagttcgagaccagcctgacaaagatggtgaaatcccgtctctactaaaaatataaaaattagccaggtgcggtggcaggcacctgtaatcccagctacttgggaggctgaggcaggagaatcacttgaacccgggaggcagaggttgcagtgagctgagatcgtgtcactacactccagcctgggtgacagaatgagactccgtcttaaaaaaacaataaaataaaataagatatactcttgacaatttgacaaaaaaaaaaaatacaacgagggccttagaagagagccatgtatctttatgatctttatgtgaacatttaaccttttgtaagagtgctgtcccattacactatataatgctactgtgcaattctcwattatttcatttgaaagttatttatgtaaagagttgattatgccctttctggagggataagaatgtggtggactaacttactcttggctaaatcacatgaacatgtagaagtgaatacattagttggattactaccttctctggccggcagaaggtactttcagttctgcaggcagcccctgaacgccccagtggttgggcagcacctgtgatgggatgactgaaccgttatatgccacatgtttataggcgtggtagacagtatggggaggtggaaaagactggttctgacctgacacacatttactacttaataactcagttattcaaattgcacctctttgttttattgtcctcggggttcagaacagtacaccaaaacgctaattaacaaactatgagacagcaacagctgggaattcagtgtagtaaaataacatataaatgtgagacattggttgtcaacagagaaggcccatttcctcatttttatttaaaaaaaaagactatcagtgatatacagtgattagcatactggagttcttttaagctatgcacaatgaggtatcttagaattaaactttagaggttcaaaataaggatatgatatagaaaagattgaatggtaggagaacagaataggatttatttatattatgacaaacgtgactatcagttaataaattggagatagtaagktaagatcattatttatattatggaaaaatgaagaartaggacatggttctctaactttttaatttttctgtgaaataaaatattatgacttattttatttttatctttgtttttaggtaagactgtgccaaaatcccaaacttcagttgaaaaatagcccaccatatatacttgatattttgcctgatacatatcagcatttacgacttatattgagtaaatatgatgacaaccagaaacttgcccaactcagtgagaatgagtactttaaaatctacattgatagccttatgaaaaagtcaaaacgggcaataagactctttaaagaaggcaaggagagaatgtatgaagaacagtcacaggacaggtaagaagaatatttcagatgttttggtgtaaaggtcatttatgttgctttttacttaatagttaacctaaacgtcaccatgtaattgttttggggtaaatgtgagtcgctttgtatatagtcatgtggtacttaacgatggggatactttacaagaaatgcatttttagacaatttcattgttgtgtggacatgatagagtgtacttacacagagctagatggtattacctaccgcacacctaggctgtatgatgtagcctattgctcctaggctgcaaatctatacagtatgttactgtactgaatactgtgggcagttgtaacacaatggtaagtatgtgtgtatctaaatatacctaaacatagaaaaggtatggtaaaaatactgtataaaaggccgggcgtggtgggtcatgcctgtaatcccagcactttgagaggctgaggtgggcggatcacttgaggtcgggagttcgagaccagcctgaccaacatggagaaaccctgtctctactaaaaatacaaaattagcccggcgtggtggcacacgcctgtaatcccagctactcgggaggctgaggcaggagaatcgcttgaacccaggaggtggaggttgtggtgagctgagattgtgccattgcactccagcctggacaaaaaaaaaaatactgtataaaagataaaaatggataacctgtaataacctgtataacatgcatggagcttgccagactggaagtgagtgagtgaacggtgagtgaatgtgaaggcctaggactgttactgtacactactgcagacttcagaaacattgtacacttaggctacactaaatttataaaaaaaatttcttttccaatatgaacagcctactgtcacatttaaacttgataaacttttaattttttttaactttttgactctggtattaacaattagcttaacaaaaatattttctttctatattaccctataagctttaaaaaatgttaaaaaattaagttttaaaaaaaattttataaactttttaaaaactaagacacaaacacacacattagcctaggcctgcacagtgtcaggatcatcaatattattgtcttccacctccacatcttattccactggaaggtcacacaatatgtaactttttcagattggcttctttcacctaacaatttgcattttagcatggagcaataacatgcatggagctatcatctgtgataatagtgccttcaggaatacctcctgaagggcctgcctgaggcccttttactgttagctgttttttaataagtagaaggaataccctataaaataatgttaaaaagtttatagtatagtaaatacatcaactagtaatatagtcacttattataatatcattatcaagtatgtgttatgcataattgtatgtgctatgcttttatgtgactggtggcacagtagatttgtttacaccagcatcaccacaaacatgtaatatgttgcactatgaccttgtgatgactatgacatcactaggtgataggaatttttcagttccattataatcttatgaaagcactaacataaatgcagtctgtcattaactgaaatgtccttgactgaaatgtcattacggggttcatgactgtatttgcttttaacattaatagctttatgtgaatttacttatgatagtagctagttcatgagacagtattctcaatgttttaatagacttcattttcagagtcattttaggtttacaggaaaattattcagaaattacagttcccataaatctcctctgcccaagcagtttctcctgttcacatcttgcattggtgtagtgtgttatagttgataaactattgttgatacattattattaactaaagcctagagtttacattagggtccactttttgtgttgtgctgttctatgctccataaatgcataatgtaatatatccaccattacagtgttatatagaattgtttcactgccctaaaaatgccccgtgatctacttactgtctcacttccccccctgaacccatggcaaccgctgatctttttactgtctgtgcagttttgccttctccacagtgttacatagttggactcacacaatatgtaactttttcagattggcttctgtcacctaacaatttgcattttaggttcctccatgtcttttcataacttggtagctcatttctttatgccactgaataatactccattgtgtggttgcatcacagtttggtttttcactcacaccttgaagtacatctcggttgcttccattttttgggtaatcatgtataaagttgcaataaatatttgtgtgtaggtattcatgtggatttaggcttttaactcatttgggtaaaatacctagcaagattgctagattttcagggtatgcataagtttagaaagcacataagaaactttcaagaaagtttgtaagaaaccccttgactggttccaaagtggctctaccctttttcattcccaccagcaacgaatgacagttcttggtgctccacatccacaccagaatttggtattggagacaagtgttttaaagacatagtttgattgaatctgcggatgtggtagatgtgggtgggagatgtaacttccatctgtgtattttgacttaagtgagaaactgaactgggctggcaaagactgaattgacatcaaccaaatcctaattttatagccaggattcttcatttagatatcctcattcaagtttattgtttggccattctaatgttaaatttcaggatctatcttaaacaaaataaggaaaatgatagagttttccatttctgggctattttaaatatatatggaatattcatgatagtgatagtttatttagatttccaaattggaaaaccaatattaatgaaaatatatagtgtcttaacatgttagttaaattttagtgtgagactcttaacctctctgtatttagttttctgacataggaaaacctttaagaaacctctaatatttctttcaggtcagaaaaactggcctcatagggttgtaaaatagaaaattcagttatggaggtatgtgaactctaaattttctatgaatactggccaaatacccataacaagtaaaaccatcaaattcaaacataaaaaaccctcttccaggtgtaaaatggcataattatatatttataatttataattttctctctcaattagagatgaacccaaacatactcgtagacgtctaaccaattatgtaactttgggctcgtcacttaatattcttgggccacagtttattcatcttgagggtggtgaatcttcctgttgccttttagcattaattaatgctttaaaattctccaggaataacaagaggaatttgagttgcyacagtgtgacagaagtaaggtagagaaatattatagtgattgtttattcttgtacacttttcaagaagtgctaacatcttgggaagtcagatatttatgttaaatttttatttttcacattgtatttctgccattgacctaataaaactaagttctttacaaatgtctttataattcttttttcaaatttagtagttttgaaattcttcctgatccagccaagtcatccattaaattttactctttagggtatyagtacattgacaaggcatataactcctttgactaggaatttgagtggatacagtgttttaattggatgtaatcatatatgatgtggtaaacttgtatcccacttttacatcttctgtggaaacttgaaacattttctaactcagtagatgttttataatttccatttgataattttgatagttttgcttatgtggaaacatttcatgggagacatttaagttttgwttgataatgtatagattcccatagattttgatagctctcataatgctgactattcacaatgaggtcactcattctgtgtattcttgcctgcattttaagtgtccaagtgaattttgttcactgtcctaartgcaaccctaagacaaaatttattggtttctatgctgatatagcatatccttaattggatattactgttatcctygttctktttactgacaatgttctgtggccagctgtgtttatgcagaatttacatttgataaatgtttcataacaattcataataatgtaccattcttggtacaccataacaggcacataaactttcgaactgtgtttctttttctagtaatatatttggacacattcacttctaggttcccttaggattccaaatgcaaactgagtctaaaatgtgccattgcacatggagctctgaggcattttgctctacagaacacagaagagtcttcttagcatgttttcatttacagagtggcctcattctgaatagtcagcattatgagatctattgatctatgaaaatctgtacattaccaatcagaacctaaaagtctcccatgaaatgtttctacataagcaaaacaatcaaaggtagttaggcaacaaagtatatggtttagtagaatgactccacctaatcggtatgacaacgctggttactgggaatattataaattcactacagaattgtttctttgattctgtaagtagctcactagggacattactataattgagctaaaaatgaaggacagtaatagtagaaacagtaatttggagttaattgacttaatcagtattacttcatgtgattctgcccgctttattgaagaaattgtgctggatgagtacatgaatcaaaatgcatattttaatgttcctgcacctctgttgtgtcaacaataaatgcggattgttatacatttaaggggagatgagaaaaaatttaggtgtcaattctgaactgattgctttttaaaattttagttgattgttaatgatgaatgagtagcccgaattttaaagcaattttacataaatgtaataaatagaaagataaagaagtaaatggcattcaatacatttcctagttacttaggtcctgtgtagaaggagagagrtagaaattatagtcacataattgtatatgctactgaagtagatatttagggcacagtgaaagtcttttgccttgagagtagataatgatttctagtagagaaaaggcatgagcaggctgcatgcctcccccgactgatacagtaaaccttcatcttttatatcatttttcccaaattgttgttgttgctggtgctctgttgttttgttctttttctttctttctcttttcctgcaaacagttcaatgtcacactgagttggtgctactccagctgggtgtctaaaccattctgagctgacatttctgggaagagtaattcagtgatttctgacaagcataaagcttgcatgtgtatgtgtgtgtatgtgtggagagaaggtaaagaacatgtggagaagtctgtagtttgaagcatagagaaaaggagaaactctaagtattatattacttaaagttttagtggcgcaagtaaaaatggatgtgaaggttgtcattgctaacaaatgtataattgataggaggcatttctatgattttactggcagtttcatcagttaaccattttaatagtaaaatttatttcttctgaaaagtgtgtattaatcagctgctctgcaaggtctggtgttggccactgtgttttttaaaacactcagatgatggccgaaggatactgagattttccctatttttgaactgcttgagtgagccagggtgctacaacccattttcccctcctacacactgctagacaaccactggaaaaaaaaagtcaactgaggtggaaaaaatagctctgcctttgatagactgtgaagaaaataaagattaacaaaagctctggccagagaggaaaacatagatgttgccttaacattaacattaatgtcatttcagagcctttgaatcatgccttaataaccagtgttgtagaaaaaataaatgacaaaatggggtgtgtgtgtgtgtgtgtgtgtgtgtgtgtgtgtgtggtggagggttacatgttctgtagttaaaaaaagtatttgacatagaaaaattagctctagaagaagctagcctgtatttaaaaggcttcaggagcatccggcagaaatatttttctccattgactgtttggctaaacaaagaataatttgtaatctgctccattaataaagtgcctttccccttaaaggactacagatcactatgcttgctgtttctacttgtgttggttatttacaagatagtgtaccaaaaaacattttgcaattggtacgttgaagatacatggttaaaagttgaatcaaaagcaacagcagccacaataataacaagagcaacaacaaaacaaaagctgcaaacaaacctactttctttccttatgttactgtatgacatcattgctttgagtaaagaatacagtagtattaatttaaatgcttaaatttatatttatacaaatgttgatagcatggtcattgaaatagttttgcaagtcctcacaggttttcagtttaccatataaagagattgatctgtatgtgtaatttgtgctttaagtggtagttttaatagttactggacctcacagtttaatgggcatgtttataatgctacatcaattaycacattttctcatagttctgtatattgtgagaagaaaatgaaaaaagtgctgtttaactaagtacaggaatgtggagccaggaaatctcatgctctgatgccatttcttctcccagtgttctttgtaactttggttggcttcctgactccaatttacattttttcagttattaaattattttctggttattcataacattttcacctcagacatttcaatgtcacaaatgaaaattaagttgtttcagactaaatgctactgttgctacctcagtctgttaatatttcaactttagtagtagtttctatagtaaaaatattgtttttgttattataacaattatttgcaagagaatcttaagaaggtttgtcttttataaataaattatactatattggatatctatgaaatatgtaatgatacatgaaagggaatggcttatattcatcattaaaataattttacatttaaaaaattaacctagtttttctgtttctcctttttttgtttactaatggtgaaaattgcaattattttgaatttgatgaggacaaaggaccaattgcaagtagaaaatatttctaaataaatcaaaataggcaactaatttcttttgaacacaagtattttgatataaacatatacatttactcattttttctatatttgtttgcattcaaggcattttttccttttaaatgggaaactagaggaatgaaaatatgaatttttgatacttcaaaataataatttttatcttggattcagaagacaaatagtaatcaatctcttatgtagaagtatgtctgccagataggaagtagaatttgctttagaaagcttgaaaaatcttctgagattgatttattgtaaatgaataaaaagtttattttatcttgatgagaatgtttttatgcatatttcaagcatctgagtggtgtgaatagacttttctaaagtttggaaatgaaggggctcatttctttaacacaccatgaaagtagaggccacaagaaagttatttagacaaatgttttcaaagttaaacaaagggagtctgttaggggaggcaggtgagagcttgcagaatctttgactgttaaggactttatggccctgtgtatttggctaactgcacccctgctgcttagctagctagatacaatgtaattttcttgttgatttttcaatgaaaagtgaaagttttttttttttaatagcagtttcctctctagggtatattttacaaaatacaaaagaaaacgaaattattcagatgtaattaaaatgaattccaccattagctttttaaattttaataaaatgcttacttgtaatacatttatttgctatttatttcatttatttagtttagtttttttttttttttctaagccccatgttaatactgttcagcccccaactcctggtttcttagtaactaaaacttattgcaagtattttaatttcttctaaatcagattatatattatgcacatatgatatttggatattaaaattgaggacttttttcccccacagatgagcatttgttaaatgtttatatattcctgagaatgataccaattattatatatattaagcaaactcacaagactcaagtgaacttggctttgcagtggaataccktttatgtttttcagtcttaggtagcttattaaaattgatgttttcctttcagtaaatatctggtgacattaaaatttgataattaaaatccagaagcactcaagaaagaatgcctgcttttagtttcataataacaatactcccacaaagaaagttgatgaatgatgtctttcaagtggcagagttgttatttagttaaagaaagctcctttggcagtttcttacaaaactaaattaaagtttgtttataaaacagacaagctacagtgataatcctatagcctcaagagtgcttggaatctagcccaagaagagtcttgtttttcagtgatttaacaaagaagtggagtttccaagaatccaaacagattagcattcagtgctaattgggtagggtgtaaaatagtattcatgtctgattgttttgatgtgaagtacttcataaccattccgttttctaaatcttttaaaaatattaatcttttgtctcttcagatttattgtttgagcatgagtttttgtttgaggatatatgtatrcatcaatggttcatagatgtgctgtaaacagcaagacacatgagatcattacaaaaagtgccctttatagattaaaataataaagagagattgaggctctgttgttcagtggaaacattgaagaacaaattaaactgaaagataatttagatgttctattgaaatgtattactttgaacatctgatcatgtgattataatataccactttcacatataatcacaaatgtgtgactgtatttgtttcttcgggctgcggtaacgaagtaccacatactgggtggcttaaacgagagaaatttattctctcacatttctggaggcaagaaatctgaaatcagggtgtcagccagcagggccttgcccctcagaaccctctagaataggtaatttctttgtctgtctcagtttctggtagctccaggaattccttagcttatggcagcgtaagtctgttctctgctctgtcatcacacagtgttctctgtgtatgtacgtgtgtgtccaaatttccctcttacaaaaacaccagtgattttggatcagagcctacccttgtgaccccatcttgacttcattacagctgcaaagatgctattttgaaacaaggtcatattgacaggtaggattgaggttagaatttaaacatatctttttaggggacaccattcagtccctaacagtgaccaaatatggcagtgtacatttatactaaggaggggaagaaagttgaaacccattagaacatgtcatggaggtttgaaaaacttggattaatagaatataatagcaaacaaaattacttgtaattattttttgtaaaggtctgtagctgaaataagtttttttcaggtgtgtaatgcatggttaatttatgcattastttttataaatatattggaaaacatggcatattctrcatttcccaataatacatttttgtatttattgatataattgaatttgtaagtacctttttttaacattcttaccgattttaatgtataaagtgccatctctctttagaaattattagtaatacaaatatgtacatttaatttacatttataatattaatagccctggttatttcttaacaatccctgttttctttaattttgtgataatctctggaggattaattagaataattataacttattaaatctgtttataaasttttccctrttgcacatagaaaataaataattgggaagtgttttccatgttggtgacaaagagaaggcaacaaacaccacattcattttgtctttaatattaaaatatggagtattaaacatgatttcaattcaaattttaggaaatcaatttgaggattttagtttaaacaagagtaaatgattgtttctgaaagtggcatgttgaatggtttaaaccatgggtcagcaaactgtacagagccagatagtaaatagtttagactttgccagatggtctctggcaattagtcagcgttgcctctgtrctaggaaagcagacatagacagtctgtaaattaattgacatggctgtattttgataaaaatttatttacaaaaatgagccagaccaaatttgaccattgggtggtccttcgccaacccttggcttaaagtacctatctaatttttggagagtaaaattttaaaactattttatcaacaccaatccatcatataagttgcattatatgtaagtttcatcaacacagactgagtatataagttggctaaaagtaacaatacccatctaacagtacaatgctgtcagagacccaggctctttctggcttattgtaattcatttccttagcatgttgggttttatcttcattctgttcccttcacagttgtggaattcctgttgcagcttcattttttaaggacacaaggcaggaaaggggaagggcaactccacacgtgtctgtcttcttatcttgaattgcaaagctgtcccagtaccttaccacctacttgcttctctagcagattctcttccatattatttaagccactgggtcactccaggttacaaaggtagcggtatattgaaactttgaaatttcagcctccatagtaaagaagggcaagggagaaacggtgtttgtttagtcagtctaaattgtcaaaggagatagccagatatctctttttgagagataaacagacactcttcatttaaacatggtataacttggctttaaggcatatttctttaaaaatatattgtcaaggactgcgaagagcctgaagctactttgccatactttcagggctagcagaagacaggagaatatttggtcggggaaaatgaaccatttattagtcacagagggacagcattaggcaaggggtcatcacttgtgccaggtcaccaaccctcagtttctataggacagtataaagggcaggagacacctgcatgtgcagtggctggcattacagatgaatcccaagcctaaggaccctgaatttttataatggacagtaaacctgcctgactcttgctctggaaggagacattatctttattgaactggactgtaaccctctttttttttttttctccagaggaaaacactgtccctattatctaaggctgtttgatacacaaatgttcctgaaaggataatttgaaaggctggcagtatctggttgcaagacatgaaaaaatgtgggagacctatagatacttctccccaaaatatttatgttctgttctttcttaaaaaccataatgtatctcatgttctcagttttgaatgctacttaagagtaaggatatttaytctattttggattattggtaagcttaaaatcttgggttctgggctgggcgtggtggctcacacctgtaatcccagcactttgggaggctgaggtgggcagatcatgaggtcaggagatcgagaccatcctggctaacatggtgaaaccctgtctgtaataaaaatacaaaaaaattagctgggcgtggtggcgggtgcctgtagtcccagctactcgggaggctgaggcaggagaatggcgtgaatccgggaggcggagcttgcagtgagccgagatcacaccactgcactccagcctgggcaatacagtgagaccccgtctcaaaaaatatatatatatcttggtttctgccattttaatatatataacaaattatgtatttgatatatctaatatgtatattagaaatctcacatatatgtgaaataatgtgatctccagaacaactgtggaaactttgtggtgtgaacatttttaattccttttttttttttttttgaaatgaagtcttgctctgttgcccaggctggagtgcagtggcacgatctcggctcactgcaacctctgcctcccaggttcaagcaattcttctgcctcagcttcccaagtagctgggactacagatgcacgtcaccatgcagagctaattgtttttgtatttttgtagagatagggtttcaccatgttggccagactggtctcaaactcctgaccttaggtgatctgcccacctcggcctcccaaagtgctgggcttacaggcatgagccactgtgcttggcctacattttttattcttgtttgcatattagaaaaagaactttaataattaaagaaggaacagttttacaaagacttttcatttcaagctcattatcctttaaaagagaagacgattatattttcttcttttttttttttcttgagtaatacttcattcacttttcaactttgactactgtaactttaggtttagacccaaataattggtttcagtaggtaaggaaggttgaaattatgtgatataagaatgatattgtttatctttgttatcagtgtctaaacctcagagatgagcaccaggtagtccaattccattttcctgtgtggagaagctaaatagattggaggttacatgacttgacacactggggtgtgcatgtaatattcatgtgtgatatatttnnnnnnnnnnnnnnnnnnnncatgtgtgatatatttctaaatgaagtttcgttaccagttggcatgtctgagcctacagctgttggcatatgaagggtatcagaattataatgcctttttcaactttgtttcgggaggactcatttgaacaattagcacattttatggttgtgaaaatgaactgttgttttttctcttcattaaaccagaattaatattgtatgtcatctggtcagtcgatgcaacttttttttttttctaacacgatgcttgtattcattaaattcagaaagactatttaaagctttatttttcaagtatacctttttctgtaaatatctcttcctttctcactctgtttatgtatatacatgtgtgaaatattacttgtaactttttaagcatttaatttgtcttgatgggcacagatttttaaaaaggaagtaagaaagattacctagttttttctgaactatattaatgataaagcatctcagctcattttacagatgctgaaaacccttcgcgttttgttctgaaggtttttgtagggcatactgattttctatgaagtatgtggagctgtcaattttattcttttttccagagatttcagaaaattttcatttaactaaagatttccatcctggtyagctgggtctcatttacctgattaaaataggtttgcatggataaagtcttaaagcaaattctccttaccacattttgtgtgaattttttcctctttaatactaattttagtttgttctcattacaattgcatatgtaaaaaatactttttgataaagcaactgaaactttgaagttgataatttatcacaatacttttttccccattatatcaacacttggcaaactacagactgtgagcctaatccaggttgtatttccttctgtgagtaaattttcaatggcggagccatgctcatttatttacttactgtctgtggctacaatggcagaggtaagtagttccatagagactatctggcctgcagagctgaaaacttttactctctgggcctttactgcaaatgtttgctgattcctgcattactgatatcattttcataacagtcttaaaaacttggcatttttaaacttaaatacttttttctttttgtcgctttcttctctaccctatctctgccagcagttctttgtgaattaccattgtgatcttctaaaggcaaaaaaaatggtaggtagtcaatgactgatagctatagacctatgaaactaacatttcctatcttgtctcaatattctgatgtatataatcattttaaaacataataaatttaggccttttttgtttttgtttttaacacaagatatgccactaatgtctgacaagcatttaatctagtggctttcctgcattttccatggatcagatgcattctaatcctctgaaatgattattaaatacagattgccagcctttatataatgcctgctaaatttaccagttgggatctgcacatatattggtaaagagtgccctagcagtttctgaccttctgtctgctttcagaatccacatgagtcaaattatctccttttatgtataatcttatcaaggactattgaggtggcacaggtggggatggaatcctggatgtgttcagaactcctttcattttactaagcttcctttatactaccagaggaatccacttccagtctcgagtcacttagaagagggggccgggcgtgatggctcatgcctgtaatcccagcactttgagaggtcaggagatcaacaccatcctggccaacatggtgaaaccctgtctctactaaaaatgcaaaaattagctgggtgtggtggcatgcgcctgtaatcaggaggctgaggcaggagaatggcttgaacctggtaggtggagattgcagtgagccgagttcacactactacactccagcctggcgacagaaaaaaaaaaaaaaaaagaaggatacatttctgtaaggtttttaaagttttgttggaaaagatggattgcaattctcttcttatgtttttctgagattagcctaatcactatccttggaatttacctttgcttgccagccttttatcctgcccctttctcctccctttcctatttccagtttatgcagrtattctttcttattactggcatagctaacattcccactctatccccatgcccatcttggctctgattttctgatcattctagctaaaatgtgtcttttccttctgaccatagcatttatcaaggcctttcatgtggcagttaatgatatattgtcaaatattgttatctttttaaaatggtgttaggagcctgggtaacagagagaccccatctctacaaaaaaaaaaaaaaaaaaaaaaaaaaawtagccaggtgtgttggcccatgcctgtggtcccagctactctggaggctgaaatgggtgagattgcttgagccaaggaggttgaggctactgtgagctgaggtcatggcgctgcactccagcctgggtgacagagtgagaacgtgtctcagaaaaaaaaaaaaaagaaaaaaaggaaaaaaaaaggtaataggctatgtctcttctgtgtctcccatggtatccagaacagtgctttatacttggcaaacactcataataatatatggttatttctttagaattactataggatgattkgaaaatcctgatgtattcctagattacgagctgctggggcctggagggaggcagaagagagatgttacaatggaaagtgttgaagtgtctgaaggcttgtttttagaatttgtaggtacactctgaatgtcagcttcttcacatttgggaatgagtactggcgattttagaagaaaagaaaatgcttataaggatagtaatatcattattatttatgttttaattataaatatatttcaaagcaactcttaactgtatgtattctcaaaatagctttactgtaataacattcttggacaaagttcatgaaattactacagtttacaagtacttctttaatggagtgtccttgtagctacacttagtacctgtaagataaattcctaaaaaattcacatcattctgcctactctcacaaactactcaaagcaatgagcatattgcatagctttcttattgacttattagttctgtatctgagctccaatgagtgttttcacttcctcttattcttatattaacatttcttcaaagactgtttttgtttctgtgatgtgttgtacttatgaccctgaatacacaggacttttcggcaactggggaatcctccaaaaatctatgctttcgacatgaatagtccagtttcatttggtatgtattattgacagaagtgcttcatcctctttatagcttgctgtgcagcagatggttgttatattattcaggactcttgaggcagtgcattaatacgcgtgcacaatgttttttaagtcttattgtgggaattgtcttgtgtccttgttgacggaattccttaatacggatgaagatttccaaacttgaaaactagtttttaaattttagctaaggctattttgtatttatgtattgcttaactgctatctctttttctttccttttaaagtaaaggtcggagggttggatctaatattcttgctataaatgatttttttttttttttggtcttgttttgttttgatgtgagcatatcagctttgagggacatctgagatattttgaatatgtaggcagggcttttaaagaaaggaattgctgttttcttacatccaccatgcagacttagacttgacaggaaaacagaggcatgtgtgttctcactgtgtattatcgttgcgccccctcacatagctgttagggtttgtcagcagtttgttttgactcactagaccaagggtgggggtggttttgtgtgtttttgtaagttaactagtgtgggatgtcagtaatctcagctttaccattttagttggccatgatcccttcatgtaagaaaccgtcatatttgccctatttctcaggccatactgtggttccgaaacttgcccgtaaatatttgtgaaatagtttttcttttcttataactctggaggtcaaaacccagccctaagataaactcctgtttcatattgcctctgcggggtgctcatggtatgtccccagactaatttgggaacctccttgaattactttttaaaatttatctggatagttcttacacaattaaatttaatttttatttattatagcaagattggggacactcccaaatccacacttcatttcctgggagatcatgttagacacagataactatgctaaattattttgatccaggtaagcgtgttagaaagagaggatggggctgctggacttcattgagaggatcttttgatttcagaaaccattagtgaaggaaaggtgtactagacagagctgtcataacctttttactatttcttaagagaagtggtacctctgagagttgtgtaacatggtggtcttcccacatctttatcaagagattaattaaggttgtgaagtaaagctttagaggtgaggcacaaaaggcaagcagtgtttacctctaatcactcgaggtaacctttatattggaagatcagtgtagatgtattgtgtaccagataacattccattatgtaactattctttatttacttcctctactgtatgtgtggcatcattccagcatcaagtttaatccttctttgtatgcatttattgtaaactgtcatttatgtgggattaaaataactggaaagcctaaataactggaattcttgtagcatgtttggtacttgacatttaaaagagagacagatggcaagtaaacaaggtgagagcaggactttatttgctgtactgcaatctcamactgctgtcaagaattttaattagatgttattttaggaagctttcaatttactgcaggtcattgaagcttagaaagaagcagaatgtacaccaagtattttaatatgttagcaatccactgcaattagttaatctggagctagtaggttgtatttttaagagtgtaaacattttactgggtttcagtgtgacttagagtaaaataatttttctgtttaattttaaatcatactattttaaatttctaagttgggcttcagtatcaagttggttgaattaaagatttaaatatttctcctgatgtcttcccttctccttcctactaaactggtgttcatttttctttatggtgatcatttctaatttcccacagcttccctggacatttccttcactgtgagatagtagttttacacatcattcaacatccagttgttcagttttcacaaaaagatttctgagaaatctgacttcaaagttactcttttcaaactgaagctcgtttttagaactattcatgatataggaaaatacattcataactgaaagctttttttgggttattctttgtaacattacatgccgcttttcaccaatgaaaagaatcctcaagaacctggaaaaagcaattcctttttgcagttaaaatgaagataaagagccttgaaaaatggctgatgctaatagttcatggagattaataagtgatatgtgaaaggcagactgtcctgtagttgcaaaatgttacatagtttgtacaccttgtcagcgttgtgataacatgaagtcatagtttaattggtaaacaagaaaagcttccaataaagtgtcccatggatgatcttttcctttgagactgcagcatttctgaagaatatagggtatcttgtgatacagcaaggtaaaagcagggcacatcttccctatgataaatctgtgctcttattgtcggagtttaacctagtccttcatattttgtttctgaatacttgagttcatttatgtatagtggggaagattttgtttttgattttgacttctgtcatgcttgcttgcttacttgatttctttttcttttcttttttgagatggagttttgctctgtcgctcaggctggagtgcagtggcgcaatcttgtctcactgcaagctccgcctccctggttcatgccattctcctgcctcagcctcctgagtagctgggactacaggtgcctgccaccacgcccggctaattttttgtatttttagtagagacggggtttcaccgtgttagccaggatggtctccatctcctgacctcgtgatccacccgcctcggcctcccaaagtgctgggattacaggcatgagctaccgtgtccagccctatttctttatttaaaaatgacaaatacatttatggttgtactacatgatgtttctgtatatgtatacattgtggaatggctaaatcaagctaattaacatagccattacttcccatacttactttttttcttttttaactggtgagaacatttaaaatataccctcttagcaattttcaatatacagtacattgttgttaacctcttgaacttatgtctccggtctaactgaaatttcgtatcctttgaccaatagctcttcatccactgcctcaactgcccacccccaccccaggaaattgtgattgatatattttttraggttgttgaattaattgtcttttttgcagttaaaaaatatattaatagtaaaatgggctaggtagagattttttcagagggcaagttaattctggacctgacaaccttaaggtctggaaaaatagttactctcaaatttttttttttaaaacgaaaggttttacttaattatcaggttctaattcccttaggatactggtcttcagtgattgtttaaatgtctcagaggaaacttatataaagtttggaattttcattttaaaatttgtgttgttccaagatttcaaaacagatctaatctagattattattgatgttaaatgatgtaaaataaaagtatatttaattttagaaatttccattaataataaaattattcaaattataaggaatatacccaagaatgtgagttcttttcaaaccagaattaaactcatttatatttataatacccctaagtactgaaaataaatactaacagcatttcttattcagaaaacaaaactggttgcaagcagcaagagaaaatatcttgctgagtgtcgctttgaaagccaaatgagttgtaaaaaaaaagtaaaagttcctagtttttgttttacaataaagtttctaattttgtctttagttttaactgatcatagaaattaataagcctgtctgtctcagagagagatatttgttctgccttcactattctgcctgaagcaggattctggaatgttcttcagaatcatgcagaatgagttgtaattatttgctacagaatgagttgcaatatttgctagtcttcaaattcattctcattattcaagattatatgatcagaatgaatggaaactgcgatggctataacctagagaagtaataagacaaaaagcattatttactcatatgaagggtttatcattcatatttcttcatcatctacctttctagattcatttcacgacactctccctcaggtcttccttctttatccactcacatcatttttcagtttttcaggcctttaggacctccacatctgaggcttcatgtgcctgatttttttccaactacctaacacatctttcgtatcataacttaaatgtcatttcctcagagaggccttccctgagtgatcattaaatgttttgacacattattttatctcatggtattctgctgtgttctttccagtacttgtcacagtttctgtttcttcgttttcttcaccactgtcaccacagtgcctacttcatttccaacacggtgtaggtactcaatacagattgaaggaatgaaggatagataatgcactcatcttgagctacatcctatttagtgagcaccataaaacttggcaggcattgttagacctttatatggacaagagctttgatggttcgtttttgttttgttcagttttgttttctttctggagatggaaaaagaaatttaatagtgataaagccagagaaacttaagctggacctgtcaatctggtatggttgagaggtatttattttaatcagctgtggattgtattttcatgtgacattttaaaaaggatgaaaagggtcttacagccacatgcatcattcttttgcctgctgatccataattagaatcagcatctagaatctgtttttgtatataactgaagtatcagagttacaagtaaaaccactttccacgttatttgttgtccattaactgctgaagattagcatatttaaaagttttactgagaagcacataattggaacctgatgtttgttatttatcctgattcatgttatattttcttcttagtggacattaaaatttcaaaattgctataacagaggtgctgttggggtagtttcttagttgtatatgggtcgtatattgtatatgggaatctttttatggtacacatctgttttcatcaaataggtgagtagtattcgggcattaccttataccttctttaaagaattttcatccrttgctttaataattatattatgccagctctatttaatataattaaatttttttttaaaatttcctgttgtatcaacctgaaactactttgactagcattttggctgcaaccttcttttcttaactgttcagtatccctctgtgtatttttatttggttcccttaattggaaataatttaaaaaacataatgtgtgactttcttgcttactcttgaataacatttaaacttcagcctcacttgtctaatttcagttctgaggtatgttctacttgttgcctcctcaaattgctttgccttcctgaaaagtttttcttttgattctacatattttcaggggagggataaagatctaagcataaatatcacctccttagatgggtcttttttgaccatcctatcaaataggttgtcacagttagtattgtgaatattttctgatgatttattttctcccccaacaaattttaactgtctttcaaagtataattgaagttctcattcttgaagcattttctgaataatcaagtgctagaacttgagcattttttagcttttactttttgtcagaacattgtagttggtggtgtagagacagttctatcttgatgcttcaggttctcatttctacttgagggaagctcacaattttcaggaatcacggaggatggcatttgagcccgcctggcggtctgagcccacctggagatccccatcctttcaatggggaaatgtatttgagctattccccaagctaatgctcaggtaggagatacaggcaggaaaagatgtcatggaagatattttaaaggaatgggagtatacgcctagcttagaatacaatatgtgaaagcatattgtattgtggttctttggtgctggatatctcaggagtggaggaattgaaggattgtgttttcatttttacactttttctcttctgctcttctgatttttcaaccatgaacatggttatgtgtatggtctggtttgggggaagtatatatcagaaaaaataaaacaagaaaggaagttactctggttaccatgcaatttcgtatttaaatgacaaggttttgcattttggatatttcatgtcagccgtgtctcctcagctaagttctagtcacttagaagtttggtgtcactgaattataattttggtgcttcccatgttttatatttacactagactacatgctatatggacaatgtgcaatcagttaatatctgaatgaatgaattgaccaacttttgagaacagagtttgacataaatttggtggtttttggttcattgtgctttaattgaaggagaagtagacattgtacttcacattaggctactctttagataagctttccattacatggcatgtgtcttactttcttacttgataatggctctgtttctgaaattatataaacagatttttactgtttttaaactttacaacttaatattagactgtaaattatttacttatttattggaaacaaacttttagatacagaaattggtcttttaagacaacaacaaaaaatacctagtttttaatctggctcctgtctttcatgactaagtctgactgatctttcttgttatatgatgctttataagattgattctgtatccgggttaccaacgcttcctgtaacagaagaaaaacattcagatccttatagtgctgagtcaggggaaattattacatacaacaaaggaaaagtctttgataggaaatattgcttctggtaggaaattaagtacagagtacaaggatctaaatgtctgtcatataaacaatgggcaatcttattaggcaattttggacacctattacgtggctttatttatttattartagtaggcttttctcatcatggttcatggggatttgtaaggtaacgataccctggacagccttccaagatgttttgatgttggcagcaatgcattactggggcaggggcaggggaggaggtagaaagtgtgataactctrcatcactccttcttctttgttctcatttataacacctaaggcattggaattccccagagtaagmattctagtgaaaagggaagcaaataaaatacatctgacagttgggatccttgggtttatacatgtgctgactaattacatatgaaatgagatatccccttaaattaaaactatttgaagataccacttcaaatatatgtaatagatgatttacacttcttatcatggctttcaatagcaagaatttctcttgcagtaggataattaactagaaatataaagaaatgtttcaaaagtataataatgtagaagaaaaatagaaaaatttgattttggaagaaatcttcctccatattatgaagatagctgcagtttggtttttttttttttttttttttttttttttgggacggtcttgctgtgtcgctctggctatggtgtggtggcatgaacacagctcactgcagcctgtacttactaggttgagccatcctcctgcctcagtctccaagtaggctcccaagtaggtgggactacaggtacatgccactatgcctggctgatttttaaattttttgtagagacagggtctcgccatgttgcctaggctggtcttgaactcctgggctcaggcatttctcctgccttggcctcccaaagcgtcaagatcacaggcatgagtcaccacacccagctgatagctgcagttttgtgtgtgagagttgatcttcttgcctttaytgtgacaaaacatctttatggaaagacaaacagtattcgttacgtttattttacctgtgtattcaagaatgtttatttttttcataagctacaaaaccagattagaaaagtaacttgtatttcctaaaaggaggcatattttaggagctatatgaactgggcatttttaattttttttcattactttggggaatatttcaggatctcatcagcattcattacaygggaggacaggggattaaaaaaacaaaattgattgttaatgaatttttttttttttgtatttaggaagaagaaagactgtaacttaaaaagaattgtggcaaattatatatgttaaatattctggtctagaaatgtggtatagaggttccctagaagcttctgttccactgtggttaaaatgttttctcaccttcttgaactgtctttgtaggtgatgtcatgaaatgtcccaagagaacgttgtataaaacttcctttgacctttctggactcagggctgagctccttagacctacagtttcttgttaaaatcgagtaggttgtgtttgaaaaataaagtttatttgtaaaattatttcagtttatattttatgtataatcatctctcttacaaatatatgactcaaggaaagatagtattttgccctagggtcaagagtgaaattatttaaacttattagtgcatatttatttcttttctattttrtgctaaaaaaatgtgtggaactaaaatttgaaaagatacttattttgttagtttagaaaatgtttagtatttcatataatcttaactttcaagtattttggcrtctatcttaatattttctcctttaagaaaagacaaaaattaaaaatcttattctaacttagtttagtccactcagtgaaacagcatttaatatttaatgaaaatwgttttgtcgtttcctttgacatctgtattaaagattgctaattgcctccaaaatccattttgtccctttcctatcattatatatttccccattgttatccatccatagtaaagatagcatttcctgggttcacatgttgctgatgtggccctgtgagcaagttttgatgaattggatgtgagtagaagtgagctgtgcagcttctagatcatgcccttaaagggaagccacatgcccgctcattcccctttttcctgctccctgctggctagaatgtgaacagggttatgagtcatctcaaccatgtgaaggagggtgatggaacagggatgggagaaggagcctaagtccttgacttctccatagactagagctgctttgcttaggcgagaaggaaataaacatcagcatcagatagtattattctgtcacacttagccaaaactgtgtataaaatacattaccatgctgacagaattcaccatttctgctgtgtttttttgaggtttaagtttcaaatttgcataatatgtgaaggcattttcatgtgaaataaaacattattaactatatcttgttttcagagcaaccactggattcatgctaatactgcttttatattacagttattcagtattaaaccattttgtgactatctgtaactgttagatgtatgacccatttgaggcgtaaacagagtgctgtctcttgataatctaaatttcctgtcttaaatttttgtgtctgctttgcctccctttctttgtcttcctccctcatgtctttccctcccctttctgcctttggctaatgtctgggccagtgctggtaaagtgctccctggccagtccatgggagtttaaggaccttaacagagaccaggttcctggcgttacttctgaacacacacacacacacatacacactggtaaaattcagttacttgcttggggagtttatgagtttatattgtaatggatggaaaaatgccctgtgctttgcaaccttttagactaagtaataacacttacaagaaattgtgagtgttatgggaaccaacttctgtgtgggagatgggtacgagggaaaaaaaaagtttcataatgatgaatgagaaattttcagaaagcattgtttggtttgtcattttcagtccagaaggttacttaygtcattactctggggatggaatatagcttcactgaatgacagcatttggttccaagttatttagttatgtttcattgtgttgaaataccctacctttgccagaatcgttgtaaactatgtgtgaagctctaggtggggaaaaattgaaaggagcgccatattatattacaggaacaattcatgtcctactcttggtttcctttcaaagccctgtatttgtggctgtgctaataaattccatcacattcattatgcatagctgtaagtgtatgtaaataccacgcatcttgcattttgaagaaaaccagggagtgaacacacatagtctttcttgcctgggattcatttattttttaaaattcattttatatatgaatgagaaagttgagggaacatttcctttcataccaacatagaaaatcctctaataccacatcccctgtctcctggtcctgggagcagtaatgggattttctgggtgcatttgcatcatgtgtatcattgcttttctgtttatgttcagaagccttttctgccaaggcttccacaatcttctgaccccagcagcaggtacatccttgtagatgtcagtgtaagtctttatattatgaagagtatttgagagaatggtacaagaggrtgaaagggtgaatggaagttgggggcaaaataatggagggctaaagaatatagatttgatcttacaaaagctgtcgagaaaccattgtgcattcttaagcagtgaagtggcaccatttaaaatgcacatgaatgattagtctaatatagtttgtctgacggcaaagactggagagtggagtaagaaatttgttggattttataccaaaaagctaaagtgtttctaggatarcatgtcttgtttaatattttatcttttttcaaaatggagatcatgttttatactgccttgttatatggttttattacttctttatgaatgacttaatagagcattttgtgtatgtrgtaaatatttgtatgttcgtttctctgatcaagaagctaatggattattttgaagtatctactattttgtagcactacatgagttgtacaattaacttgagtcyccataaacaaaattggggacatgctggatccatgtcatgctgtcatgctggagttgtgtcatgctggagccgtgtcatgctggagccatttcaaactccagtgtgcttgacgttaaatttcaaaagtcaaggaaattgttgttaagragcttagttgaagctatcttttcaagaatttaaatctactaattcattttgtttaatttttaggaatttgtatgtcattaaaatactctcaaaaatgctgttctgatttgaaatgaaatacgagtataaaaattggggtcgatctttggtacattgtttattgtactggaaaatgaatgcttaacattagtctgtgatagtgatatcatgctattttgtattcaagcctttatatgttttcatcaggaagagtcaggcaaaagcagacaaaaatttcaactaatggcaaagcactttgtacctttaaaacaatttaatgaggagttgtttttactctaaaagctgaggcaagagatacatggcagtaaaatctgctattgttaatctactgtagtctcaaatttttattcattaatttatttattcatcagttccttcagtgatatttgttgagcgcctactctgtcctggcactgctgtagtcacagaggacaattatgagttactgagcctgactcctctcctatatggattagagagtgaacataaaatatcaggaaaactaaacagtttttacattttgctttgaatgtttttttactttcctctccgcttcctttccccccttctcttctttctctttccatcccaggtcctcctttttctcactatctgagagtcggaggaaacaaggagatgggaatttggagtggaagatagrtttaaggagatagttatcccactctggttctaaattcttgcacaatatctgatatggcattagctgaagaaccatgacatgattgatttctttttttcatcccactrgtatatgttacaggctctcagtgtgccaaccttgtttgagacacaaaggatttagtagtgaataacctagatgcagtcctcatggagcagacgctgtgatggagaaggtagaccacaaggaaatcagcatatacaaacatgctataatttcagttagtgataaatcctataaagaggaataatctaggataggaggagagaaaaggagagatgcctttatagtaacgctctaggtactcttctgattacactctaggattgtgtatatggctctctcatgtcctaacacttttgcaaagaatggggatatgtttcttttagtaggtctaagtctaaacaagagaaggtggaatgatgaggtctccttctcagtggctggagtgaagtggaagggtataggaggctcccctttcgtgaatgcccttgctgtctcatcagggacaccagatgaggctgagctgttagcttccctctccaaattgtcatttctgccaccttgaatcccacagttggcataaaaatcgtattttaagatgttattactataatttagttgtgaataggaatgggttatgtgataggcatcagggaagggcacaaagaagaaaggggcccagagtggggagattgcaattcgctaaagtcaggctgactctactccacagccctcctgacctaaggctgtgtttatgatattcagtcctcttacgtgacagaaatatgtggtacttggtttaggttccaggtgcatatttgttaactaaagttgccttgcttgggtggcaaaaaactagcctgtagtccattttacaagcataagcggtgaaggtgtttaagatttgactttgcatccatggtaacagtctccaccaatagtacatgttacagagccctttaggcctacaattgtactgtaaagacagactgtagtgacttgtctttcttatcaggaccccaccctacatggatccttgaagagtgagcaggactgcagaaggagctcaggtggatttgacagcttataaacctggagtttggggaatgctgaggcttcaggaagaaaacaccagtaagcttaagtttgggattcccactactcaggaggactgatgatggggaccaaagttaggaaagcagaggagttttggagaacctatgagttcaaaagggtgaagtaggaaaggtgagaatgtgagggagaaatgtcagagtttatttggattcttttaaagaataaaatagaacacagtggggagattcagagtcagcttggtagggttgagtttgagggcctaagaaggaagagagtgatggagacattataagaatggaagctcaagagaaccatgtaggtgctttgtaccctggtatggagaatttctgggtgcagagttcatggaccctggcgagtaagagctcaacacaagagattagttgctacttgaaataaacatgataattgtggcccagacagaaaagcctcctctttttcaaaggtcaagattgctgaggtacatgactcagaccttgcatagcagtaggaagagtaaccagcagcaaagcaataagttgtttatcaaagggtgctggtgactcagtcrggaggatttggaatagaatgattgatttggaagtaggttaagctaaccaaataatatgaatctcctatgtgtttcttaaactgattattttgaactcaagattctcttctagtgttgtgaaaatagtttgtgatatgaaaatgtatatgctcaattgctgtgaccactaagggagacaggtatagcaagagaaataatggttcagtctggaggggaagccatcccttctcgcccttcccctacgttgtgtggatggaaggtctccaagagaagcatctatgagattaggccagggagccttctgtttcagggccaccccattctgtgtggttttatttgtcagagacgctgatcctaacagaaacagctgtttcagtgaagttcaagcttgccatctattttcagtagaagcaggaagaatgtcagagacaatgtttgcattttagggcctttttataggagcctaagataaagctgtttaaaccttctgtcctctgtcatttaacttatcaaattcaagcagagccttttaatttcaacacacttaacttctagggatgaatagggcattgaacggattctataaacaagtacttttctgagcgataaacaggaacaaaagcagcacaaagatagcatgtcaacaaggtagggtgtattgtgagaagggcaaggcttgagagcctaatctatgctattctggggaagcaactatgtttgtttgtttgatttaaggagcagtgaagttacagagagcagaaaatgctgatgtacctgaaggccattattcacttctgtagacagtgctactgggtgagaagtgaataatattagtaatatatgttcattaattaaatgtagcttttaaaagaaaacacaagatggaaaagtgaaacaaaatggatagagttgtttgggtactaagagtagtagagtagattgaagaccatttaaatgggaggcagattttcccatgcatatctaaaaaggtcctagtgttatcccttcactccattttagatttgtttgtttagtttggccctgagtatgctagaacagataataacctcccagcaaatgtaactgagtgggaacattattttagttcactttcaaaagaagagggagatccaattcataatacccaaaatagagagtaccggttagttccagaattgaccagccatggaaagacatagaaactttgcctgttagaatgctcatcctaagaataggacctgagcttttagaggtgttagatgactagaaggccttagaaccattaaggcattttatttctttcacattcagccagctttccttgagcagcttttctatgcctcttgcatttataaatacttaaacatgttatcccattcaaaagtgtaatttgttgatacattggttcaacactgccattgtatatgtgtgtgtgtgcaccatatatgttcatattatagttgcagatgaataaaagataatgataaataataatataagttatttataatagtgtcaattggttaaataacttatacatccatatgatgaaacatttccatttttaaatataatgagccacatttatatgtgctggtatggaacaagcaaaaaaaatgttaagatgcagaaagatgtgtttagtatcataacattgaggcaagcagagatacacacagatgcagacttcacatctctgttcatttatatttgaactatgagaagaagtgagaagggatgaaatcatgaccttgaaaataagaagctgtttcttcctctgaggtaggagggaaaagaagttgggtaaagatatgaaatggtgaaacattagttgaggaagaaaggacaaatcagtgagcaaaaatcctgtttttgtttttataaacatttcaatcccgggcaatcttgagaaagccagggtcataggttggatgattgcagtactttcttgtgtgttcaaagaggaaagtccaaatgcgcatttggcactggcacttctgaaaagccctgacctttgtaatcaggttctttttctacctgccctgcaaagatttctttttgttttgttttggcagtagtgtttatgtgaacctgtacccttactgtgaaattttaacttactgtatagactggtttgtgtgatgggctcctacctattttaggactagaaaggactgattagatcatttgctctggcagttggcttttaggaaggtgaatgtgtaagcctttgaactgttcggcattgaaagatttatggatctcttaggcagttatatcaccatttgaatagtaggtgatagatagatagatagatagatagatagatatagatatagatatctgatctttaaaggaccaggattgtagaataatgttagctaggtatgtaaattatgttgtgtttggatgtattttgtttttggatgtaagggacagaacaagtacatggatcaattttcttcatcctataaatttggtaaaacagaaacaatatgatgtttatttcttattttgtatttgtataaaaaatgtaagtgttggggatcattgtctcttatggtacctcacaacccatcactttatatcctaccttcaatgatataggtaaaaggtatattttttaaaccagattttacaaatttccattaaaatgttgaatttttagtttttataaaactaaaattttgagtaaagaacaaaaaggaacagaaaatagtgaagaaacagaaatagagaacgaacttcctaggactttttaagcaaaatgaatattcaggctaatagttctatttatttcctagaagtagtacacagtctagtttttcttttatacattttcttgattttagggtataaaattaaaaaaaattctgaagaatttctttctgtgctctttgaggttttgcatttttatctggtgtttgtgtaaaattaattcaacttaattatgggaggggtttaaaacaaatgatactctttctaagctgggacaagttattttccttagtcactataggaacaaagaaggaatgagtggcagagtagaattgcttttgttgagcatgagctctgatatcttggctgtactgttcatttacacattacaaatattttcttagattctaagtaaatgttaccccctgcccccgaaccttgcttctactattttaaattctttctgctagctgcttctttctgaaccctaacacaggggtccttaacccctgggccacagaccgataccgatatcaggaactggacgtacagcatgaagcaagtggtgggcgaatgaaggcagcttcatctgtattgacagctgcccccacattgctcacatgaccacctgggctccgcctcctgtcagctcagtggtggcattagattctcataggagtgtgaaccctattgtgaactgtgcatgtgagggatctaggttgtgctgtccttaagagaatctagtgcctgatgatctgtcactgtgtcccatcacccccagatgggaccgtctagtttcaggaaaacaagttcagggttcccactgattctacattatggtaagttgtataattatttcattatatattacaatgtaataataatagaaatcaagtgcacaataaatgtagtgcacttggatcatcctgaaaccatccccatgcccctggtccatggaaaaattgtcttccatgaaaccggtctctggtgccaaaatagttggggactgctgccctaacacatgtagggtaagtgggatttcacatacaggtataaagataacattttcattttaggaatatatttttccatataataataggaaaattgtgtatcaatgaagttttggaatggtttgagactctctatgtaagacagtgagtccaactgaaaggaagcatggtgtccgttgaatgaattttgcttcttatcaattcctgcaaagttctgatgatatcacatttgtagaaatgagagcaaagatacaaacaaacaaaacaaaacaacaaaatactacttgtcacttttgaggagaaattgaattgtttctatacatcttactttcccttcattatggtttttctttctttctttttttttttttgagaggtggagtcttgctctgttgcccaggctggagtgcagtggcacaatctcagctcactgcaacttcctcctcctgggttcaagtgattctcctgcctcagcctcctgagtagctgagactataggcatgtgccaccacgcctggctaattttcgcatttttattggagacagggtcttacagtgttggccaggctggtctcgaactccttgcctcaggggatccaccccccttggcctcccaaagtgctgggattacaggcgtgagccactgcacccggcctcattatgtgttttgatgaatctgttaatttatgctccaacttaaatattcatatttacttttctcttcaagtgttttcaccattgttgactatatttaactgatatatgaagctagatttaagttatatctaacattttgcaaagtatgcttgaagcagaatggagttattgtataactatacataagcagaagttctatttgcagattcacagatgcaattatgaagttaagtcagggatagttgagttgaaacaaactttttcactatagttttgcttcctcatgtagccattttatttttttttacaaattaatctaaatctctagactttcatttttctatatcctatattcataaattactaaaggttttaaagtaatagaataggttaaaatagctgcatactcttcttagaattttgcataaaactaatcttcacaatctatttttctgaacatctgtatgcttttcgtatttaatttattgtttaaagaatttttgcggtttctcttgtgtttagagttacgtaaacagcatttgcattagattcagtggtaatatacagttgcattataatatacttactataaaaagtaaaaattattcrtgatttttttgctggtaagtttgagtttttaacttaaattaagttgccttaatttcataaatttcagtgcaatttcttagcatttttattgaagtgaagaagctatgtagtcattgtgccttatttttaaattgctctggtactttcagtagggaatattattaacatgaaccccatttcattactttttaaatgtccttctagttgccctaactgtattgtaagtacctggagattttatgtctcaagccttctttttatcagtgtggatgtataatctccataaatgtcaattggtaatgatgatgagccattaaaattaatagcttatttgctaaatttgatgcttttaagtctaggattcgattttacatgattagacctataaatacattttattattacaaatttatttgtgtccattctttggaataatcattctgagaagtttctttgggataagttttcattaattttgatgaaatttgtggtgtttttgaaacagccactttaatattattgtgacatatttaaaggaaagcacatggatttctggaaaccagaattttaaacaagataatataattacatcttttgggaaaaaaattgtttattttcactagtgtgttttattccaggaagcaagtttcatcatcatgatttaaaataataaattgaaagacataaaacttaataatgcaaattagcttttgttggttgtgatgatgtactttgctttacgtgtatttatataacacctcggatacccaaaatatttattaaataccagcatctttctcacattaacctgaaaacttacagtagtcacttttctgcttgcctttattgccagactagtggcatacacaactgtcttttcttacaactaatgccttcagttatttcttagatatgagctttggtatgttacagttttcagaacttgctcaagtaaggcctcattcggcctcattgttcaactcagtggcttgggctctgttgcatctcccgatagttttttagaatattcactactctagttttcagtgacatcgtctgtcttggttcttctaaactacttaatgtgcattcctcttgtagggttctcatcctcctaaatgccggtattctccaaggctgcttcttttagtgtcctcaagcttcaagtcacccatggctactcatccttttcttctatttaccatcttcagttagtcccaagtcctagaatctcctctcccttaaaaataatctttgctgctcctccttgtcccctgttcttgcaactgtgttatttcatccttcccttactcatgataagattactgataatggctggccttctaatatcttgctccccaatgtgctaaagctagagaagtctttaacactttaatcctcttctgggcatttgcttttcttgcaaaagattaattatcttctttttaatctggtttattttacatatgccgtcttatttctcactactacggacttgtcttcttctcattttcatgccttcataattctaaaaacatgtcatgctaattctcccactcatctggaatcctacacacccagttcctgtcccagctcttccataagcctttagaccttgctgatttctccttttgctgaacctgtcttcacttttaatagcatgcatactgatgtatatatatcaaaaacccttttttttttaaacattacttagaattgtggtggagttgtcactaaagattaaaagtaggttccattaataagagaccatatactttttggtatccaccgcagcagtgctgggcccatattttggtgctcagtaaagttgatgattgatttaattgattaaataggtgatacttcaactttcaaatagagactttgtttttaaaaagtacttagctttatattagttgaacagctgtgtacatgaacatgtaaagtagaacttactttatgcactatttactcctgtagttctaaaaatactgcattttgcttctctttttttgtaaactactttctggagtgcttttattatttaaaaatgtacttcttatcatagggattagtgagaagtatttatgagagttctgttaatgtacctgtaaccttaggtatacccaggagcttaacattgcaaaaatcaagcttttgaagaaagaatagcttaagtgctaaatttgaaattgcctgcttagtagttttctaaatggtttagaaaaaattagttgacacgtttgtttcaagtgattttggagcagccaatttgttcgttttttaaaattaataagggcagtcaatttactaatttttactaatttcatggttttgcaaagagaaaaacaagatcagatgacatcatgcaattttttttttcttttttaaaaaatatactaagttctgggatacatgttcagaatgtgcaggtttgttacataggtatgcatgtgccatgatggttaactgcacccatcaacccatcatctacattagatatttctcctaatgctatccctccccttgccccctacctcccgacaggccccagtgtgtgatgttcccctccctgtgcccatatgttctcattgttcaactcccacttatgagcgagaacatgcggtatttggttttttgcttttctcttcctgtgttagtttgctgagaatgatggtttccagcttcacccatgtccctgcaaaggacatgaactcattcttttttatggctgcatagtattccatggtgtatatgtgccacattttctttatctagtctaacattgatgggcatttgggttggttccaagtctttgccattgtgaatagtgctgcaataaacatgtgtgcatgtgtctttatagtagaatgatttataatcctttgggtatatacccagtaatgggattatggggtcaaatggtatttctggttctatatccttgaggaatcgccacactgtcttccacaatggctgaactaattcacactcccaccaacagtgtgtaagcattcctatttttccacatcgtctccagcatctgttttttcctgactttttagtgatcaccattctaactggcgtgagatggtatgtcattgtggttttgatttgcatttctctaatggccagtgatacatcatgaaatttctttcagtttcattggaactgatagaaattgtcattgatattccattgtaatataaagccattaacagcctttcttcctgtgttttttgctaatcatcctttgaacagaacggatgcttttgtctttcctttcactactacattctaaaagaacaaagatatttttatcattcattcaataaagagtaggtacctacaggtgtacaaagcattttttgtagatttaaatctcaatctgcactgaaggagttcttaaattagggcaataatgtaggtttacaaaagacagtatgattttgcatgaaaatgcactgggaagtgctttcatagatgtataaacacattctgaagagagagaatttcttatgcctgacagggctaattacagataattttgtgaaggagctagcatttgaattcatcttcggaagcagttgggatattagtggctaaggatggaagtggagagactgtactgtgtgagacacaggggcaggagatacagggtgtgtggcattagagggtggggggtgggtacaaaatttggctctggagataagtgggaccatatctgggaggtgactgaatcttagactatggattttcttctcatattcattggacatgagggataattgaagagaattttcatgaccagaggtgtgtttatgaaaatttgtcagcactgttgagtataaattggagcatcatgaaattggtaatgaggacggtcctaaacaagacgttgtagtagtataagtaagaaataattgaagcctaaactgaagataatggcagtaggaatggcagtaggcaaaagaaggaatggacacgagtgatttcaagagactcagcataacttgctgccatattcatttatatttccatgaatcctttttgtcattccttaagtacatattgtacatgtacgctattttccttcaatatattcagtggtggaagttaattgattaaacaattttagttttgtagcatcaaagtctgtttactcttgtgacaaataactgagttcaggtttgttacagaatttaaaagagttaaatataccatttgcataaacaaaacaaaagggaatcaacagtctcagtaatactgattaatgatttaggtatattgataaatcctcttatctgggttctatgttgttagttttattttccgtcacattttgtttttcttatctctgatgcacgtataaacataaagcacacaaaagctttagttgggagaatttaattctttctgaaattctattcggattttgagtctcactctttgatttctcaagttctgagtcatgagtgtttgggcataaaaacctgatgatctttttttaaattttcattagaaagaattaaacaagcaaacaatcagaattgcttaattgaactacatttgaaaccaaattatagaggtagttataattttatcaactttttctgtcctacgatctttcttattagacaagtctgataggctttgtaagcagtatatatgacaggttttcattgaaatgctgccagtgttgaagaggagaaaagctgattttccagaagtgagaaagacaaggaaacagtcacaattttttaagattagttgaggaataccacacttggcttcttgttattgaagttttttggtgtaggtctaacaataaaaatcttgtaatattggttccatatgtatagctgcttacttgtttcatgtaatactttcatcacaaaaaatatatatctaatatttctgtgataaattataaatacartattggttttggtccttggaggaataaccttacaaacctttaaagacttttaattttaatttttattttctttccagctttattgaagtataattgacaactgaaagactagttggtaattgaaattaggactcatttttatagtcagacaatgttaatatttaggaggagaaatgatgatttattaataactttactcaaaataccattgcataaaaattatacatataataaagtgattaaggggcacccactttttatttactaataacttagaatattcagtaactattgtttgtaaaatgaattttcttttatccccatgtctgtcattctccattcttaaaatattttcctctgtgaaacaagccagcagggataagccccatgttttgtttgatctagttaatttgacttccttctgtttgcaatgtgttattataaggtgaaatattttctggagttgtttcttaatcattttattactcttccttcttgtagggaaatggcgtgccattgtttccttcttttgtttgctaagttacctgaattttatctaagccatagtttaggtgggttagctttaatagtatttgaaatactgcttttgaattaayatactgcttgtttactttatcctttaaaatgtactttaccatttaattcttttagtagcactgagacataaatagggctgaggatgattttatttacatttcctagataagaaaattgatagactatcagtttaagtaacggcctaagatgactaagttgaaatgagaaattaggactgacattaagatattgattttatttcaaacagcattcaagaagaaggttagtagttattttagataaaattaatatagaaataggaagcacaaagaataagcaccccacatttctgatagataccacatctaaatatcacctataagatcttcctgagtctagcccttcttacttttgtatcttcatctcacagggtttcccttgtttctttgctgcatccatgctgactcttttttccagtccctttgcaattgctctgcctccttttaaaacaaaacttttgcccttgctcatttctacttggagctgtcatttcttcctcttagcatcaataactccattttgctgtttagatcgtatcttcctcagaaaagatgttccagacttcactaagtcaaattcctttgcatagctcttggcacagttgtggtgttacttttgtgtgcatgttagttttattccttcctttatcccactgatctgagtttacagatcagtgggatgtgactggtctgtttttattcattcttgttccctaggtgactaatagcatagccattgagacatagtaggtgctcagtaaatatttgttggatgagtgtttaggtttaagaaagtatctttgcaaacatttgcagcattatcttttaatatttatagctagccagtcatatatgccaatttctgcatctacctatttgtcctctttaactgtatatgccattagcagcaaagcagtaatatggatattactggcaggtttaagtcattgacaggtaagttaaaacaacaaacaaacaagaagggaagggagaccaagtatttaaaaaaacaaaacaaaaaaaaaggaagtggggccaggtgcggtggctcatgcctgtaatcctagcacttygggagggcaaggtggcagatcacctgagatcaggagttcaagaccagcctggtcaacatggtgaaacctcgtctctactaaaaatacaaaaattagccagtggcaggcgcctgtaatcccagctacttgggaggctgaggcagaagaatcacttgaacctgggaggtggaggttgctgtgagccgggttcgtgccattgcactccagcccggagaacaagagtgaaactccgtctcaaaaaaaaaaaaggaagtaattttcgtagggttgtagaattacagagcttgatggaatactggggtttatctagggaaatctgtctgtctctcttttaaagctttttattttgaaactttacccagtttgcctcagtgttaacgtctgtagcacaatatcaatagtaggaaattgacattactgtcatccacagagctcattcatatttctctagttatgcatgcattgatttgagagtgtatgtgtgtgtgtaggccagtcatttttaagataatagaagtttataaacttgtttccgtgacttactcaaagccaccaggccatgaggtgaaataattggtttttaaactctatattgctgtctgcccaacagccatgaattctgtcataaaattctacagatatcagggattgttcattagcattagtgccagatttagactaatcctacaatattgaaagatactaactataccttttagctaactgtgtttataatgactcaaaaaatttagttctatcaacttggatctatgtcaaaaattagaattaaaatcctacttttgtttttgcccagcaggacttctctactattcagggaaaggcctaattaaggtttcctgaaaaatactctttaatcacttggattagaataaaaaagaaatgcttttaatcacatacatatctgctaatgcttttcttctagtatctaatggctttgataataaaaagtagtaataaaactggagaactaatggattttaaacatgtttctatactgtacatattataaaatatgtatacttagtgcattaagtagtatcttaaacttatacctatgaagtacttacggtctaaaattgatcaggaggcaaccttacttagtatttcctggaagtagcaggcatttactcctaacaagaagtacaaagaaattaatatagagtttgattcagcgttggagtctgatttttaaaaatcaaactaatttctgtcttgcaaataattatatgtaatatttcctactttttataattatagaaacatgacagaactataaattattttctgaatctatggaatattattgatttggtcagtaagttatctatcattggacataaacagaagagtatataggtttcctttgattttttattttgaggtttagaattaaagtcttatgaagtttagctatttcttcgctaaatgctttaagttatacccgtgcaaaaacctctgatttgtttttgtaatttcactaaaataggctagttggtgagctgtggtgtatgtcttaggaatttaaaataaaaataaatattaaactgcttaagtgaatctggttcacacacacaaaaaatccaggtattttaattttttaccaggacatttttttaaaaagattttgggccaagaaacttattttagtaacagcatgctatagtaaatgcaattggaaatgtaagtaattaattttattgaataaaataagagcaaaacatttcccaatagaaaatctctttgaattggcactatttccagcccaattgatttttaaacaggtataaattcatagcagaaccagcttaacttaatttgtagagctcctatcaagcaggtctcagggtgtacacgttctgtctttggtggaagtgttagtttatatttcatcttgaagccagtggacattttaaagtttctttttttcttctgatgtttacaaatatgtttctttagtaattttaggcttgctagtttgctatgctagcttatattttgttattagggagtgctgattccctgtttctaaatgtcccatctttttttctcactgaatttcttcacttcagaaacatgataatgggacattaaaatcacatatgtagtttaccattgctttattgttattataggtattattaaacagtgtacatgacctttcccccatctgatccctcgtctgtttgagaaagtagataaccaaccaggatttgtaaaggaaaacaataagaacagtgtttggcagcttgctggggcagcttggggtttatacatatttctttctctcagactttgagtttatgactccaccaatcataaaaaagagtaagcataaagcagatcttttagtagatattctgggattaaaaacaaatccaagatggtaatgaggttattgttttgcttgtgattcttggtagactgtatgtatgtttaaaaaataagtctcaaggtgctgtttgtagactcatgagtggctggctctgtgatgggagcatctactgagctggtagtatagcctcctgctaatcatctgccagcttctaagctgctcaaggagttaaatgactgttgatacaatttttaaggagtggaattccgttcttgtcattcagtctatgttaataatctcctatgatgaaactcaagtgttgggtatgtttgtttcctgagctcctcatagacagaatatgtgtttatatacataatactttttaaactacttctgatgttattataacaaggttgagtataataaaaccaaagttatgttttaagatttgctttatgtgtgtatttgtctgcttctatctgtttctccgttgcattggtttatccagatatctttctrtacattcactgctgtgtcactgttgcccagatgggtgcgtgcaggtagctgaactcaataaatatgagctaagtgaatgaatgaatgttcctaaatggtgggttattttgtcttttgagcagctgacagtgattctgatcttacaatctaaaagctacaattaagttaaataatacatagttttaggaatttttcttaatttattttcagtgctcctatttttgaatatactcttgcatttttcctaaagtgatatttaaaaactgttacaggaaagcatttttatcagttatttctataactggtttctataaatcaaccaaataaacaatgaatacttatttttttgaaatatatgcaatgaataatacctattaatgctattctcttcttcagtgtactttaacctgaatgcatatttctgttggtggctcaaatagtgagatttaagtcatagattttgttatctacaaggaacagttattatatgtttaccatttgcaaaacaaaagaaatatgaaatatgactcctgccttcaagaaacttaagaatatagttggataaatatagtgtaatgacataagacagcttagtatacagcatgaaactggcataaagtttatattatgaaaacacagatcttgtcctgatggaatttcaggtgaatgagtacttggacaacttacctgtaaaataaagactacaaaacaaatacacagacaggtccttagagaaacacatattactaaagatgtgggacaggaatagtttaaagttcttttataagtttttgtattaagctaaagatttttaaaaataaattttcttctttaaagtttgtaggtattttaagaaaacatcattttatatgaaaaatggctttgtagaaggttggaaagttaacttaatattttcttttaaaatttatatggaagatacttttcatcttggttttataaggctcagttgaagacaagtgttagcactgaagcttaaatagttaagctggccaaacagccaaaggatgaagaatattttttaggaaaagttctgtgaacttaggttccttattggtggcttgttttctaattttataacatagagtggttacatatttgttacctacacaatgatagtgtaatgactgagcactcactgacgcatcaagggatcccaattctagtcttgattctatttccaactagttgtrtcatgcaagtcctctgagttcctttacttatctaataattcatggagttacaccacagtatgtctaaggtcctttccagctctatgctgatatatacgattctacttcaaaagaagttattccgaataacctttgcacaaactcacagtatagtcttgagaaggatctcagttttgttttgcttttttttctttaaagcaaataaggacttttaaaaataaattctcattatgttttgtgccatatataattacatatataattataaaatgtatataaaaatgtatgattatatccaactatgatgaaatkatgtttttccattaaattatatgtgtttctctgaacataggattttacttcacaaataagactatgtattgaactgttaaaagggctcactggacacataccagattctcaggattcttttcaagattatattgctagttagtgcaataatatcactggtaatgcagaatatctctacctacgaggtctggacatgttgcccaacctgttcacgaacgcctgggctcaggtgatcctcccatcttggcctccagaaatgctgggattacaggtgtgagtcactgtgtccggccatatcacagttttttgaggaaaagtagaatctttaagaaaataagtgactagtctttctcaaaaatttaatctggtaaaatttatttaggtgacatttgaatgtattagcagaaatttacttgaaaagttaaagtttcctttcatataatggtattctattggatgtatgtatgatgtactgttcaacgtactaattgacttaaatgtttagtttggtgttactcaaaattaacttattgctatagttagatagcggtgagtgggcctaaaagagcttgttcgtgtccctgtgcagctcaataacagtagtctagcaattcatatggttccatttttagttttgtaacaaaaatgaattgcttaaaaaatttttttaagttttggaagcaacaatgaatgttttacacaaatcagcctcaattaaatttctttaattctggtaaattaagatttagttttctaagtattccatattattgaccagtattttaacagttttcggatatttttgccatatctcctttttgtgcatttctatccatcaatttgccactgaaaattaaaagtaacctgttgcagggtagtatttcaatgaaaaaaaattaaaagtaacttagtatgacatgcctacttcccatggcatgtctgtgttctttgagttggttttcagccagctatttggcaaagcttactggggggttatgactcatcatatctttgtgacctttaaaaagaatatccacttgctgtaacagatagggatctcacacaatttctgtttttttttttttttttttgaggttttagtattaggtcacaaacccatatamatagttaccacttctatttttgttttgaagtggagttttatgaatatttgagaatatagacagcttcccattgaggattgtattcctcgtccagaggtttcatttcagtggtaaatacggttaagtttgttacaaggtatttacatgagtatgtacagaagtgtattcatttatgcattarttcaacacatactatatgtaatgacgtcttaaagtgagaattaaaaatctctctgaatttctgagtttttaaacccagaatcaatttcattcacattgttctttcttgagcaaaatgtcattttaaagtgagaattaaaaatcccactgaatttctgagtttttaaacccagaatcaatttcattcatcttgttctttctttagcaaacttttcttctgtagagttccccatatgtagaccatgggaggaataggcactgtgggaacatagtggtttatgtgactggcttcctatccttaagagtaatttttttctgttttttttttttctttcccttttctccctccctctctttcattctttcattcttatttcttaagaatcatgcagtggagatacgtgaatataattcaaggtaataaaagaattaatgtcctactactgatggtggcaaagtggtatgyggcttcagagaatagagtgattaattccaatttcggggactggagatagtttcactaggagatgaatggattttgataaacacccatgtgagggaaggctcttgcagcctgaagccgtaagacatgtaaagggtttttaatgaacctggcagttgagggaataaaatatagtagtataagaatttgagtcatcggctgggtggggtggctcatgcctgtaatcccagcactttgcgaggccaaggcaggcagattgcttgaggctagcagtttgagaccagcctgggcaacatggcaaaaccccgtctctactaaacatacaaaaaattagctgagtgtgatggcacatgcctgtaatcccaactatttgggaagctgaggcacaggaatcgcttgaacctggaaggcagaggttgcagtgagctgagatcatgccactgggcatcccagcctgggtgacagggtgagactccctctcaaaaaaaaaaaaaaaaaattgggggccatatgttttgaggagagatgtaataagaaatgtggctgggattttctcgtttggcctggagagaatgaatgtcatgctcagaaatgcgaactttataaaaattagggtaccattggcatttatttcaggaggtaaatgaagtgatctgacctgtgctttagaaagatgatggtggcagagtatggaaaatgtgttaaaggtgatagattggaagcagtggaaccaataggtggccatgggctattgtttggataagtgatggtaagggcctgacctctcaaacagcaactactrtggtggtgggtatggaagttaccatgcagtgaagaagaggaactgataaatataatgttgcttactttttttagatggttggtatggagggtattagagatgggatactctcccactgtggagtaaggataaaggaaggttgttctactataggggaatatataaatgaattcaaggatccttaaagatccttgaaaataaagaggaggtaaaaactaaagagaaatagaaacaaagaatggatataacagatgttgggagctggtgaactttaaggacaacagtatccaacagaagtatcatgtaagtacaggtaattttaaattatctagtagctatgttaatattaacataaaaataagcaaatataatgaattttaacaatctattttatgtaacctaaaatatttaaaatattatgtcaggatgtattcattataacaaattcttaatgagatattttacatttttttttttttgagacagagtcttgctctgtcacccaggctggagtgcagtggcgcgatcttggctcactgcaacctccacctcccaggttcaggcgattctcacaccctagcctccctagtagctaagatcacaggcgcctgccaccacgcctggccagtttttttgtatttttagtagagacggtgtttcaccatcttgcccaggttggtcttgaactcctggccttgtgatccacccgcctcagcctcccaaagtgctgggaccacaggcatgagccaccacgcccggctttacatttttttaaactatttgaaattcagtgtgtatccgcatttatagcctatttcaatttagagcaaccacatttgaagtgcagagtagcacacatcctgagtgaccaccatttgggcatttgagatttaagaagtcaactttttaaagtcctctatgatttttatgtgtrtattaaaaatgttgaagctaggcagtttaagtgtgcagtcagagtgccatgtgagaactaacttcataaagttgtagcctaagagaaaagcacacagactcctgagtgaacagaagaaacttactctcgacattaccctaaaaatcactcctgtaattgagtgtcttgttattttcatgaactgtttccagttgacagtattattaagtcagcaatgtatttttgaggggaaaatgtaacttaaaaattatagtgaaaagataagtgaccccttcaagtagtataacaaatttaagttcattctattatctttaagaatgtgtacccggctttattaactttgttatattaatcaacttccaaattattttgattttctactaagaatggactgtctccttactcccacccccagttagaattttggaacaaataattaaaactattacttcatagatttcgaggatacagagtggggctcaagtgagccacaactccctgtgccttacctgactttcgacttgagaatggtggaagttataaacattgctttgagttaggcttctttttactgacttttgaatcatgaggaggtaggtggtccactccatgaaaatgaactctgaacgtctttatgctacccttgacactttgaaaggagccgtatttaataggaaatagcacttacggaggagaatctgagacatgcaagccgccatacaaagataaatcaacaggggcttgaaaaataaattgcaggcctcataaattcacagcctctcttctaaaatactaagcctaaagaaataagtagaagttccataattattctacaaattgtgtattctgaatctcttgggtaattatcacaactaaaaattacgtattacaataatcacaaccagcaaattacctgaaattgcttgctcagtgaatatctttcagtaaccaaaatttgtacataaaatgactatgcatgagtgctatttataatgagcacttgttaatattggctgtgtaaagacttctccgatttctctaatttaattttcatcaacactacgggtttaaatagtacctgcttcagtatctaagcaaaggggttttatttttagaataaagcagttaaattacactggtgtaatggaacactgtatcaaaatatatacatatatgtgtataaattctaagaaaatactatttaattcatatgttaatccctttgctaacttcattacaattttttccattaaatgaaaattaagtgtcttctaaatgttttatggagttcaaattaagtagttgaatccactgatgactataaaatgtgtgagctgcttcaatagttgttgtatcctgaagtacagattgaaggtgtgtctagatggagccagctgtacatcttcctcttctaagcttctctcccaaaacataggggcaagtaaatgatttttataggtagatgcttttaggatttgaatatttttgtcatgtattggtgttagctgtgggtccgttacaaatcccgtgggaccttcattggtgtgaacattagtgtatgggacttccagtctgatctttggcacccatgcaactttctcttatgtttttagttggcaactctggagaatactggttcctaagctcttttggctcacagatacctttaagagtctaatggtgacctagggattctctttacyggagagatgtacataagcatgtgagcgattttgcataaggccaaggaggaattagtgagactaagaagcaaactgggaactgttccagctggagaggacactggtgtctgcctgtttaggtaactgcaaatcttatgcatgaaagctacagtaagraaagaggctaggggcagggrccgagtaaygaagaaaagaatctgacatccaggatgctgcaggtatctttggatgtatgagtttctccctggggtatttcagatttatttcatgttagtggcttgcttgtgagatttttcttgaaggttattacagtgattcagtgagttattgttggctaattgatgtttttatcatttctggtttaaatgtatatatactttcattcacgcatttgaacaaggctgttctcagtcccttttagaatccaggcaacttcctcatctttccccaccatcctgtggatctttcaggatttttccaaggttacagctcaaagtgtcgtgttgacaggctggagcttgtcaccatttctaaagtatgtttttgaatgaattcaatatccttgattcttatcccaaggagttttaacacactttttgtcattgttgttgttgttagcagtaggctagcttagaattgtaacttgcccatgccaaagcaacaacaacagattgcaaaggaatcttcaaaatgggcggtgggcaaggcccagcctgttttaggaagtcccctagctgtttgctgtaccacagtgaagaagaaagtgaagaagaccatttcatgtaaatgaatgcagtgatgtgggtaagcacatcaaagttcttcgtaaaatgaaaaaattgttcagacctgtcttaatggttaatgcttacttaaaagtctaaatgactaatttgactagccatttgttagaggattactcattttaacttttgagttccttatacttaaagtagctaaacacattttaaataatctgtaatacattaaaatattaaaaatatgcttttctcattaaaaatactrtcttttaccacttttataagtagggtattttacacagtgattaagtatcattttagtttcctctacctaggttttataagctattaaagttatagaccatttatctgttaataatggctgctgctgctttttatgctattttcctgagtgcgttaaaggttatttttattaattagccaatatttcagcccacagtaagggtaaatcctctctaaaaaatttggttttcagcctgctcaactcacaagcgattaagraaaaaacagttgtgagaattcattagtgaaatatttaagaaacatgttttaagtctcttcccgagatttttttttttaaagcatgctgagatagccttctctcactttctccctcttactttcacatgacatataagccaaatggatcagttctttttgacaaagtgtgcattgtactgtcataatttgttttcatgtttattatctaaattcgatttgtgtagcagtttggtaaaacccagattatatgtatgtcttttcactttgttccttctttcttcctgtggtaatttactataattgtattttcccagtaagtcagatcatattagagacattattccttaattatcagtaggtgtccttggaatattgcttagctcacaggaagtgggtgggggggtttgtgtatattttgttttcctagaaatttttatgtaattctaggttattgtcaacaacctgcttgtaaccagacaaaaccttgctatttcaataagtctaaggctagttgttctgtcaaacacgtgtcttgacagtgagtctcagtcatggtgatgcatcagaaatcatctggcgagctcttaaagcaataccagtgctttggtacygctaaggctgtgattgaattgagccaggatgggccctggtaatggtaggctctacaagttcctcagatgattccgatatgcagctcaccttgggattcgttgtrtgttagaaggaactagraagcatcctcctactcagtggttttcagccttggctcacattggaatcatctgggggaactgaactctctaatagccatgtcccttccccagagattttattgattctctgggatactggtctgcacatgcggatttaataaaatagccaggtgattgtaacatacaggtaggtttgaaaaccactgaccaccgcttctgtttttcagatgaggaatttgaggcccaaaccaaagagattaggtgayttgtccaagatccacagaaccacaactagaactcagatcttcagacttgttatcaaatgtttttaccaggacatcacatatttttaagaaaatgtgggctttggtatttcagatgtacttttaaaattatgtccctggctgcttagtctaaaaaacaatgtttattttatttattttaatactggaaatatgaaaggacatgactaagatccagccattaccttagttatgacataagagaccttaggagctgagaattagaaacgttcatgtatcctataacttgtccacattttctagaagcaaatcaggcaaataaataacccaactgaaattttcttaggttagattaactccatgtcactatttctatagcaggaattgtaaatgcctgtgtttataacatgggtcattctctaggagaatgtttaaaaaaacattttattgttttctgggttatagggtgaatattatagaaattttggaaatatatgagtataaataaaaaaatcacttgtatgtaatcttatcatccagagataacagcacaaacgttatgttgcgaatcaaaatggtgaaatgcctttttaatgcttgttatgcgggtgttttccagttgtgcatagaataactttatatgaaaggcactgaaacacacttcatgatgcaactgttgcctcatctatttaacaaatggtactaattgtgcctatttatgtagttaataaaaatgtaaagatagctgaaaagtagcttttccatgctctaatgttctcttacataacgtctacccaaaatatccttgtttgttttttcctgccctttgttttgctaatttgcttttttattttgataataccctcttaatgtttttacttttttcttcattttcttaactgcagggatttcttttttttttttttttttgttctttgtcattatttaccatgtgtttctttctctcactgctattcattattttcccatttctatttttattattctggtcattgttaaacatttcatttttccatctagatactttgttagatcttgaaggattagcaactaattgtcatccttgagatctcatcttaacttttaatcagtattgatatttcttttaaaagaaacaagaccctttactgttctggagtccaacttaattagtcaccttttgtctttctctgtgatgctcctgccatccagaacaacagcataatgcctgaccccctctgtctcacacacatataaggcaggcagttaggagattttgacatctaggctgcagcttttcattgaaaatcttgcagaaaatcttgtgtttgcataaatgcatgtcactcaaaataagcagcaaaggggaaaaaaaagagtagctcttgggttttaaaagaggaagtttacttcccctacccccagtctcaatatttaacatctggttctgactaaagatggggaggaaaaacagacttaaatctccattcatcctgtcttaccaccaaacagtgtgatcactgatagcatttctatttctgttgtggtctgtatgatcagatgtttttgttaatgatttgtaagggaagataatgccttatatttctctgagtggttataaygyaacgtgccaacatttctaatctctagatagggctagatttaatcattatttaatgaaactttgaaggaaataagttattgctggacctcatgtgtttctgtcttatttcaaagagaaaacaaaaaacagaaacctttaattaatctactgataatatttattttattttaaaattttaatttatttcaacatttgaataagtaatacattcaaatgggcagaagtgaaacagtcttgtgagatacctgttttttaaaactccattttagaaaaggaattaactaggactttatatctcttcgttcaatataattttaaagaagaattgttgaaaagtagatatgttttgccatttgctgagaatattttgtacgttagcttgtctcttacaaaaactaaatgtgttcctacttctgataatgtatgtcaatttaaaatttggaatggccaagataagttgctctgcatctgtccttcatatggctcctgagcacagctcagtgactggcccttgcagtgcttctaccgttgtaatgggtaaaaccaggggaaactgccttgctcttgagcttgagcaggttaatcaaaaggatagagcttccacttctcattattctcctttctactttgatgggcagaataaggggatgctcatggaagagaaattcacacccatgaaaagcaaattgccctgatgtctgaatcacattacaaatttgaattaaattacaaacttaaatcaagtctaatgttacctacattgttgtacatgccatcagaaattcaaaagcattttattggacaactgaatatttattgaagtccagaatttattatgtaaacttggtggttagatttttctttctctttctctgtcttttaacctttattttaggttcaggagtaaatatgtaggtttgttatacaggtaaactacatgtcatgggggtttggtgtacagattatttcatcacccaggtaataagcatagttccccatgggtagttttttgatcctctctctcctcctgcccttcaccctcaagtagcccctggtgtctgttgttcccctctttgtgtccatgtgttcttggagagaactraayatcaagtgagagctaaacaagaggatatatggtatttggttttttgctcctacattagtttgcttcagataatggcctccagctccatccatgttgctgcaaagaacatgacctcattcttttttatgacgtgtagtattccatggtgtatatgtaccacactgtctttatccagtctaccattgatggcatttaggttgattccatgtctttgctattgtgaataatgctgcagtaaacatatacgttcacgtgtctttatcgtagaatgatttatattcctttgggtatatacacaataatggaattgctgggtggaatggtaattctgttttaagtactttgagtaatcaagattgctttcacartggctgaactaatttacactcctaccagcagtgtataagtgttcccttttctcagcagtgtataagattcccttcccagcacctgttattttttgacttttcaataatagccattctgagtgctgtgagatggttcccattgtggttttgatttgcatttctctaatgattagtgatgaacattttttcctatgcttgttggttgcatgtatgtcttctttggaaaagcgtttgttcatgttctttgcccactttttaatggggttgttttttgcttgtaaatttaagttccttatggattctggatattagacttttgccacatatgtagtttgcaaatattttctcccattctgtaggttgtctgtttactctgttgatagtttcttttgctgtgcagaagctctttaattaagtcccatttgtcaatttttatttttgttgcaattgcttttggcatcttcttcatgaaatctttgctaagtcctatgtccagaatggtatttcctaggttatcatccacacttttgtagttttgggttttacatttaagtctttaatcctcatgagttgatttttatgtatggtgtaagggaaagggtctagtttcaatcttctgcatgctagccagtttgcctagcacccatttattgaatgggaagttctttctccattgcttgtttttgtcaactttgtcaaagatcagatggttgtaggtgtgaggtactatttctgggctgtctattctgttccattggcctttgtatctatttttgtaccagtaccatgctgttttggttactatagccctgtaatatagtttgaagtcaggtattgtgatgtctctagctttgttgtttttgcttaggattgctctggctacttgggctcttttttgattgcatatgaattttaaaatagttttttttctaattctgtgaagaatgtcattgtggaaggaagacaaatttttaaaaaatcacggtgttggcctggcatagtggctcactcctgtaatcccagcactttgggaggccgaggtgggtggatcacaaggtcaggagttagagacaagcctgtctctactaaaaatacaaaaattaaccaggcatgttggtgggcacctgcagacccagctactcgggaggctgaggcaggagaattgcttgaacccgggaggcagaggttgcagtgagccgagatggcgccactgcactccagcctgggcgacagagcaagactcagtctcaaaaaaacaaaaacaaaaacaaacaaatcacagtgttatggtattcaccataaaagatgaaaaacaaaaaaccataagccaactttctgatattagcctcagttcatggacttcggctatttcacattgagctttgggcgacaagttttgacagaaagtagaggttcctctcctgtggtcatgagcttgtgtttcaaggagttaatgttaagggtgcagaagtctctttcttctttatccagagaataagggggaaataaatacattttatacacacatactcaacatatatctatccacatatttatgcatatttatagtcattaatatgtaatatttccacatatctaactaagtatctgtttcttagataaaggaaattatatgatgtatacttgtgtttttggtttctttcgatcaacattatgatggtgagattcatccttattgctgcatattgttgtactttgttaattttcactgctgtttaggtttctagtttgtgactggttcataattgatctgcttattgatggacatttgttttgaataatgttgccattggctcacgcctgtaatcccagcactttsggaggccgagttgggcagatcacaaggtcagcagatctggaccatcctggccaacatggtgaaaccctgtctctactaaaatacaaaaaattagccgggcgtggtggtgcgtgtctgtagtcccagctacttgggaggctgaggcaggggaatctcttgaacccgggagacagattgcagtgagctgagttagcgccactgcactccagcccggcgacagagtgagactccatctcaaaaaaaaaaaaaaaagttgccattattcaaaagaaggttctgtgcatgtcttttggtgcatatatgcatgcatttcttctggatatgtrgagtaagattgctgggttgttgggtatgtatatactctgttttggtagaatgtatgtatatatttttaaatgtagttttatgtatttatgtggtatctgttattaacattttttagtcatttaataatgagttgtggcttgttaattgtttagctcacaagaacgtcttgcctacttgtattggggataatacgataaggtacgcatagtttcagtggaacttgtagttcaaagactcaattctagcccctagttggtttgtgacattgggtctgtcacagctttaggtttgcagtttcacctttataagtaagatcgaaattaataaatgatctctgaggtgacttccatctgtacaattctgtgattatttcaaaatatcctaaaagactgttacagaagtatgctttttaaaaatatgctgctgactctggggaaacaaactgctccgtaaggttaatgtcagattgtatcttttttacagtaattaagtagtattaggttaggcagaaatctatttggatttttcagtagcaagcctgacttttagtaataggctagttcacataagaccgatattaaaataacagtttttttctttacatggtaacagttgtcaagaaatttcacagaaaatattcataattaaattaaagcactacaagtgtattacttactgttaagtaatttgatgaccgggaattttatgcccaaataaatctttgtattttgtgttacattttcagttgagttcattgagtcagatgggcatcatcagtcttatttttagtgttgcatgggtatattttaataattcattctttttctcttggccttttcccatatataaactctatttgcaagttattttcagagttggaaaataatgagctaatattttcatacttcatattcatagatgaataactagttattagcaggccatatttaatttatttttgtaagaagcttctttgtcacccttttttgcatttctttttcaaagtttgtagtgtatattgagttgttcttcacctgtgattagaggcatgtggatgtactgcaaagtggaacagctacacctcggattttcctgagagttgctcctgatgagttccttagcacccatttgtgacgtggaactggaagttataataggcattttagtgaatctttcatgaaattcagtttatttcatttaaatggatactttttttttcctgagattcttttccttgttcttcttgtgtgaaaatattaatgacaggtaaataatagattttgtgttaatggtgttatttgatgaactaaataagagtcctatgtcaatccctcccccttccttttttttttttttttgttaaacattttagcatctcttaaagcatctggaaaccagaggtttatggaaggaacaccttcctccatcagttccttatgaaaagacttgcttcctgcatcccagcttttcagagccccttagttcattttacccttggcttattactccagggccagcttcccagagagtgctgggcatgcttgtgtgctccaccaagagttctgcctttcactttccttctctcaggtaccagaatgtagcggcatttcctgtaggattctgcagctgctcctttcaaatcactctctggccttgttctgtgatgttgcattcaacatcccaccacagactgtgtcaagatctttctcttttgattagaggttctcaggacaaaataagttaacagtgctcgactgacattttccaaggatatttatgctggtggaagcaatcaggggaggccctgattgctctttaattattaagttacaaggagatacataagaggaggaaaaatcagttccagaggataaagcatcttagtggtgcatttggagaaaatacttttttatttctttactggttggtcttacctttttaaatttgtttcctcctttcctgaccttaaggatagaactagacacsgcagatggattgtttgcatttaggaatctcagaggttaatggtgattgatggagattattgagggaggaactaatttgctcctttctcgaattaggcagaggtgagtcacacttagactgaacttgtgatgtgcctggtcctcttccatttcttgtagtgggaggaagcaaggaaagagccgccctctttctgacctttggcagtctgttgacccatcggaagaatttaatttttctcccaggatagaaatgtgggggtggactggggtgtggtgatgagggaattatcagtctgatgttgatatttacaaatgtgaaaagtacacgctgtcccaggactgggctgtcaaagactaggggatgagtacttcagggttattgagcaagagggatgacaaatgaaagtcccataagtagttgcccttgaggtctgacctgagagagaagctaactcactctaaaacaatgatgctccagtccagtagtgacgttagcagcctccccrcttgggagggactgactgatagatatgtggtttgggacaacagagaggaattgctttcacaaatctttaagtaagtactgagatcttgaagatgctttagatgtagttttacctagaggcagagcaatgaaaaataaaggatcttttgagggtcctgctaaaccagtgctttcagacattaaacttgcataagaatcacctggggatcttattaaagtatatattctgagtcagcaattctggggtgggacctgagattctgcatttttaacaagctctgaggtaattgctatgctgatggtctaaggaccaaattttgagtgccattattagacacttatttaaataaaattcaaattaagattcaccactccgtgtagtttttccttctttacacttaaatatgaaaatgctgtaaacaagatattgtattattccttgtggcatatataaaatattatggaatgtacgtgataaaaatagatattaataaaatccaaattaaactcaccaactaacataatggaaataaatgctgatcagaaaccaaatgctaggccacccattgctatttacagatatccccatgtggtactgtattcatgtatgtgtgacaccagatgtctggaaaacagatttttgtgacaaattttgacacaggaaatttatcttgctccataaaacttaatggaaaaatgtaatgcttaacttcagtccattttaaaagaacggatttcagtgtagtccatagaatcaagtgggatttattcttgagagctgctaggagtctctttatcaagagaattacctaagagaacgtcagtgggtggcatggtatttgattggttattgataatatgtgttttgagtttgccatattcrctcagtattctattttagatcatgaataaaggatatatttctttactacactaaatatttatcagatgaatcatttctggaagtgagggaattaactgtggtattttgaaagagaaacacatcttttcagaagtacatcaacagtgtgatttctgaatgtgtttcaaacggttaatacaccaggggctgagactccgccaaagtagaacatctgcttctaagacataggcttctggtgcattcttctctgtgcactattgttttcttttgcttgttttctcaatttgttaaatctagattatatttcataaggatacagggaagaaacgctcctagctcatttgttatcttacaacagagaaatcttcaacagatcttttaaatttgggtaaaaakctaagaattcctaatgattaaattatgcctggtgataacgtattattgaaagtggttttctgttttgaactccccactcatgcagttctccctggtggaagcatggttgcacatgcagacctctgaattcctgagcagcatggatagaaggggtcctgtgctggtgcagtgggcagcctggatggggaggcagggtcctatctatgatgtgttcttgctcccctatcagcctctttcctgaatacacatcacttctatccctgtagtctgtcatattgccatactggtctacatctgtatgccttcatctgccaggcttgttgcctggcacgttcttctgcatttgctctgctcctcttaacagagttgaacacctctctttagttcctgtgttttggaagcaccttgaatgaccttagttgtacagttagagtgtatgtaattgtgtgtttttatatctaagtaaccactagactgtcgactcccagaaagcaaggactgaactggtctttatcttatatttccattacctaatgtagtggcagattttagcaggtcctcaaaaaaggttcattgagtgaataaactttattaaagtcgatggaactccatatatgttgattataattttcatgcatataaaatcaatctgaaaacagggaaaactgatagttgtgtaagtaagctatacttgtagacaaagaagcagcaagctgtgacatgagtaagatgtgtaagaaaatgtaaagattttctagtgctgctttgcagcctgatctttgtggattatttgtagcactttttcctctattttaatatttaattccttaagaaataattaagcaagaaatcattttaaaaaagtatacaatcttcctatcattttgatgtttaacagaaatattaaaatttgtttttaaaattattttcttatttttattacgacaaaataatcagtatcttcagagagaaataatggttgattctggtgcttaccatatagattaagtcctgcaagtcttgggtatagcagtgcatctattgaataaccatttcactaataacatttacacaggtagacaggtacagtgatctgttaagcaatatttttaaatatcttcttaaaagtattgtaatgaaaggtcaggtacagctggatgccgaaagaattacgctaaaaaaatcagtatgtatctttagtgttaataagtaggattattaatagtgcttgacttttaaacagagaccccattgaatagaactagasaagccaatatccaggatgatttcttatctagacatatgtcaaatctagttatgttaaattgtcttcagaaaacacataatttaaatggcagcgtaattaaaagacactgctgttaggtctataaacattctatgtctttgcttacattttaccacatacaatgtcaggggtttttctacctttgagaacttaaaacttgtagaaattaagtctattgtcagtagaaatcagtggattagcttaatggtattttcacagttcagttcattgtgtggttatctaagtaaatacgttttgggaattaattgcagtaaattccttctgattcaaatctgggtatgctgctttccaaataggatagtacaaatttyttctaaaaacgttccctggttggtttttttatcagagaaaatacagaacwtgtaaaatttataatttttaatgtaaaaactactttgtttaacaagaataaaattcttaaataagatgtttgatactttctacccagcttcatcactcatttctattctcagagagaaaagagccctatcctttcaagtgctagaattgagtatcgtgataatagtagtagattggtagctctaatagtgctaataacaattaacattattgaatgcatactctttatcagttttctaagctaattatttattgctgtatagcaaaccaccccaaaatttcgtggcttgatttaacagcarttattatttgtcatggttttgtgggtttaccgaatgttttttctgcttcatataatgttggttgggatgctagttcagctggaaggtccagtggctttactgtcatgcctagcatttggtacttggcagctgggaacatacttgggtctttctacgtgatttcttggacttcctcagaacatggcagctaaacgcaagagcatttttaaagaggcagaggcagaaactgccaaactttgtaatgcctagcctcaaaaatttatgtagcgtcatttctaccacattctattgagtaaagcaagtcacaggctacttcagtaaaaggggagggaaatagactcccctgtgttgggaagagtgccaaagattttgtggccatttttaattttttacagattgagctaagtactcaatcctttacaaaattagctaagtacttttacaatgtatgttttagggatcagaagactgagacttgaagaggttaagtcagtgtccgaggtcatctagttactaagtaccttaagctttagagcaagcttgtccaacccgtgacctggcccagtacagctttgaatgtagctcaacacaaattcgtaaactttcttaaaacattatgagattttttttgtgacttctttttttaagctcatcagctattgttagtgttagtgtattttacatgtggcccaaggaaaccaaaagattggacactcctgcttttttttttactttagagctggagcttttcaccgttgtaatatattaccttcaatggtataggcagataaatttgtccttctgctccaaagccaatatctgaggaagttttatttatgtggcgggataattgtctttgcagtcagtgagattataaagatatttggatcacattattgaggagccatcatgtggtaaaagtagcagtctctccaaatttggaaatttctgagttgttgggtgatatgaaaggtaaaatttttacatctgatgttatcctgcgtctactacaaatattagcacattgcctcaccaagagcaaataaataagtcagcttcttaaaccataagtttcccagtgggcatattccattctactacaatttatatttttcatatggtttcagtgttctagtgtttactattcattaacatgaaacacagattttaaattgcctttttaaaaattatttctgctgctttgtggttttctttgttttgagggccatgttattcatggagttttcattgttaaaaaaagaaaaaaagaaatgtcagtaatgcctgtgatggtaaagaacaaaataaaagtcaaggctttcaaatatactaattgaaagtttttatgcttatggtaatttgagttttctatgttagattcttggcatactgccttcaggatttcttcagtctaagactgaggcatattgaggaaagtctgtaagttgaaaatatcatatagcctattgtactttcatgttagctgtaagttgtgaaatggattcacagtttttgcttaaagcatatagacattttagcgccagagttatctagtctcctgctgatcagaataaaagtggtagatagccccatagaatgttatggggccatagaacgtatgtaccacaaccccctggttttatagaagaaggtttagataagagaagctttcactcttgttcatatcatggaatagtgtgaagggcagagttgtgtctagaaacctggtctgtcagcactgtgttttcttccactgtatcccagtatttccttaattagccttgttattagaaatgtaaaccaagtatccaagaaggtcctgtcaccaccactcagctgtagaataagttaaatccagcttaacttttgcatttgtgaaagtctkagacctttaaaaaatgcttagtcgtcattgtattcagaaagtttaagacttctatagtggttcagggaaattgtactgctgagaactagtaggttattacagccatgtttttctgtgattactttttatttttcattttgaaagaaaaaaactacctggcatagtctcaatgctttaaaaagacaggatttttctgtgagaccattgacatctaaattagtgttctcttgaactgttatcatgcatattaagacatatcatatatctaataaatggaagtaaaatggagttaattgaatcatctggttgggttcagctataccatttctttcatgacgttatatgacaaagaacacatgtgatgtgctaatttatctatataactattctgaggtttcttgctcctaataataatttagttttagttgcattttttaggagactattataaaggaaggagataaatcatgaactagatttaaggatccagacccctccttctgtttaaagcaattttagactgtggatttaagtgtttgagctttctgttgtctggtttttattttaaagatatgaaattagaactaagaggtttttcttttggggaaggatatggaaaaaatactggtgtgccatttgtgaatgtactatgggggaaggactaacactttttagaagattggtaatcaatggtcatgcaagtggtttggcttgagtgccccagagatgccttctccgtttgaaagccgaagcagcgtggttgccagtggagcctttcagagtaccggagacattgcagtgagtctggaaatctattctgtctccagtaggcacatctcaggtttatcagagaacatcaatataatggctttttaatgacatttttgtttcttactgaaaatagggcaatttaaagaataaaagaaagaaaaaccatagtaattctactaaccagaggttactattgataatgcctttttgtgtatatcctgtatttgtggtcctatttacaacacatcatctataatgtggtatttatagccttttaatttaatagaactaagattgtactgagcatagtatcgattaccctgcctttttcactctacactttcattttacccactttcccccccccgatcctctcacacagtgttatgtgtgagaatagatttccagactcactgcaatgtctcccatccttcaaagggccccactggcaaccagtctgtgttggctttcaaacggagaaggcatatctggggcacttgatatgcacttgcactaccactggttcccagttttctatgaggtatctatatcagatcatggctaaaatgagtgggaattgcttggcaaatttgtgtttgtttttatctttatatttgcacatactgaataaagataattttaatcctggggaagaggtagaaaaaatctcatgattttagttttctctgttagtattgcacgacataagcaccagagagatgacttttttcctcctttggttcatttgtattttacttgtcctattccaaaagaacagtattgaaatgagacacaggtatcaataaggaaaatttccagagccagaagaaggaaggaactgtcagggaacaattagtgtgatgggaaactatgttatgcttcctcagaaagtatgacaaatatgttacatttacttgagtttctggaaactgcacatgagggatatagcattaatttcctttgtcttgttggtattctgttttaccattcatgaagaaagaaaaaaaatgagagaaaataaaaggtctcagaactcacagagtaaagatatttttctaattgaaagtcaaacttcagagttgtaattctctgttaaagtgggttttggttaaaaattattttctgtaaactaattttataggctattcctatctgtctgttcattagcacagttttggggtcagcaaattattccttatagtttaaaaatattttttataatctttgaaattaacaaacttttatttgatagctattttaagaagttgttacaggtgtaagactttttcttctctaacaaagatgtgcgctgatagagctgaaacacaatatctatgtaaaataaccatggtgcccttcaaggaaacctttgtgccctggcagataaagtgttgtggcatgtcacatatgggaaggggtagggaaaagattccatgtgagtattttgacgtaaagctggtgcatttgagaattcaacaggctgagacatagaaacattgtatcagagtagggtgaacgaatggcttaactcacggaaagcagaccatttggatagcttggggagaaaacagaagtagtgtgagaaatggtggaaaggacactagaaatacttgaggagtttctaactatattctattgagtaaaaacaagacaaaagccatccttgatttgtcaaaagtgataaaaatggtgtaacaagtagaaataggattttcctgctgggtttggggtagaacttggaaaaaaaactgatcaattatgtctttttgagccatgtgtttaaaattaaggtggaggatcagaagcaataaatatggattaattgactccattcagattgccacttcactgttttatgatagactactgggaatagcaaataataagaaacttaatgtagatttgtttaaaaaatttgttactactgttgtttcaatgtcaagtttattttgcttgttgatgaaactggtcttttatcacataactctaggtcataaaagtatagtttgaatttccaacatttctaatgtttctttttcttttgaaaaataatcaaagaaaaagttctgctatgttctggttacttctgtatgaatctcatagcaatcatgattttccattgtgtttacagaactttcattgtgttttatcgtaaaggaatgaaagaatggattattttttcttttttgtctcaatggagtggtctacattttaaaggtttattttacaaaaggatacttgttacatattaggtttcatcaaaagaagttcaatactaaagataaagagttttccttattgaaatatatattgttaagcttttaaaccaaatgaaagtatgagtggtcatatttatactgtagtaggttttcataatagattttccrgattaaaaccatttgttgaaatcatcaaagagatgttaatcctgctttagcattratgcaaagttaaaataactgacattaaaaaaatcatttgggaagctttattgaatatattgagataaggtttattgtagtccttctcttcatgcatactgctgttacaattccaggaggtttcaaaatccatgtgaatgaccccattcaaccctcaaactgtccaattcctggcctaattcaccttcactctgctgtagctaccagttgcaggactagctgcattttggccagaactgcatcaccctggaaattttaaacacactctctctcttctgattgccctctttttctggttccatctcagctttattcccactgcattgttctttatctttggagctctctaaatcccttaaattcattgggtataggattctgtcatcttcatctttgtaatatcagtgcctagactaagcctggcgtataataggcactcagagatttgaagaataaatgactaaatgactgtatcaaatacttgcccattgtttgctgtttctgaattgtacaaggccatcatgataattgatgatcttaataatgtgagaatatgattctcttaccttagtaagagagccatcagtttattggatgatagttatatggaaaaagaagaaatgctactgtgataaatatttataattttaaacaagtggtaagtagaattaatgataaataacttacttattgaaggttttcaaaaaattagatgcatcagggtcttacctacaygtcttatgtatttttattcaaaatttttagaaatgaggaaacaggttaagtaaccttttctttatctttaaacaggctaaggatattaagccagtactaacaaacttaaggaccaaactcgtcaatatgtaagatactagaaaaattaatcagaatatattttgaatatcttgtggaagcttctcaaaggatattacattgagcatcataggctggcatgttatttcatgttttaagtaaggcatttgtaagttgtccatttaaatatatttattttagaaagcaaatatatttgtcctgtgaagagcatccttattttgagggatagcttcttgctgttaataaaacttcgtagataacatgttggaaagaataccacaggccgggctcagttggctcacgcctgtaatcccagcactttgggaggccgaggtgggcagatcacttgaggtcaggagttccaaaccagcctggccaacatggagaaaccccttctctactaaagtacaaaaattagccaggtgtggtggcatacaccctctggaggctgagacacgagaatcgcttgaacccatgaggtggaggttgctgttagcctagaatagggccactgcattccagcctgggcaatagagtgagactctgtatcaaaaaaaaaaaaaaaaagaaaagaaaagaatactacagagagatcaaagaatgcccaaagttacctctcccagtcagaattttgggtgtaacctccctagctgtgctagtggtggatgaggtgtttaacaaaggaaatgtaagatcttcctttagttgccagttcagtgtagttttttggaattagtttgctaaatttcttttaaagtgatcagtttagtatccaagaagtaaaatggagcaagttgaaaaattgtcctgcctgtgtttcagtttaggttgttcctaggcgcactgctgacttctcttatgactttgggtagattcagtctttattggtatttgaacttttaatrtctgttgtgtactctccttagacacatttaaaactttaaagcatttgggcagggggaatgggtaaggatccagttttatttaagactgtcaggacccatctcaatagtagtatctattcccatgagagaaaaatgaaaggcaaggcttacatcagcctagtctcctcacttaggaatcacaacattcctaaggtcagaaacagtgtgaagtaagtctctgaacccattttggagggcagtacatcagaaatacagtggaaattgctctttagctggatgtgagtttcattttaagcaccactgtttatattctttatgtcttgcctttctttttatattgagtttgtttcaccttgtaaaattaagaagagcatgttctagcttttaaatgtgagaattgaattattaatagtttttgggtaaaagtatcacctcccatttcttctaccaaaagcagcacatcctcacagacttttcacctcactgaaaatggtcatttaaagtttttactaattcagcatttaaagctttttatttcctccttgatttataacacagctgtttcttgaatagaaaaaactcaaggactacatgcaatctaattagattacattctttgtgtgagtctcctgcatttagtggaggccactaatcaaatcttgatatattttctatttcttttatttatttattcatttaattcatcaagtcaagatggctataattagagcagattactcctaccacattgtattatgatgatctcttcatgtttttttgtttcatactatatgatattcattaagggtagcattgtgccatcctccatcaagcattatatgcttcctttgtgcttatgatgttgaccgtagcaaccttaaactgttaagacttgtttataaayggtgaagctccatcattccaacagagtcagcatgctaattcactctagttcaaatccacattctagttgaatccctgcaatgtaacttgacatttggagaaattgattcataccattttaaagaaatatgatataggtgacagaatccaggatgaagaggtaccttgttgcttagatgatgacgttgtggattcatttcacatctctctctctttttaatgtagctcttctccctccttggtttttattcctccctccttctttcttcttcaagcctcctctaatgttaacatctttggcagtttggccagtgttgacaactactttttgattatttggtaytttaaaatatttggtattttaaaatgcttttattggccaggcgtggtggctcacaccttataatcccagtactttgggaggccgaggcgggcagatcatgaggtcgagattgagaccatcctggctaacacggtgaaaccctgtctctactaaaactacaaaaaattagctgggcatggtggcgggcgcctgtagtcccagctactcaggaggctgaggcaggagaatggcatgaacctgggaggcggagctggcagtgagccgagatcgcgccaccgcactctagcctgggtgacagagcgagactccatctcaaaaaaaaaaaaaaaaaaaaacaaaaaacaaaacttttattgtaaaattatttattacaaacaaaatcccatgcaaagaaaatgaataaatgtgatggttaatggaatatatgtggaaataagtagcttctcttataagtgaaagaactgatatcgaaaattccatgtaaaattaattaaaattaaaattacatttgtaagattattgagtcttttctttctgggcagatttttatttagttagttgtttggggattgtttgggttttagtggcagaaatatattcttcataagtatcagattctttattaggcagtcatcattttaggtcttacaatgatgggaaatcccatgggcttagggaagattggctaagtatggaaaaattacgtaatagaaaaaattccatctacaaagatgtgtgattgtttcttttcttctccctatgtctagatggttagagatgactgtattcttggattgttttattttcaaaattgaaagtttttttttttttaaatgggtattaggctgggcacggtgtctcatgcctgtaaccccagcacttcaggaggttgagatggttagatcacctgaggtcaggagtttgagaccagcctgaccagtatggtgaaaccccgtctctactaaaaatccaaagttagacgggcatggtggtgcatacctgtaatcccagctacttgggaggctgagacaggaggattgcttgaacccgggaggcagaagttgcagtgagccgagatcacaccattgcactccattctgggcaacaagagcaaaactccatctcaaaaaaaaaataggtatcaaaggatgcatagtgggatggggaataaagaaagcacatactacatagcaaaacattgtaaacaaaaaagtcacagcgtcatataaaaaagaaaacgtattttctatgataacaaatttaaatgaaattagataccagaatagttttcagttctctttctcttttttttttccttttaagctccaacagaatgagtttgtcagttcttttcataccttggtgtcgattgcaacctctataaatatgttaaataatggatttctaagatgattatttacatatatatggagtgtgtgtgagtgtataagtataaagtaaatatatatattctggaatgtgtatgtatatatgcatatatatattcaactatttttaacaatatgagcttgagtttctttcaagactaaaggcaaaatgtattttttcattgccttattttgtgcaaaagccaaataaaattgtggtgatccatttgcagaagcaagaaaatagaagcatatacacattttatagtcaatcagtgagtattgatataggtcctggtgattattagagcttctagactataaaaaatgttactatgtttcttttaaagtttagtgtctgcatagccagtggatcagatacccagaatgggtgggtaatcactggcgttgtgtttcagactttagatctaacaagtaaaaattaaaaaaataaattggatatgattaaaggacaaagaatcaaggggatggagtgcagccaattcagaaaataaagaacagttggtttaccctaattatagccattttgatttttcttttgtatgtatcaattggaagtttggtaaaaattaaatctttagcccaattatagaaataaattcattgcagatttcctaaggtgactttatacttttcttaaactcaaatctttaaagtcggttgtagtttgtacgagccacaagtctttcctttgatatagtaaaacagtttactttttattttttaaaacaatatcttatatctaccatcatctaaattgaggatatgttaacataaatgacaaaatcatattgatatcaaagattcaactgattaagagaaattttacacttggattaggatgagttgtgcaaaagtggctgaatctaataaaatgatgtaacatttatgtatattataatgaattttccagattgtttatgggtacaggtcaagcattaaaataaggcctatgttatgccctcccccctttcatcaaaaagctttccgtagataagttatggaaataggtgactgtttttttttaaacttttttaaggaagatgaatttattgattttatagaatatcttattgcattcttcttattactacttttcccacttttgatcatgggtatcttttttctgtattcatcttatacaggaagttatgtatctcctttgtaaattagaaagagtgtcatccaatgattttattgtcaggtgcatattaaatgatctccttggtaaaaaacatgagttattattattatttgacagttattaaacacagatacatgagtaaatatggagcaaagaaacacaactttcaatgacaaaggtctgttgatacactgtatggttttatatgttgcaaatttgatgactttctctgtgttaatttccctctatatttttattgagtcctaacacacttgcctccactcacatcccaacacacacacatacacacacatgcacacacacacactctctctctctctcatatatacaggtgcacatacacatgcataatagctgaagcttcaaaatgaaaacatatgcagaatgtacctattgatttctggtcattctgagcaaaagggaatataaagaaataaagtttgtttgaaactggggaagttatttagtattttgtgttttaattgcttcttaactatctaacactagtagttttatgccgattaacgtaatattgaaaatttaagaaatgttagcaaggattataggtgattgatagtactgttttgtagtatgaagcatggtttaaatcttgtcagaatccccagaacttaacatggaaattagaatagagctgacacctgtatctccattctaaaccatttagtcatattactacaattttttccttctaaaacagacttcatcaagtcttcagaattctgaatccattaatccatttgactctccatttatttcttttctctttcattttttgtttttgagacattgtctcaccctgttacccatgctgaagtgcagtggcgtgttcatgtctcactgaacctctgcctcctggctcaagagatcacatcagcctccctaataactggggctataggcatgcgctcccacgccctgcttattttttgtagagatgaggtcctgccatgttgccgaggctggtctcaaactctgggctctagccatttggccacctcagcctcccaatgtggtaggattacaggggtgagtcaccacacctagcctgactctccatttcttatagcartacctcttaatgaggaaagcacattagaattgcccacagggcttctaaaatatgcatatatctagaacccttcctcagaaaatctgatatttaggtaggagtggcaagcatgtataacaaaaactgtgcattgattcagatgcctctttatgtcatgtcccaactaaagtttcttactctgtctcatgttattttctcctgttaccctctgctctgctttcactgtgccaaaaatgatataataccaatacattttcattttatacttttgtattagtacttttgtacatgctgtttctactgcctgaaataccttttacttccctctgcatccgccctttctctcctctccaggtcttttatctgtcaaacaatgagttttcttcctagattctcctctgatggcaaatctttccttactcccccaggtagaaatagtcactctctcttttatgtttaccatttatatttgattattaattttttaagtgtccatctcttccattaatctgtgagctcagtgaaattatgtaatttatcttatttgtgtttatgttaaatgaatacatggataactaataagttgacagctttgttaggaatttaaatgtacaatgttttcataaactttttttaagggcagcattaagttgaggttttcgtgatcaaccaccaagacatacgttgatacatacataacaytgtttgtcttaatatrtattaccataaaaatttgcatgcatataggtgtttatttcttatcttcatttttttcccttgtgcctacagacgaaatctcacaaaactgtcccttatcttcagtcacatgctggcagaaatcaaagcaatctttcccaatggtcaattccagggagataactttcgtatcacaaaagcagatgctgctgaattctggagaaagttttttggagacaagtaagtaaaaatcatttttatagctgtggatctatctttcaagggttactgtatcctccctccagttggatatggtatatattttacttgagtgttttgtgaatgtattttattatttttgataagcattttgattggtaatttttatagtcaccaaaggtatgcctcaataatgcaatagttttttagtcactaagtaaatattatacaatgttatttatttcatgagcattcattgagtttgttctgagaagcagaggtatgtaagagtctttatacatgagaagctgataacttcttataatttaatatgtacttaatatacaaaataaagggtagaagggcatagatactttaaaaaatggcataagtaaattgctgtgacaatttagaagggaatagttgctttgggatcagtgatcagggactgcttcctggaggaggtggtatgttaagcttggttaaggtctgaaatcgaggtgagagaaggccctggcaccctgatccagcctttctttgttttactgcatagagattatatatgtgtgaacaagatatgaggataatgttatcacaaagatgtagtctgttgcaaagtagttaaagatgtatgccctacagagacacagattctggtgagcttggtagataatggaattgaatatctaaggtcagcataatttatataaaagttgcaaaacttttgtcataaatgtctcagtaaaatgatcaagaatgagcatcaggaggcaagtggtttccccagtaaccttttaagaattacctttaatgagagcgcatcctcagaatgtcctagaatgtaggcaaagccctggctgagtaagtaaggaggaagtgtgactgcttacatagattattgttttaatcttgtctcaaaggtctgtatttgtcctttaactgatgaaattagacataaaaattgttagtatacactttttttagtactttgatatgttgaactgcgatattggttttcctttgtttgtttttgtttttgtttttgttttttctttacaaagtactatagtttactatagtcaccaccaagattggaatatacctacatagagtaatgtacatttcattaagcacacaatttttttggcatccaaaatattaaagcctatttcccacattgtactaaaatgtattctgaattatttttaggcactaaaggagaaaatgccattgttgccattaacatggaaattctgtgttgtagcaatctagttatttataatgttcatatattcattcagaaatgaagaatttagaaaaaagtttatccttatctgaattagaataacacagacagctaagactatactaattaaatatttattaattgtagaaagcagaacaatcttgccaggttcagggtgtaggaactgagagggtttgtttcctgtagttgcagttcatgtattaacattgtaagcttagttcaaacagtcggtaaccttcaaaataaactttctcttaaagttttaagaaaatatataggacaaattgattatggtatttctttttgaaaactgaaaattctgatgagttataaaattgtttacttgtcataaggtcaataaaaaatggaaagattgctcacaggttttttttaagagaggagtttactttgctggtacttcaagccacagaaaattatgcatttgagacatctttatttccctttatttataaccacagacatcaaggggctgaaatttctgttcaactgctacatgagtgaaatcactactacatcaaatgagggattcttgaaatagtgattagatactttccctacctcccaagtcttttcacttttgtctgctgtttttactgaattgagaaagctgcttaatttttctttaacacttttaatttgtggatgactgccaaatttcatgctccttttggaacttatatgcgttaccatagtcatacaaattaattattcctttattagataattggagaaagtatttttttattcttcctaggtttttaccttgtggttccataatattttattgaatgaatggacatatgcatgaataatgtgtatcctttcgaaaggttgaattttttttttccattatgctctaatactgtttgtattttcccaaaacttagttctcctgtgggagcatgcctgtcatttatctcactgttcattgaggccatgtaagaatgctttcatttagcccaaccagtgcctttaaacttgaaaacagcattctttcctaaaacagaaccattaatccattcatgagggcagcgccctcaagatctaaccacctcttgaaggtcctacttcttaatacagtcgcaatggcaattaaattttaacatgaattttggaaggggcattcaaactatagcactgttgtttttgaagacatggtagtgctaccctctctgctcaggrcccaagcccagcagccaagaggcactgcctgccttgtggcccaaggggaacagtaacacatgtatcatggcaaatttgttgggagattctgtttatggtcaatttttatgcaaatgaatatattttaacaatgcagtcatgcttttcctttcatagtctgttgaccaggagttagaaatctgtaggaaaagaaaagtgacattattgaataaatgtgtctaagtatgttcagcaaaatgagaccaatactaaactgaatcttcacactctggaataataacttataatccagaaactttaagcatgaagctcgaaaaatatattactagcgttaaaaaaagaagcacatcaatgtgattagactctgggtgacagtcatttttcttagcgagtcaggtagcagcttgtgactcatttaagtactttttgacattgagaaaagtgattgattgaagtggtgatttataagattttagtgcactggtcacctgagcagtgcacactgtacctaatatgtagtgtagtcttttatcccttacccctctctcacccttccccaccacgacyccaaagtccattatatcattcttatgcctttgcttgctcatagcttagctcccacttataagtgagaacatacgatatttggttttctatttctgagttacttcacttagaataatggtttctagctccatccaagttgctgcaaaagacattatttcattccttcttatggctgagtaatagtccatggtgtaaatatgccatgttttctttatccgcttgttggtctatgtgcacttaggttggttccatatcattgcaattgcaaattatgctgctataaacaagcgtgtgcatgtgtctttttcatataatgacttcttttcctttgaccaggtatctggcagtggattgctggattgaatggcagttctacttttagttctttaaagagtctccatactgttttccatagtggttgttactaattcatactcccaccagcaatgtagaagtgttcccttttcacaacatccacgtcaacatctattgtttttaaagatgtttaacaacatctattgtttttaattatggtcattgttgcagaagtaaggtggtttctcactgtggttttcatttgcatttccccgatgattagtgatgttgagcattttttcatatgtttgttggctgtttgtatatgtcttttgagaaatgtctattcatttcctttgcccactttttgatgggattatttgttttcttcttgctgatttgttttaggtccttgtagattctagatactagtccgttgtcagaagcatagtttgcaagtatgttctcccactgtgtgagttgtctgtttactctcctgattatttcttttgctgtgcagaagctttttaattaggtcccatttatttatttttatttttatgcatttgcttttgaggtcttagccatgaattctctgcctaagctaatgtctagaagagtttctttgatgttatcttgtaggattttcatggtttcaggtcttagatttaagtctttgatccatcttgagttgattttttaataaggtgagagatggggatccagtttcattcttctacatgtggcctgccagtttttccagcacagtttattgaataagggtatccttttccaaatttatgtttttgtatgctttgtcgaagatcagttagctgtatttggctttacttctgggttctctgttctgttccattggtctatgtgcctgtcattataccagtaccatgctgctttggtaactatagccttgtgttgtaatttgaggtcagatagtgtgatgcctccagatttgttcttttcrcttagtattgctttggtgatatggtctcttttttggttccatacgaatcttaggattgttttttctagttctgtgaagaatgttgatggtattttgatgggaattgcatggagtctggattgctttgagcagtgtggtcattttattcttcccatccatgagcaggtgatgtgtttccatttgttgtgtcatctataatttctgtgtttcagtgttttgtagttttccttctagagatctttcacctccttggttaaatatattcctaagtattttattttatttttttcagctgttgcaaaggggattgagttcttggtttgattctcagcttggttatgttggtgtatagcagtgccactgatttgtgtacattgattttgtgtccagagactttactgaattcatttataagatctgggagctttttggatgaatcttgaggcttttctaggtatatgatcatatcatcagtgaatgatgacagttcgacttcctcttttccaatttggatgcttcttctttctttttttttattggattgctctggctgtgacttccagtactgggttgaatagaagtggtgaaggtggggatctttatctggttacaattctcagggggaatgctttcaactttttgccattcagtatgatgttagctataggtttgacatatatggcttttattactttcgggtaaatctcttctatacatattttgttgagggattataaaggggtgctgtatgttatcaaatgctatttctgggtctattgagatgattatatatatttttaaaatttctgtttatgtgatgtgtcacatttattaacttacatatgttaaactgtmcttgtatctctgaaacccacttgattgtgatgtattagttttttgttgtgctgttggattagttagctagtattttgttgaggatttttgcatctatgttcatcagagatattggtctgtagtttgttgttgttatgtcttttcctggttttgatattagcatggtagtggcttcatagaatgatttacggaggattccctctttctctgtcttttagaacagtttcagtaggattagtaccaatttgtctttgaatgtctggtagaattcagttgtgaatctatcttgtcctggactttctctgtttgcatttttaaaattactgattcagtctcactgcttgttattgttattgggtggcagtaaaccttacccagctctcctgcagttggtgaggctgatctcactcccacagtgctctgctaacaatgcttggtttagatccaggtagtctatagacagaactcagacctgccccaggtcataagcttctccacatagaaagctgccatggctttcaaaaagccatgccyctcttcgtcttcccaggcatggccaggcacccagctcctatgctcctgtctgcagcacacttcccacttgccgcaactcctccctccccattctgttcaagggaatttgttccactcgagattatattacaaaattcagttgggaggttctttcaccctgtgtcctttccctgagctcattggctgacttccagagggtccctgtgagatatattcaggaatagcttccctgggttcatgctggagattgggaagtcctgctgcggctcctacttttttatttccctaaatctgttccagctattggaagggtgaagggcttctccagtggcctggattttcagattccctggtggggatgtgtacttggaggcagactcttcccctctcgcactctgaggacttaggagtttttcacctgtctcacgtagtaggctatagcctcccaattctttcacagggtctgtggattctgttttcctaagttcctgtgttggttctttgggaaaaaattcacactgaatctctgcacattattctgtccttccaagtgggagaagcatgctgacactgcctccagtctgccatcttgaaaaaaaaaaaaaaacaaaaattagcattgagaagatttagacataaatttccaaacaaattataattcaattagaaacacagattctaactcttgaatcttcttacatagcctctcctctccatacataaaattctcttcttcaaatttaaattcatgctctgcattaccccaacaaccttctgattagtctccctatctccaataacaacctatcctattgttcttaggggaccagtgagctgtctaaaaagcagagctaatcattccagtctttcgcttgaagtgtttgcatgaatattaattctaggttaaagtctaaaatcacattaaacatcacaagctttagaaactttttcgctggcttctytttttctacttatcatttcggtatacttaactcatctgcaaagaaacaactcaatactgttcatatttcccaatgtgtgtctcattttttactcctcattgtctttgttttcrtatgttgcattcactgcttggataggcagtcacccatgctctatccagtgttgccactttgaaagctttactttagtaccctaatggatatccctactctgtgctgccaggtacctgagctcacatctgtcaaaatatattacagtgaactgctgacatgcccccatttctcaattgagaggtttccaatagactggaaagtttctttggargcagagactgcatcttacttatttttgtgtttttgagcctgacacgtttcctggaatgtttaggcaataataattttttttttttaggtggagttttgctcttgttgcccaggctagagtgcaatggcgccatctcggctcactgcaacctctgcctcctgggttcaagckattctccctcctcagcctcccaagtagctgggattacaggcatgcaccaccacgcccggcaatgttttttttgtatgtttagtagacgtggagtttctccatgttggccaggctggtctcaaactcctgacctcaggtgatccacctgtctcagcctcccaaagtgctgggattataggcatgagccatcacgcccggcggcaataattgttaacagactacatgaataattgcatagatggacgaygtctatcctctactctcaatttccaatgacttcattatatataaattgatctctttttaaatgatcagttcctacatttctattccttagatgcctctcttccctctttcttttcatctgtctcagaattttgacacctttctttaagttcagttcataagtccacttttctgagtttttctcattcatatacacccttctacgtgatctatgttaattactctatactttggttgctgttgtattttagacacatttatattgtaaaatgtgtttactatgtaggtctttcttgcttgattgcaagagtcttcaatgactttctatgcaaaagttggtgaaaacagacacatttattagagttattgtatgtcagattttgtgttcagtgctttcacatatgctagcctcattttcaatataatctttaaactactttgtaaatggttgttgaatgagtcttttacgtaccatatacattgtagacatttagtagttattagttgaatgtatgagtataggatgcaacttttctgccatttaagctctctcttcctttacttatgttctgttcttcagtcaaattggcttatttggctctttctggacacatcagcaattataggtttctatgtctttgcttatattgctccttctacttgaagatttttataatctctggcataacaattcttactaatccctcaaagataatattgctcataatttttcccattagtgttattactagatctcttcttaaacttcgctaagctctggcttatcttctgcatttactatttttatggttttattacaagtatttgtctagttgtcatacttccccctagactatatgctccatgaaatcaagcttatttattcatctttgtatttctaaagtagctcagcacaatgttttatatacaggctttcaggaaccattgtacatttaattcagatgagttgagaagtagaggaatgtgcattagcatgtgtatgtgtgagatggagcctgcttgcttgattgattgggagacagcatacttagggtttggcatgcaggctctgcagccagattatctgtccctggacaggttctgactgcaacatttactcactttgtgactttggggaatctagttggtttttctatgcatctttttcctcatttataaaatgtagatgatactaataatacctaccatcaatggttgttatgacggcttaaaatagctaaaccttacctgtaaggcacataaaactgtgtctagcatataataaatattctattttgtggaataaytaaccaattgaaacctttaaaagtggtccaaattctctaaataatgtaatttacatttgactttgtatgatggaagtttcatactctgtagcaatctaaaagcaaaaaaaaaaaaaagaaagaaaaagaaaaattttaaaaattattttatgtgtatcccgagatgaaggtagaattgaaaataagaaactgtcttggttaccacagggggaaaatggtttatttatagctcaatttattgcctctatgattgatttcctgcaaaagcrataagggccttctttggtttcccgtattttcctttcacttttaatatgaaagaaaggaaaatactttctttacctttccagcgagtgagatatatattcttctagcatattaactagctcagttttccctctaggtaaagaaaacacaacctaattatattaaattaaaagaagtggtacacagtagaaattaagagtttttacaatgaaaatttttagcagatactctaaagagaaagaaaaaagaactaaagtaggattcaaagaatcactagttaatatttctactagttagctacctccctttgttgcctgttaaaaaaaatttcaggtatctttatgtcaataaggaaaataaaaacttacatatctattggaggyctattttgttcaattcattgtaacaagatacaaaacaactaagatgccaattgtaattttctacctgtaagcaatattcagtttggggaagacaggatataaaaagaagataaatacttaaaatcagctctgtaccattagaaaatcacataaagaatatcacaaataataaattaatttactagtacatgcatacctcagagatattgtgggtttagtttgggaccactgcaataaagtacatcgcaatgaagtgcatattgcaataaagcaagtcacttagattatttttgtcttcctagtgaatatagaagttgtrtttatactatactgtagtctgttaggtgtgcagtagcattatgtctaaaaaaatatatgtaccttaactaaaaaagaattgctaaaaaatgctaacaatcagctgagccttcagtgagttgtaatcttttagctgctggagagttgtgcctcgatgttcatggctattgactgatcatatgctgaaagttaaggtggctgtggcaatttcttaaaattaggcagcagtgaagtttactacatcaattggttcttcctttcatgtaatatttatctataacatgcaatgctgtttgataatattttactcacaatagagtttcattcaaaattggagtcagtcctctcaaaccctgccactgctttatcaaccaagtgtctgcaatattctaaatcctttattgtaatatcagcagtgttcacagcatcttcacctggagtaaattacatttaagaaagcacttttttgcttttctataagaagcagttttcgtctgttcaaattttatgagatttgcatcaatttagccacatatttaggttctacttctaattctagttctctagcaaattctacatctacagttacttcttccactgaagtcttgaaatcctcagagtcatccatgagatttggaattcactgtttccaaactcctgttaatgttgatattttgacctcctcccttgaatcataaatgttcttagtggcattagaaaggtgaatcctttccacgaggttttgaattttctttgcccagagctatcacaatatatgacagctatagccgtaggaaatgtatttcttaaataataagacttgaaagtcaaaatggctccttgattcatgggctgcagaatgagtactgtgttagaagacatgaaaacaacattaatctcctcgtacatctccatcaaatcttttgggtgatcagrggcattgccaatgagcagtactattttgaaaggaattgttttctctacacagcatatctcaacagtaggcttaaaatattcagtaatccaggttttttgttccatttgtagagcacaggaagagtagatttagcgtaattcttaaaggacctaggatttttggaatggtgaatgaacattgtgttcaacttaaagtcatcacttttattggccactaacaagagtcagcctgtcctttgaagctttttgtttttttaaataaagaacagaaatttatttctcatagttctgaaggctaggaagtccaagatcaaggtgctgacaaattgtctggtaaggacccacttcctaatttacagatggccaaacatctttttgcaatatcctcacatggtagaaagagtgagcaactatcagggggcttttgttttttctttttcaacctttattttggaggttatttagggggtacatatgcaagtaattgcatattgcatgatgctgaggtttggggtatgattgaacccatcatgtagctttgaagctaggtattgacttctccctagccctagcattttctagatagcattttctttcatcttaaggctgtttcatctacattaattatctgttgttttgtgtagccacattcatcaatgatcttagctagatcttctgtataacttgttgcttctacatcagcacttggtgcttcaccttgcacttttatgttagagagagcttcttttcttaaaccccataaacaaatttctgctagtttcaaactttacttctgaagcttcctgaattctcttacccttcacagaattgaagcgagttggggccttgttttggattcggctttggcctaacagaatattgtggctagtttgatctaaccaaaccaccaaaactttctccatatcaccagtaaggctgttttgctttcttatcattcatgtgttcactgaagtagcatttctaatttccttcatgaacttctcctttccattcacaacttgcctaactgtttggtgcaagaggcctcacttttgtcctatgtcagatttagacatgcctttctcactaaacttaatcatgtccataattagagacttgtgactattcctttcacttgagcacttgaggtcattttagggttactatttggcctaatttcagtgttgttgtgtcttagggaatagaaagtccccaggagagggagagagaaaagagaacagtgttggtggagcagtgagaacatataccattaagtttgctgtcttacatgggcatggttcatagtgcccaaaaactatttgtttcacacaaaaaatactgttttgaaactgaaaaactgggaatgatggcaacaataggtatgaattgtgatatgacagcaattggctagacctgtgtgccagctgtttttcttagataatctctcttctaattcatcacaatcctttcctggacatctttactaatttatattatatacctggtccccagatatttgattttttaatatctgaaagctatttggaaccactggactaatagtgtgtgcccctggatttatagaggtcctggtcttaatcctctaaacatttgttctcttctctgctggatgtgtctacttgggtcaataaagagagagaaggtctccttctagagcaaggatcttaaagccttgtaaaatagaggtagtatttctccctgggtcaaaggatatgcattatccattacaaaatatttgggttccttaagttctaggttctactccagaatcaaacccacagtgtatgcagatgtcacctggccctctttgcatcttttaggagaatttgtgtttagggaacaagggcaagaaaatgctggtactctagccactgctcttgctgtgagtaacaaagtcctttgactctgacccagtcctttgacagaaacccagtatcttctgccactatacatgaaactgtgataggccaacttcttagcttgcaagaagagtagaatctcattctttggttttttaggatcatgttctgctggtagagaaagtgtgacttaatagcaaagtaaataaaacttacttatattagtctgttctcatgctgctgataaagacctacctgagactaatttataaagaaaaagaagtttaatgcactcacagttccacatgactagggagrcctcacaatcgtggtggaaggcgaaaggcacttcttacgtggcagcagatgagagaaaatgagagccaatgtgagatttattcactaccacaagaatagtttgtgggaaaccactcccatgattcaaatacctcctattaggtcctttctacaacatgtgggaattatgggagctaacaattcaagatgaaatttgggtggggacacagccaaacgatgtcattctgccactggcccctcccatatctcatgtcctcacattccaagacacaatcatgccttcgcaacaatcccccaaagtcttaactcattccagcattaactcaaaagtccacagtccagagtcttatctgagataacaagagtcccttgcacttatgagccagtaaaatcaaaagcaagttagttacttcctaggtacaatggggatacaggcactgggaaatacagccattctgaatgggagaaattggccaaaacaaagggtctacaggccccacacaagtccgaaatccagcgggccagtcaaaccttaaagctccaaaatgatttcctttgactccgtgtctcacgtccagggcacgctgttgtaagaggtgggctctcatgctcttgggcagctccaccccgtggcttcgcagggtacagtttccctcttggttgctttcatgggctgatgttgagtgtctggcttttccaggtgcatggtgcaaaatgttggtagatctactattctggggtctggaggacggtggccctcttcttacagctccactagtcagtgccccagtggagactctgtgtgggggcttcagccccacatttccctcccacactgctctagcagaggtagggctctgcccctgcagcagatgtctacctccacaagagccctgcccctgcagcaaacttctacctggatgtccaagcatttccatacatcttctgaaatctaggcagagattcctataccttaacttcttgacttctgtgcacctgcaggctcaaacaccatgtggaagctgccaaggcttgaggcttgcaccctctgaaataaaagcttgagttcaacattggccccttatagccatggctgggatgcagggcaccaagtcctgagactgcacaaagcagcaaggccttgggtacagccaatgaaaccattttttcttcctaggcctccaggcctgtgatgagagaagctgccgtgaagacctctgacatgccctggagacattttcctcattgtcttggtgattaacatttggctcctccttacttatacaaatttctgcagccagcttgaggttcttctcagagaatgtgtttttcttttttatcacattgtcaggctgcaaattttctgaactttaatgctccgcttcttcttgaaacataagttccaattccatatcatatctttgtgaatgaataaaacttaatgcttttaacagtacccaagtcacctcttgaaygctttgctgcttagaagtttcttctgccagatgccctaaattatctctctgaagttaaaagttacacagatctctagggtggggcaaaatgctgccagtctctttgctaaaacrtagcaagagtcacctttacttcagttcccaacaagttccccatctccatctcagtccaccttaacctgcacttcattgtccatatcactatcagcattttcgtcaaaaccattcaacaagtgtctaggaagttccaaactttcccacatcttcctctcttcttctgagccctccaaactgttccaacctctccctgttatccagttccaaagttgcttccacagtttttgrgtatctttacagcagcaccccactctactggcaccaatttactgtattagtacattttcatgttgctgaaaaagacatactcaaaattgggtaatttataaagaaaaagaggtttaatgggctcacagttccatgtggctggggagacctcacaatcatggcagaagataaaaggcacatcttacatggcagcagagaagagaaaatatgagagctaagcaaaaagggaaacccctataaaaccctcagatctcatgtggcttatttactaccacaagaatagaatgtcggaaactgcccccatgattcaattatctcccacctggtccctcccacaacatgtgggaactatgggagctacaattcaagatgagatttgggtggggaaacagccaaaccatatcattattaaaatcagtgtttagggggtgggtgcagtggctcatgcctgtaatcccagtattttgggaggccaaggcaggtggatcacttgagtccagaagttcgagaccagcctggcaacatggcataactctgtctctacaaaaaatacaaaaattagctaggcatggtggcgcacactttaatcccagctacttaacgaggctgaggcaccagaatcacttgagcctgggaggtcgaggttgcagtgagccaagatcatgctactgcactccagcctgggtgacagaatgagaccctgccacaaaacaaaatgaaatgaaaaacaaaaacaacaacaataaagtcagtgtgtaggtatttacatttcggtaatagactgctaatgattgatctttctattcttccttattttaaatgttggttattaataggaaatgcagtagttgtttttcttgtatagatttgtttttgttttgttaatctttaataacaaaggagttatttaaaatatcagtagttttattaaaaggactttttgatggatttaattatgcacaacaatatatgcagagttttttctttcagggttttagaaatgttatcagaagctctttattttttgcctcagtttatcttatacatctaggagacttcactcattggttgttaatttaattggctcatgttgagagacttacaaggaactttgttttattattgacttttttttttgtttgtaattctgagctctcattgctaaagggaggatcattttaaagccttacttaaacctctctttggtagcactttctagagtatgaaatttttttattttatttaatctgatttcagcatatcaaaggtatcttgcataacccatgagctgctgtatctcatgaatttatcctgtattggtgaactttcagagaatatatactgaagaacagttgtactttagaaagaaaagaacaagtattcattgtttaaaacctgartctttctattttttacagtcagtggcttctaagtggaaaaatttttaatggaatttttacacattattatggattatacttgcagcttctcttcctgttcctttccactaatgaactttattttctaagttggaaaataaatagaattatgtacaaataattttatgactatagcaaatttattgtttattatgttccaaggttaggatgtgagaccagaagttagaaagcattaaatctatcatgtgaacaaaataattgagaagattagaaataatactaaagacactatttcctgtgttcctgcaatcttataaaaatatgattatagatttaggctgcagaatatkaatatgtgaaagatacttgtccactatacagagaagtaatgatggccccagctgcccatctggagtggctgctgcaaagatgctgcagtaggggaggcatggccagggctgtgtgctctatggagcaggtgggatctgggaacaggcaggagccccaccctcttccgagttggtggggttggagccccatgcttccaggagcagctgcagctatggacctgggcatccctatactcttgggggcccaggaagtccccctaccccagcaggcttggaagtgcctgctcctgctgtctggcctcaccctgctcacagtgcctgctctgggatggagcaaagctgtggccaagcctgggcactgttgtgacctggctgggtgtgcacacactcagggtggcgctgacatgccagccccctgccaccgcatccctttccagactttgggaccaaggagcactggagggaggccgacggggttgggctgagggtagctccgcatgggcctgcaggtgaccctccacagaaacagcctgtagatgacatgattggtggcagcaggaggcagacaggctcatgggtggaaaggggcaggtccccattgaagccctaccttcaagacagggacagcctacagcctcagggccgggctgtcagttcctggtggagttcacagtgggagtgaaaacttayggagctttttctgggcctgcccttggaccagtcagcacacacttccttccttctgagcccatgaaaaactccagacccagccagactcacacagacatcagactaccagctacaggaagaagctacccaatttgagtctctttgactccttgggatgatctgcctgcagaaaggagctacccactctgggtttcctgagtgctgttctgctgctcagtaaagctcctttctgccttcccaccctccagttgtttgtatacctcattcttcctggacacgggacaagaactcagggcctgccaaatggcaggactgaaaaaacagtaacacaaacagggctgaaatgtgcccaccctccacccccttcacgccccacattgtgggcaatgagaaggagagaagagctgtggccctttggggagcccacacctacaggctccctgagctaggctgtgaagccccatttgggrgactgcagtttctggagtctccaagcttttgggtgccactggttcccctcctccagacacaggtgcccacagtggaagccacttgctgtgcatcagatccagccactggcttgcccagagccggtgcctgtgctggtgcctggagctgcccgccctgctacagcagccagtgtgcttggctgtgcgcagtggctggactccatgctcacttgttcatgcaccacttgctgctccgcatctgactcgtccttggcaggtgtgggatctgtgctggtagtgcatggtgagcgtggcccgccaggttgagtcagtggaatgagcccagcaggcctgagcaaaactcgggtaatggcgcaaccaatcacagaggtttctggctggaaaagtgacacacaaacaataagcgacagtagtgcttatctgcactagagacaaagtgttatgagctttttgacaaataaaaattatgcagcataaatacccagcatctgtgtctttatcgtgtcaggaattttcatgtataaggaagagtggttcaatctaattatgaatatccttggtaactatggttgccatcctatcaaagatgacttgctgtatggtgactatgtaaccagagtgttttgatatgctgtttctgtgggttgctggaaaacaattgcttttcccttattgatagaacagcaagagtaataatggtcccataagaatctatcttcatattcttaaaaaatggagtcatgataaaagaaggttggatttaaggaataactgtatacaaaatgtcaacagatttaggaatcacagcgctaatattttgtgtccataatgtaatcaaaacatatcaaatatgttacaaatatcctattatcttctgaacaaagcttgccctctgtttaaagatactgacattgaacatatcttagttgaycaaggtgaattttctgacaacatttacataaaattagaaatagagttgggctgctgaatatagaacatattttctttttgtttaaaatgaggatgacagtatatattcctgagctacaatggatcttaaacacctgccaccactaataccacagcaacaaaacaaaccaacaataaacaaacatgttgatttccttgtttgtattatggtagttactttgttcattcccatgtatctgatttttagtcttagatttttagtgtaatattttttaaaatttaaatatatgattgaagtttaatgtacatggggaaaagtacacaaatcatacatatagagtgagaaatttttatgaagtaaacataatccatgtttacagtatgtatccatgtttatctcctacccagataaagtagtaataccytgctgcctgcatcttggaagacgccctctctcagcgcgtcagaaagtcgcacatagtcaccacccagtagttctgatacatgccatcataaatcatacatagttgaaatcatactaattatactcttttggaaaaaactggcttcttcctctctttatgtttatggaattcaactctttacttgcatgtagcagtactttgttcattctccttccttcattgtatagctgtaccacaattaacctattcatttgattatttatttataaattacccagtctcaggtatttctttatagcactgctaaaacaacctaacacagaaactggatatataacatcaaggagaagaggtttattgggcccttggttatgcaggctgtacaggcatggtattarcatctgcttggcttccaggcaggcctcagagagcttttgctcatggcagaaggtgaaacagagcctgcatgtcacatgtggtgagagcaggagcaagagagagcaaggggaggtgccgtgcacttaaacaaccagatcttgtaagaactcattgtcgtcaggatggcaccaaggagatggtgctaaaccattcattggaaatatgctcccatgatccgatcacctcccactgggctctacctccaaaattgaggattacagttcaatatgaggtttggggggarcaaatacccaaactctatcatccagtgtttatatatgggtacataagtttctaaaattttagttttgttccatctatttgtttatgcttgtaccaatgccacattgtcttaattaatgtaaagagtacatacttgttaatgttcctagtgaagattaccttttttgttcttgactcttgcatgtcccataaagttcagaaccagtttttagtatctactacaaaaaatacctcctgggattgtttatttgagttacattaaatttttagactaatttgggaagaactgactctttataatatgaatctaccattaaagtgttacatacctttatttatgttttttatatctctgtgtatgggtgtatgttgatatttttgccttgctcatctattgttagctttatttctatttatttgggacttttagatagcattataaaaattaaatgtttaaagtttcattttctagttatatatagccaatataaaactacaactgatattttatatcaattttgtgttcagcaaccatgttcaattttcttatttcctatagtttaatctgtaaaatttttgtattttctacatataaagctatgtcataagcagacactgctttgtggttttcattgattcttctacgattatatacatttaaaagttttagtacatcttctattcttttagtacactagagcatattagacatataaaaagttaaaaaccatgaacaaatacagaaaatatatttttgaaatcacttataatcccttccamaagccagttattaaatttgtggcatctccagacattatagtttaacattggatcataaaggacaaaattttaaaaatactatttccatttagtagtatcccatgaacacttttccacgacaataaatatttttctgcacaaaattgttactagtgaacgtatttgttttcaaatattttgctcttataaacaacactgcatataaaagacttgtggatgggcctttggctgctatgtattttttggacataatttccttaggtgaaatccctagaagtagatgttcttagtcataatgtataggcttttgaaatttgtttccaaattgccttctagaagtrctgtgtaaattctcattcacaccagtagtatacagaagttcctgtttgcaaacaccctggcttctgttgatgttcaccctttgttgtatgaaatgtttttcawtttttcctatcagttgaaactaaaaccctgtagccttttatkaactagtggtttcatgaaaatattttaccttttttttttttaaaagaaatcattctcctcacactttctattttccattcttcttaccttttcttaaaattgcaggattttcaaattagaatatctaatacacttctccacatttacacaggagaaaacaagcctggaagattaagtgatttgtcaactactgaccagctgacacctttccagatttatttccctgcatctgattaatcccattgtctttgaaaagatactgtttttccaccgcatattctcactcataggtgggaattgaacaatgagatcacatggacacaggaaggggaatatcacactctggggactgtggtggggtcaggggaggggggagagatagcattgggagatatacctaatgctagatgacacattagtgggtgcagcgcaccagcatggcacatgtatacatatgtaactaacctgcacaatgtgcacatacatgtaccctaaaacttagagtataataaaaaaaaaaaaaaaaaaaagaaaagatactgtttttcaagactttaaagaggwttactattgttttttggtagacagactagaactcattatctaataacaggattataacatagtcttatttatcatgttcttatctctcatgatattatatgaacagaactatcactttaacaaaaagtcattaatagatttctgtgtaatagataggtggtagtaagccatcaataaatggcagttcttactcttatttgaaataaaaagatcctgaaattatattattattacaggtgcatggctatccattggtcatgtattctattctttgtagattgacagttacttatacttgttcactgtattttaaaagcgattcagcctgcaacttaagtggtttataattgtaagggtcaatagaatatattgaaagatttttggattagtgaaaacttggagtttagttggcctttttattttctctctctctctctctctctctctctctctctctctgtctctctctctctctctctctctctctcttcccttttcttcttcccaggtctctgccagcaccctgaaatttctacatttgtaaaacaatttgctattgatattttctctcatttgcttcatctctaaaggaagaggtagtagaaaccaccactgtctttttgcagaagtttaaatggaggtgtgaaaattcatgctttctgggttcmcttcctctcatatacctcagagaagaatggtagccacttagtcttaagaaagtttagagccttagtgcaacagtttagaataatctaatttttttgtttgtttttaaagactttgttgttgtactctatttctattcttcattcttgaaatccccttccccctacctctgttccccagccccacctcctacacaataatgggtgttttgctgaagtgatcaaatgagggttatctgttgcgcaaacactcatatatgaaaagttaacaaaatagtgccctggctccctaatccctattactaccactaattaagattccagtgaatgcctctttggatttgaggtttatcacaagtaatctgacaaagtttcatttacacaagtactgtggaaatgtagcttgtccttttgtaaattgttattatgaaggggtacattagactaaaattttcttaagttcatacatctcgtataactggctctgggaaatcactgagtgctcaaaagagttatgaattgaattcactgtaaatgctagattagaataatttttatagtaacagatgtggaagatgtctatttggcctttttaaaaaaactttatatgttatacacaaaataaatattgacaatttgaccactttacgttgtatactttatatacgaaacaaaaatgctttaacttcttcatacgaaaaataaaatttatactgttctgaagtcagtggttccctgatcatattttttttactctgagtatcatgatcaatgtcccttttgtgtgttgagtatttgaaactttaatttggaaaagaaaaatgtacttcttagacattagttttatggtaattataatgaagctggacataattgcatrtttatacttcattgtaaatcaacagcttcctaatattcttaaaagtgttccttttttttwaaaaaaaaacagcagcattttgttaaccttaatcagagcctgacgtgtgtttcttctaaatggcatctgatgtggtatctctcctcagttctctgtggtttcctgtttttttcatacatagagaaacactttttgaggtattaagcctcatatttttcttcttttaatggtacctgaaacctaaactctcttataaatacagcatagtgttgtcaacctgtctcaccattaatttatgccacttcccacagactgcttctctggaatccctccagcccttgctgtgtatccatcacccagctagcattgtccttacataccccactctagattctttagcattacaggttttacttctgtccctaaagtgtgatcttcagagacaaagatgttatctttatttctataattgtatttccccaacagtgccttgttttagcaatgaatagatatagtaggctctcaaagtgttgtctctagagcagcagcagcagcagcagcctcagggaacattttatggctgtcagtgttcaggccccaccccaatgctactgaatcataatatcttgggttgaggatcaggctatgttaacaagcccttcagataatttggatgcatgctgaagtttgacaaacactgctatagaaaattattgaatgaatatgaaagttgtacctttatggtgatatctcattgaagaggattgatatagmatggggccaggcacaatttagtttattctgcctgagtcttgtatttcagagatactggtaaaggaaacctaagatttaaatatttgctatcttataagaggatgttatcttataagagggacggcttttatgctattctgttgtaaaaattgtagtttaagttttaaaaactgaatgatttctttcttctgccgaattaggaataggcattattctgaagcaggaaggttaactaagaaatgcatcctgggtgtcactaattttcatggtgggaaagagggtaggtgagttggaaactggtcaggtggggataggttgagagacgtttccctagttaccattctgtgctcttctaaattttttgaatcatgtaactgcataacatgttaaaattttgtcgaatgatattcagtcagaataaagtaataaatattgaataaactcccatgatataaccattgtggttggtttaaaaattaagtttttcttttgtattaatatgaaaagttagataacgtwtgtttttcatctctgcagaaaacatcagggttgtggcagaaatgtcttgatggctttctaccttagccttcttgaattggttgatacatattactcatttgtgcaatgaataaaggatttctattattatatggacccatcatcttatgactgtttttagaaaatgagaattaaatcttgattcattattaaataaccttgtatacacacatgaagaggtcatgacacatragactttgacctaataccttttttcagatatgtttctatagctatcttgatagcctaggactgtttgagagaaaattaatttaaatttttgtcatattcttagcaaatgcaaaataattgagttaaacagaacccactacatttgttctgaaatatgaacaatattctcaaatatttgtctggtagtacaaatacaattatattaattttattattgaattttgctgcttcaaagggaggtatttcttaaatgatacttgattcaattatttccctttttttccaccttgcacagaactatcgtaccatggaaagtattcagacagtgccttcatgaggtccaccagattagctctggcctggaagcaatggctctaaaatcaacaattgatttaacttgcaatgattacatttcagtttttgaatttgatatttttaccaggctgtttcaggtaagtttatacttgcttagtctatccattcccttcttctctctccctgtcttttctctctgtttctctctctctctgtctctctctcwcacacacacacataaacaaacatatggaaaatagtgtcattcctattagtctgtaattttattggtatgtttggtcattgttnaaagtttagagtgagccatttggcttaagtttggagttatcagatgctgtgagcctggtggctgcttgttagctttgagaggatccatccaaaagagctttgttttaaactctctacttagtttcttactttattttgttgatcttttagcacaatgatggatagaatgcaacaactggaggtgggcatttgccacctagatctaaaatctttccctttgccttctgtgtttattaggtcaaaagggaaatagtaaacttagaaatatcagactgttctgtataggacagaactgtgtcctgtacttattttgtaaattgctttgcacattcaaccatgtgtaatgaacatttttcaaagtcaataaatattcttcatcagttcccttgtcatattcattcaaaatagtatgtcagtattaacaaagctctcttttgaaaaatttaggtcttttcccacattttctctaatgtaaacaactttaagatgaacatttttgttgtgcttattgtttttccctttaaattatcttccataattgttttcacatagcaaattagaagaaggtagcattatatggatactatcattttcttcttttgcgtgccttaatggaattatcttaaacatgaagacttgaaatttgtgttttgagattgactctgccactaaaatgtgtatcatctgtgggattcagttcaagtagtcacaaaataaaaattttctgcttaacatttttatgatttggtaacataaattatatagtaaatgaggtaaattgatcagactgggcttacttatgttctgatattattttttatcattttaatctgaagtaacattgaytctctttgaaacatgctttcaacaaatatcagagtataatgttgatttcatgtttttcatgttacatgaacttctctgatttataattctgcttggcactagctagcaaggattggatgactggtttttgtaataaaaaccacaatgcacaggattarcttttaatttatgaaggaacccattawtagaagagagattaactcctgtcarcagtacatayaggatgtgaaaccccgcctctactaaaaatacaaaaaattagctgggcgtggtgatgagcacctgtagtcccagctacttgggaggctgaggcaggagaatggtgtgaacccgggaggcagagcttgcagtgagctgatatcgtgtcactgcactccagcctgggcaacagagcaagactctgtctcaaaaaaaaaaaaatacatataggatatatttcacttcattacaattacagaatcataattctaccttctatatagggtaagcaattacataaatcactgatgaaagtgtgcttttgattattttaaattttttaaattcgtgattattcccttggtgtatgtattacagtttgacagtttatgtttttttcaaagattttaagatatattttagaaaaaaaagttgtctgatattggtcattttataatggaacctctcctttctttaaaggtttctgataattttacagaatatcttatttatttaacatgatacaaagacattctaaatagtaagagctttgcttcttcaccttgtcaaggaagagagtaaaagtaatcttcctacattaaacctaactgctcattctaggaagtgagtatatttttttgtggtgagcctggatgactttttactgtgggtattaaatgctagaattccttgcagttatatattgaaagtatgagggcaacttaatgttggttaaaygattacctaaactgctatttartatgtggacatattttcttataagctgttttactttaaaacagcacaagtcaaccttaatactctaaggaatatatatcttatttactttcactgggatgggaaaagaaagggctatttttaagtcaagctactgtgaaaagttttatatcataaaatgaaaatcttacctgggctagggaatgcctaatcattttaaaaacatgattacagaagcagctgaagaactcttgttagcccgtgtatttctgagattcatcattccatttatttctatgctgtaatcaaatgctttgaatataatcgtatgtgtgccttaaaatatgataaaattgattctgtttatagagaagtagatggtttaacttttgctgatcttttatttttataaaactttaaaaattaagtgattttcttaaatgtattatatttattaaatccttacatttatatattctgtatgaaaatatgttttgctaatactgtgtgactgcgggaacatacattcagctatagccatgatattagtagttaattggcagtgacttctgactaaattattgggagtggggtatttagcagaaagggaactgaaggtgagcaaggtacacttagaatttggggtctgaagtagagaaactagcagaagaaggagccagtgggggggcaggagatgaagttgagaattgcagagggaatgaaagaagtaaaaatgtttgcttcctcttggctttcattcttatatgcaggcagaacctgaacaaatacttgggagtcactggagggatcttactgtggtcaccttcctcatttcctcttcttccttctttccttctctttatccttctcttttctctcaaagtcacttagagatgctggaatcagcacatgctaatattagtcctggaaagaaattatagggattttgcttctcccttccttctccctggggctgttgttccccttttcctctatatccccactgttagaaaaaatggggtcactgagaaatggggcactacatttgggggtagcaggataaggacggagtattttagtagaatatcctattgactatggaatgtgtagcatcaatggaatagtgaggaaaatcaaagaagaggaaagtcctcagttgtagtaaagaattatagagagtgtctaggcagaccagccaaggaccctcttccaacttaagttgtaagtcagtaactggctcttcttgaaaatagtagcatttgggagaatggagggacttgtctcctttattcacttcattaatttctatagtcatttaaaagtatctagataattttatgttcttgtacacaaaaaaatttcttcaatctgaaaaacaaaataaaaaaaagttactctccaaagcactttgttttgccttttttaagccagtagttgtcgaaatactttaaaaagaaaaagcacataagtactacatgtttctgttttgaatgggctgcatacaaggaaaacaatacacagactcattctattacataaatatttttgcaattagaagctggccctctggattatgtactaagaaatggttgctgaatactgtagcagttggctcaaaactccaacttaatttttttacttgtattttgatctgtgcattggtgctctataaagtttagcattttttttcaamcactcttccactaatttgtgtggactttaatggaagtgacccaaatatttgtttggtatttctttcatccttgtccttcatagatgggtagaacaaaacaaaacaaaaactagggtctagaataacagttattgctcagttttttaaaatatatgctgacattttccaagtaatgtttaatgcagtttttagtcatgcattaggaagaaaattaaaaacatgcatttttttcaacctctcatattattattctctagagcgcctttcttgcccaattaggtattttagtgtgatggggaaataccccaaagatttttcttgttatgttgaaaaaggctaaaaaacttcattattactaaatcattctttgttatcctcatctcaagggatataatccttgcagaattctgccttgtaaatttgtaacttgcttaacaataatgaggaacaagtctcaaaacaaacaaaagcaggaactttctaccagtaatcatgtctaggatgactgctttaacagctttaacatggcaacgtaaaaatactttttttttcttttatgtagaagatttaataatctggcacatcagatagagtatgctgccasttccttggaataaatgtagcgtcagccttaaaaaaatcgcagagatgattcatccacacccttgagtaaagttgtctatcactgactgccttttttctcttgccctggtaactggagagacaactaatcagattaaagagagaatgatacagtggtacaaaccaaatacttctgtgaaaagttttgtttttatgtaactcacttttaaaccctaaacctttcctaagcttatagttctgtacagttaagccagatgtgactactgtagtgttaacactagccttttacacaagtcactatttagaggatctatctgttcaatgacaattatccctggctgattactattatctgacacttgcattggtcctggcatcccatgggtgagcaagacaggcatgtcccttgcccttatgtagcttatggttaatgtgtaacctttgccaagtcatgcaagttctatgatatggtttcttactgtgtaaaatgaagcagttgttaacagttaacagacatacagggaggtgaagaatatggcaagaggtaacaattttaaatacactggtcagagaaggcttcattgaggaagtgacatttggagacaggaatgagatggatatttgggggaagaaaattcaagtaaaggcatcrgcaaatacaaagtctctgagggggaagagggcttttttgttcaagacaatagcaggctggagaagatgcagaaagtgggagagttatagcagatggagacaaaaaagggaactgctggggatcaaaccttgtaaagtccttctaagygatatatgaggactttgacttttattcaaagttagaaggctttgaacaaaagaattatttcatttgtkttttacaatggtcacaagtgccgtagcgagaataggctgtgtagagaagagattttgtggttttcttttttgttctctgtattctcttcctgaaaaatctgttttctgcctaatcatattyctgtaaagaacaatagacttgaacgtctgctgttaagtaacaaaggttgacctaaaccacataaggtcagattaacttttaaaatatccaagataatgttaagtgtattaaatatggttcagtatgtaatcaaaatatttgatattctctagatactaatctcttttaatttttttattttttagccttggggctctattttgcggaattggaatttcttagctgtgacacatccaggttacatggcatttctcacatatgatgaagttaaagcacgactacagaaatatagcaccaaaccyggaaggtaagactttttagcagtaatattatgtgatatatccaaagatgaaaaattctccatggtttgttcctaagtaagtcagcaatacccgctgatggcatgcttgggagggggctagaaaaggtaaaagaccaaaatggtgcttcttaacataatgttttaaattgatacattgtgcttactctgaaacttggtattcataaagtgaaaggggatatggtctcctttctgttttcatgatatccgtgtttatgtgcaaaattgaatgtatatatttgaatacttgaatactgtgctaaagaacaaataaatagaacagtcttatgttcattactttagggtatttttaagacattcatttaggctctctgataaatataagtacatatacatgcacatgaacacataaatatacatgtaagtttatgaacaaatacatgtatgtacataagcatatataaacctattgttataatcaaaaccaatttcgtgtccttgaaaacttttttcataatgcctcgtgttttattatagcctcagaatttatattttattttccacatgatgaaactaaatgagacttggagaggttggtcagcccctgtggctttggccaagaaattacaccttattaatggcaaatctggatccagaaaatctgtctcttccatggttcagtgcattttcccatgtatttcatctaaaaatgcattaggcccatagtaggcatttgtgctatggcaggcagtatgctgagtacggcagtagggatattagagacctgcttgtcagagtcctcacatttcagatgctattctggtattcattagtgctctgattttcatatagagaacattccattttagggatgaatttggtgctggtttttaagactgccttttttttctagtatcatttttatttggtttatggtgtatataatgtttgtactttataacatttttgttttgttttgttttgctttgtttttgagatggagtcttgctctgtcaccaggctggagtgcaatggcacaatctctgttcactgcaaccttcgactccctggttcgagcaattctcctgccttaacctcccaagtagctgggattacaggtgtgtgccaccacgcccagctattttttgtatttttagtagagatggggtttcaccatgttggtcaggatggtcttgatctcctgacctcgtgatctgcccaccttggtctcccaaagtgctgggattacaggcgtgagccaccatgcctggccaaaacagttttttttttaagtgcaagccaatagtgctgattttttcttctctgccattatgaaaatttccatatttttgtctttttaagaatttatatagtgtatttgaaaaaggagctagtgaatacaaaaacagtttggcttccactgaaatcttctatttagactaaggagagttagttctcattgtaaccatgagagaaggtcagttattttgcatattgacagtggtttagatgaatgattttctttcattcaagaatctctcatgaccagatttttccatagtttttactctcttgaatgacatcatataaagtatctttcttgctcttggcgtatgatgtgaaaaatgtgttgtggttggaattatgcagtcatacaaaatttaacatgtgagttatttgataaattttcttgtccaatcatagaaataatgagggaactgaggcctttatttttggttttgttttcttgttcagtatcatggagaacatgaattacaatattgagaacaacagccaggtctcattactatttggaaaagttctcttagtaaaaaactactgccctctgataagaatatcataagacccaccagtaaacttatcttcaaatgtgtacaatatatacattttatacagcttttttgtatatcagtcataccttaaaaaactagaataatgtcctctgagaaaaaaatccttctttccttcctaacttgccatgtaatgattttttctactaaattttaggtagctaatgatgaaataaataatatataacaaattataatgtgtaaagtatgacatgggtactaaagatgtgtttaggaaaacacccttaatgaataaaaaaaaaactgtaacaaatatttgctttggagaatatctgtgtttaacattttttttttttttatcttggaaagtatttcatgtctttgacttcatagtatagaaaacaattggatttacttcaaggacattttggctccttaggttgtgctttattattggggatccatctgacaaaatatgagttatggggtgaaggtagtaacatttggaaatctaagtgaagtattcattaggtgacaagagtggcattgaaccctaaaccacctcgtcaacatgaaagatacttcattttatatgcatatatatatatttttttaatttttttttttttttgagacagagtctcaytgtgttcacccagcaggagtgcagtggtactatctgggctcactgtaagctccacctcctgggttcaaacgattctcatgcctcagcctcctgagtagctgggactacaggcatgtaccatcatgccttgccaatttttttgtatttttagtggagacgggttttcgccatgttggccatggtggcctcgaactcctggcctcaaatgatccaccttgctcagtctcccaacgtgctgggattacaggtgtgagccaccactcctggccccaatttgattaaatgaagcatgttgtttaagagagcaaggtgctaaaaataagccaaaaattcacttgaggttgggaaggggtagccaccagccaaagggtcagcagcaaattaaatggaataggaaaaaggtgcatgagaggaagaaattgttctaaaatgcccttggctcttaccagattgctggtattactatctcttatatacatgaattgcttgaaccttctgtataataatgagttttagaaacaccatcccaaaacaatgtttagagcaacagagaaggacatgaattaaaaatgtgagcaatttcacaagtatgtatttcagtatctactagattcttactatatgaataaatttggaattacatttaaaattactagcaatgcagatgtgtaattattttcttcatgttaatacactgtaaactttgctgagattcatagtacacagatttttaagattttaacttttgacttaatttgaaggaattttatcattaatttttttatgtaacattttaataatgtccttctgaattataatttatagtgactttctattatttttggcacttctcataatatcatagccgtaggtctctgtggcattattttatctgattttgattaagaatgccaatagttgacagattgatatcctattttcagtttctctagggatatatgtttttagacttttttgaaaagttctttccaaagattctatcaccaatataaagtttttaatatttaaaaatcacttstttttttaaattctagtttgtccaaagatgaaattacactctactactaaatatacaagttaattaaatccagtgactgcagccattatgtatgttaaagtatatctttcaagttacatttatagtgcttggtctatcaatgactaaagtatattttgacatacttgtgtctgccacatacatacagcagctcgaatattaaaatatagccaacagatttaagttggtttgtttttgatctgcttaatgggtaataaaatccagaaggatatcctgatagaaagattgaatgcagtacactcaaataaagagaaatgatctaaaatgaaataagtacatagatagctaaatgaatacataaatgataatgatggatttaaagccaagttgctgcctccttttgttggatattagtttcaagggacttgatttgatttatatttttgaactatcttaacttccccttgtaagatactgaatttgacatggttagatggcaggcatgaaattacctagtttgcacttttgagctttagggatgaatggcaggaatacctgaaagaaaagttactatttttttaacagttggccgggtgcggtggctcacgcctgtaatcccagcactttgggatgccgaggcgggtggatcrtgaggtcaggatatcgagaccatcctggctaacgtggtctctattaaaaatacaaaaaattggccaggcgcggtggctcatgcctgtaatcccagcactttgggaggccaaggcgggcagatcaccaggtcaggagatcgagaccatcctggctaacacggtgaaccccatctctactaaaaatacaaaaaaattagctgggtgtggtggcgggcacctgtggtcccagctactcgggaggctgaagcaggagaatagcgtgaacctgggaggcggagcttgcagtgagccgtgattgcgccactgcactccagcatgggcgacagagcaagactctgtctcaaaaacaaaacaagcaacaacaacaacaaaataacaacaacaacaaaaatacaaaaaattagctgggcgtcgtggcacacgcctgtagtcccagctactcaggaggctgaggcaggagaatcgcttgaacctgggaggcggaggttgcagtgagccgagatggcgccactgcactacagcctgggtgatagagtgagactgcgtctcaaaaaaaacaaacaaactaattttaatgtctaaattacaaaggaatatatcgagttctaagcctgggtgacagagtaagactccgtctcaaaaaaaaaaaaaaaaaaaaccctmatttttatgtctaaattacaaaggaatatattgagttctacagtagaaactggctcagtttttgtctgaggtaggcaaattaaatttaaatttttacttatttattttatttttacattccaagagtgatttattttgtagctattccatgccatcagcatttccatacaccgcatcctgatgatgatggtaaaaaaatccctagtttacaatcttgyttattttcttatatatgtatctggaagtatttaaataaaaagaaatgatcagtgtttctcttgtaaattgataaatggagaagtacattgttgctaaaaataagttagaagacagaatatgaggagtattcaggaattctaaatgattgtttattcttttgcttggaagaaacctaacaaattgtttagtattgatttatattctgaatgtaattagatgtaattttcttatgttttgcagctatattttccggttaagttgcactcgattgggacagtgggccattggctatgtgactggggatgggaatatcttacagaccatacctcataacaagcccttatttcaagccctgattgatggcagcagggaaggattgtaagtatgagaaatggaagttggagtgcttatgattcatgaatttgaaaaataaagattgctttgtgatggcgaaaatggatagcaaggctgctttttatgttaagactgagaaataatggatgttccttagttttttgttcatctttttatataatcattttaaggtaacctaattatttgaaactatgttatagcaaatacatttcaacttcaaattacaacatgaatttttatctttcatatgataaaaacttgggacttaaaggtagttttaaaatggatgtaaaactgtttatatattaagagaaaattatttagaataattgacttctgtttcttcatataacccttagaatactagtttcactttttctttcttttttgttttttgagatggagtctaactctgttgccaggctggagtgcagtggcacaatctctgctcactgcaacctccgcctcctgggttcaagggattcccctgcctcagcctcccaagtggctgggactacaggcgtgcgccaccatgccctgctagttttttgtattttagtagagacggggtttcaccgtgttagccaggatggcctcaatttcctgacctcatgatccacccgcctcggcctcccaaagtgctgggattacaggcatgagccactgtgcccagccagtttcactttttttattttgattgttagtgccagattttcttttctctttcttatctgtttctccctccaccccttttcttttctctctgtagatctttcctttttcacactaataataactccatattcaggactatatgttaatagctaagtttagtttatctcaagctattcctttttaaaatttaaaaataagttaagtttccctttgttttttagattaataatgaattctcccccactcactccacacacaaagtatggacaatctgttgggccccttcatagtaaatatgtctgattcttcttatttgttttattcacatgcctttccctttgtcctctccttgtattctcagtgcacttgatcatgctgctttttcttcccctctgccttgctggataacttagagatgctcgtgatcaaactcgctgcagtatgaattctggtagaaacctagaaggaaaaagtccaccagagttaacaaagagcaaatgatttgagttttacctttatcaaagtaattgcaaaaaagaaagaaagaaaagaaaaaaagtgatgagatttatacaaagaaaaattaggaatttctaaaaacctatgagcttttgggtgggagtggtggcttacgcctgtaatcccagcattttgggaggccaaggcaggaggatcacttgagcccaggagttcgaggtcaggctgggcaacatggcaaaaccctagctctacaaaaaatgcaaaaaaattagctgggcatggtggcgcgtgacggtagtcctcgctactctggaggctaagatgggttaatcacctgagcctgggaagttgaggctacagtgacaacatcgtgccactgcactccagcctgtgcatcagagtgagaccttatctgaaaaaataataataataccaacacacacaaaacctttcaataaattaattacatagtaattgtatggcaagttatggtaccaaatgtgtatttctctttctttttccttctaattttcataaatttgctagtgtcggttatttatacctttcttctaatgcatcaaagctttgtgtatagattttgatttaccatgattacagattttttttaagaaaatatactttaaagtttgaatttataagtagaacctatcaacaacctcctgataggttaaaaagaacctttaacctttcctatggtaccctaatcatgatttttgtaatctttaatttctgaattcttgctagaatttcttcatattatttgaaatgtgatacataaaattttatataatatttttttaaatggccaatttttagggtatataaaaaagttgcttattcttctttggattatcattcctcatttaatgtttgtcaaattttgtaacacacccataaggacattctaaatttgtatcatactcagatgtagtaaactccttttgctaaatcataaaaaaatcatctcactgatttgtcccttactatgtaagaattatctgtcctttaagttcatttttctggttttcctgggtaaattctaacacttaacatgtttgtagactcctcattcgaggataaatattttttgttattttaaagaatagatttgttatagttttaccctttaaaatatacatactacagtactatattcttattgttttatttaagaaatttagtrtagaaagatgttaaacagaactaaccataatttaataaactgatgaaatacagcagtgacattaccacttttttcaattaaaaataagtatttaccaacacagtaaattttattttttaatgaatttttcaataacaagtacaacttctgatttaacacagcaagaatgcattattactacaacttttagttcagatttcagttttccctgataatagaaccttgtatctatagaccattttgtgtttgtagtgttaagtcaatgaaacatggaaacgtaacattttctaattttttaaaatgtgtatgtgcctgtgtgtctgtgtgtttgcatatgtgcacatgtgtttgtgttaggtgaggggaagatgggagaagagatatggaaactgtagaaacaggaataccacagaagtgtttgagtaacttacaagaaaactgtggcctttaattatatttttctttccatgtggtattaggcatggtgtaaaatgataccattattacctgtgcctcagatgaaggatgtaatagttgcaaataggtatatcttcaaagtgttttggaatacaacatgattgaccagtgaaataaattcttaacttatataagagacatatattaaaggtatttcattgaaaatggttgcttagtgggttaggctatattcattatgtatttcttatatgaaaattctacattttaagtgtcctaaaaacaacatagtaatttggaaacattgaagtaatatgttattgatatgttacatgaaaaggaaacatccaaatgtatgtttgaatatagaaaaatttgattaaatatccttaaatgcaattaaaacttgtatatttaaggtaataaagtttctgtttaaattcagttatctttatcctgatgggaggagttataatcctgatttaactggattatgtgaacctacacctcatgaccatataaaagttacacaggtaaggataattgctagaaaagtataattaaataagtatccataatgcccttgaaataartaagactctcttagtgtagttaaaatcatgcacaggtatttaatacaaaatatacttaaggaattctaagagtgtttaaggagaaattatattactttcttagattttttgatacaaatttatgctgttaaaattcttgctttccatatagtattggcatttatatgggggaaataaataaatccataagcaagtaggtggatgtaaggagagagccatagtttagaaagctaccaaaaaaagattagaataattatatgccttagattttagagtcaaatgggtaattgaagcctgttgaagataacaattatgtttttctaaatccattgctggcagcctcatagcttatgaataggaatgtaagttggtaaaacctttcttgagagtgatattcagtgattataaaaatctaagtgaaaatatcttttcactttaaattctatatatgtaatagatcccatatatatcacttacacatgcacacaaaaatctatacaacaggtatttactgtaatattttttgtaaaagcgaaaaattacaaaatactaagaactttagtaatagattaaataaaatagactactgttctcatactgtattgtgtgaagtcatgaacaggagggaggtagctctacatactcacatgggaacttctgcatcttgtactgtaaaataattccatttatgtaaagtacatgtaggtaacatttcatttggtcaagttacattatgtacgttcaacttctgtaaggaaataattaattaattgctgtatatgaacatgtgagtatagtttttaaaagatcaaaaaaacaccaaactggtaagaagatttaactgaggaggtgaaaagggattgagcagtgagggaggggatgaagggagaacttgaatattttattttatattcagtctagttttaaaatattttatatttgagatatgttcacgccttgtgtaataagtaataaaaatctaagggaaaaaacaagagaagaattacagctttttttaagacagtagataataatttaccttataattctccagatttcctttcccatggtctttacattattatgtgagacatacacattgacatttatatgtacatattgtacgtgtaaatttaataaatgattgccttgtttttctttttttgagacagagtcttgctttgtcgcccaggctggagtgcagtgacgcgatctcggctcactacaacctctgccctctgggttcgagctgttctcttgcctcagcctcccgagtagctggcattacaggtgcctgccaccacttccggctaatttttgtatttttagtagagatggggtttctccatgttggtcaggatcaaactcctgacctcaggtgatccacccgcctcgccctcccaaagtgctgggattacaggcgtgagccaccatgcccggccatgattgccattttaaatttaatatatgattgccattttaaaagttatgtggtgatcctgtattttcaaatatgtgtgaaaggatacttaggaaagacagttcctctttataaagccattaaaaaaataaatctttggaagtaataacatccccttaaattactcataaatattcttactgtttaggttgcattgagatctgcatctttgattttagcttaatgtaattttttttataattgcatatttttcctttggacagtcataaccagtatcaatacttacctattatttcagggacatcagcaatttataacttactttgaattactttagttttatttcttytccatttttatgcattctctcgtctctttccttaagttccccacaaaatttttgtatattcacacatcataatagacacagtttatgtgtacatgtgtgtacctgcatgtacatgcatatgtatccatgtatgtttatgtatatgtatatttttctcaccaggattataatatattttagtagtctgtggactaaatattattatttatttatcctactccgtgccaggcacattgtagtcacttactgaactaaaagttgctttatttacccaaatattggtttcataattccttttctttgtattcctaacatcttttttcattatttaccaatttatttgtattttttcaaatttaccaatttatttgtatttttgtcacgaagatcttttcagtatttgaattttgaaaattttactgtgtcaaatgttttaagctaaaaacccaatcaatcaagaacattgcagttttaataaaatggtttttggttactgaagtgatttgttttcttgacagtgttagggaaagcgtatgcactttttagtcagaggcttaatttagagtttgaagcaaacaagttaaactgattaagccccaggcctaacttttgttaagttcaatatatcttcttgtgctttggagatgaagtgaaatagtaagtgtggaccacagtgcctggcatgcgggaagtgcttggtaaatgtttgtcacttttcttgcattcagggatttctaaagatattgaaacagtaaaatttaatgtttagccaagtatcatttttttttcaatttgacagttaaattatatgagcatgtggcatttataaaaaagataaagtcattttatattcctattttaaaaccatagattttgtcttttgagtcaccatgactattgaagcaagtcccttcctaaaggaacagtaaaggaaccttaaataatatgaatcattaagaagcatgtaagatagatgataaaagttcaaacctttttaaaatgaattttgtagaccaaattgtgattatcaattcaaaacatgtctcaaatggtaacaaaattctgacaaggtcaattgtgagatattgactgtgcrtcattttatttgggaaaatttgatactaacaattygtgctggaaatacattaacattactttctccctcctccccaaattccaggaacaatatgaattatattgtgaaatgggctccacttttcagctctgtaagatttgtgcagagaatgacaaagatgtcaagattgagccytgtgggcatttgatgtgcacctcttgccttacggcatggcaggtataatcattagcaacatggatgtctttcttatatgtcctactaatatttctcttttcagktttcttaatggtttaggaagtaatgctggtaagtgctttrtttgaaatgattgtgtaaagattttatatgtttgagttgctatatataatttgatttttaactatcttatattttatctttaaatgtataaattttattatattagtcatcagtagttctacttctgtagtaccatggatttcagtatgttcacttataggtattaccaactagacatttttatgccatttattgataggtcagaatctgtttgtagtaggtcagtttctgaagccaagtaaaccatagtagataaatcttattttgatattttcaagcaaacttctttactcctgaggaggcatggttcctgtctcacatatgctccgtagtgctgaaattggagaatcagacaggaagtatctctcaaacacttatagttcccacagaaacaggcattaaagttccctatttactgaagcataatctcaggcaaattgccttcccatctgccgcaggcattcaataaatataaattgatttgaagttttataggaaggtctggagaataactggttttcccaaggactttccttttttttttttttttgagacagagtcttgctctgtcgcccaggctggagtgcagtggcacgatctcggcacacagcaagctccgcctcctgggttcacgccattctcctgcctcagcctcccgagtagctgggtctacaggtgcccgccaccgtgcccagctaattttttgtatttttagtagagacggggtttcaccatgttagccaggatggtctcgatctcctgaccttgtgatccacctgccacggcctcccaaagtgctgggattacaggtgtgagcccaagggctttcttatatttcttcatctgtaacaaagattggggatttttaaaatggatctttggacagatttccagttttgagtatttggaggagtcatggaatattttgatcaagccattttgaaactgtttgacatagttatattgaagttagaagtatattgatagggtttagaaagcaaataattaaattttctagtctttaaaaaagattttcggtgaagcataaagttgacattcctaccctatttctaagccctctcagtccttgattttctttgtccaaccctgcatctctgcatgagttgaggaaggatggacattgaggctcatggaagggggctgacagactcagaggggcattgatgcctgccgagctccttacttagtaataaaatataatgattttcccattttcatagtcataaaagggcctgcttcttcttttgtgaatatttttttaatggatgaggaaaagaggaagaattaggaaatgaattacagttgatttatattttcaaagtcctttctgaatgcccagagatctttgctacctcagtaacgttgttcaaaatccctatacttctcttcttcatatgcatttggcttatattttgttttacgtttttctttatatcctctcccttatttccttttatcccttcatgatgttggcgaaatttgcatattacagggagatgttgaaggagatcattctcaacatagatacttgattcctatttaaattacattaacagtaatagttctgcaaacttagcagtgccttttaaactacattcaataaatgtagatatgttggtagaagacagaattgtttgcaagtttatttcaaatgtgtcagkaggaggtattatagagatattgactcagtgatagattgtctgtaattggactacttaggattggtgtacctgataatcattcagtgtttcaggatacgtgttaaactaacaaagaaaacaaattgtatttgtcacccttctttgccttcagggtggtagtgtggtttttacaagtacaaagaaactaaaagccttgcatttctccctgaagaaaatcagaataataggctgatacaaattcctaacactctgcctccatgcagggcttgtgtatttcagccatttttcttggggctccagtcttagagcatacacatgcatacatgttgcaagacttcacatctgtaactcaatactgtgcttagtatttggaggttaagttggttaaaagtcagaagctgctatgagtttgacagaaacatttgtttagtaaaatgttttgtttaaagcatcatacaaaatagtttactggccaggcatggcggctcacacctcttaaatcccagtactttgggaggctgagacaggaagatcccctgagcccaggagttcgagarcagcctggacaacataaggagaccccgtctctataaagtaataataataataataaaatagttgtttgccttgcagcccagggtgagtagaaaagtatggctgaatataaagcaacaaatatttattttactttctatatacttcttaaaagaaagtttattcttagtaaataaatactacctttacttaagtcctaacttcacattgtcwgtacattcttggaaactgcaactttgagcaaagtgacatactgtatgctgtaggaaccttaactcttgtttctatcaattagcctagggtaaaatggatttcattatacagtaagttgtttcacttaaagtctcaatttccaagaactaattaacaatattaattgaggacttactgtatttatttgttaggtttgtgaactatttgcagtaggttcattatgtgcaaaaggcataggaacatttcccagttgtctttctgtattactaatgctgtgtaatcaccacaacattttacatcaccacaacatgtctrtgtgttactgtgcattctccaaattggtgtagttcctcttgcttgttgcttatcaattccttgaattatttcatgattttttatattggcctaatgaccttatatgaagatatgttcagtaatgttagtaagttgttaacatttactatttctctttttcattctcagctacttctcagttttacttttatamattgaggaagtacataattgtcaagctctgaaaattgtgtttagctaaaattttaaaagttatgtgagagtaatagtttactaagtaaagtagaaacaaaaatgacaaattcaaaactattcagaaggttgaaataataaattacatttatgttactagacagtaatgttattgtcttaatctgatcattgaattttscacctaaattaatgaaaaatatgcaaacctttattttcagtattgtttttgaattctcctcacacaaagcagctcatcattaataagcatcctcctgatacattttgtatatgtttctgtaagctcttacctcattatgttcatattgtaaatatttccatatttatgtattttctttctagaatgtggattactttacctattttagaatctctctgctagcatgttatctgcacattggtcattackcagtaaatacttatagaytgcatgctaggtaatgtaaaagaaaaggaagtctaaaagtacattaaataaaaagacagtattgtaggttgtgaaaagctcttacaatacttttctgagaattatttatgatcttttcaaagaccttttatcatacttagtatctgagaacgaatcctagaatatctaaggcttagttccctttgttccattcactagctattgtgtgatttccttaacattttacattgtgatttttttccacccattcttgaaccwtgttattttacgtttattgtatgcagtactaccagcactaacacagaagcagtaagactgcatttttwtcgctgttttacaccaaaaaaaaaatatgcacagtaatccccggttcatgttttctctccccctaaagaaaattattcttaggtcaataattctaaattgatatttcacagtctctgtatctcagtgggatcttactggtcaaaggaagtttcaacttttgaacatttctacttttggataatctaaatatttttacatttagatacagtcttcacgtagtgcttcctgccaactagcgtatctgttttggcagcttttgtattattgcatgaacaggaatgtttgttgatcattaaaatatgttattgcaaaatgcctctggtatttaataaaaataaaagtcctataaagttaatctagttaaagcacagttgtaaaacattagatatgctgaaggtctcgtatctgtaatctcacctagctgtgctcacttgacttaacctaattgatgataaayatgtcagtaagaagaacaaaattatagcacacttcatagttccacaaaatattgccaaaagtggtatctaagcttgtacatatatagagaaatgttctcaaggtattaggtgtctggacttagattaaaataacttacgtctctcttgttcaattttttcctcattcaaaaatggtaccttaaagacattgtttttgttttatatgattaaatttgcaagcttaactgtgcacaggaagaatttgttattttgcttcttcctcttactggtttggtagaagcaaaccaagatggtttcaactatcattttccatttatttatttatttaggaaacattctttgagcagctgcaatatcccatgttctgtagtatgctctgaactgaaaagaactctgagacacaatccttagcyccaagaagttaaagttaaaattaaacctgaaatttctattaaggggcatggtgttaataattacttaaaatgagtatcctgttatccttcaaatttaattatggctgctagacattttttcttactttctactacgttggttgggcatgctgatatgaacatgattttaaaggctgcgtgtctgccaagaagctatgataaatcagttagaatccaataggaaatattaaaccctgaccataaatcatactctgctcagcagtgtgcatttttagcaagtcattcttcaccaacttttccttccatctgatgccctactttggtttaattgaaattcattagagacttaaattttatgtaattaacagaaaacttaagaaatgygcagtagctgtgtcagtagttataggctgcaagtggttactctttaattgctgtcataatggcccattagtcatgcctctgaagaggtgtcagatgcttttttctctttctgaaacatctgtgttatttaataaattgaataagcaagcagagtttgcacagaatactaagtaagttgaataatcacctttctagagacattctttgaagtaatactactctgtgtgcaacatttttgtgctacccttagtaataaaacttggagagttgtctttcacatccacgtgttaatgggacattaacaaaacgtttatcttctcaaccctgaacttctgcacatcttcctttgtgaggtagtatattatgcagcagtgattctgcagcattaccatgtaaggttaaaagttaaggaattgttttcattctgtgcttatttcaggaatctagaaaatggcttttgatttgtagttctccttgaagaggttcttcacatcccttgtaagttgtatttctaggtattttattctctttgtagcagttgtgaatgggagttcactcatgatttggctctctgtttgtctattattggtgcataggaatgtttgttatttttgcacatagattttatatcctgagactttgctgaagctgcttatcagctttaggagattttgggctgagacgayggggttttctaaatatacattcatgtcatctgcaaacagagaggacataaagaaagaatcaatatcatgaaaatggccaaaatgcccaaagtaatttatagattcaatctatccccatcaaactaccattgactttcttcacagacttagaaaaaactactttaaatttcatatggaaccaaaaaagagctcgtataaccaagacaatcctaagcaaaaagaaaaaagctggaggcatcacgctacctgacttcaaactatactgcaaggctacagtaaccaaaacagcatggtactggtaccaaaacagatatctagaccaatggaacagaatagatgcctcagaaataatgcgacacatctacaaccatctgatctttgataaacctgacaacaacaaacaatggggaaaggattccctatttaataaacggtgttgggaaaactggctagccatacgcagaaaactgaaactggaccccttccttatatcttatacaaaaattaactcaagacggattaaagacttaaatgtaagacataaaaccgtaaaaaccctagaagaaaacctaggcaataccattcagtacataggcatgggcaaagacttcatgactaaaacactaaaagcaatggcaacaaaagccaaaatagacaaatgagatctaattaaagagcttctgtacagcaaaagaaactgtcgtcagagtgaacagacaacctacagaatgagggaaaatttttacagtttatccatctgacaaagggctaacatccataatctacaaggaacttaaacaaatttccaagaaaaaaaaacaaagtcaaaaagtgggcgaagcatatgaacaaacacttctcaaaagaagacatttatgcagccagcaaacatgaaaaaaagctcatcatcacttgtcattagagaaatgcaaatcaaaaccacaatgagataaccatctcacgccagttagaatggcgatcattgaaaagtcaggaaacaacagatgctggagaggatgtggagaaataggagtgcttttacactgttgatgagagtgtaaattagttcaaccattgtggaagatggtgtggtgattcctcaaggatctagagtcagaaataccatttgacccagcaatcccattactgggtatatactcaaaggattataaatcattgtcctaaaaagacacattcacatgtatgtttattgtagcactgttcacaagagcaaagacttggaaccaacccaaatgtccatctatgatagactggataaagaaaatgtggcacatatacaccatggaatactatgcagccataaaaaaggatgagttcatgtcctttgcagggacatggttgaagctggaagccatcattctcagcaaactaacacaagaacagaaaagccaacactgcatgttctcactcataagtggaagttgaacattgagaacacatggacccaggaggggaacatcacacaccagggtctgtcagcggctggggggcaaggggagggatagctttaggagacatacctaatgtagatgactggttgataggtgcagctaaccaccatggcatgtgtatacctgtgtaacaaacctgcacgttctgcacatgtatcccagaacttttaaagtataataaaagaaaaaaaaaaaaaaggaaaatggcttttgagctcctgaatggaacaaaccccaaactgtgttcttcatatcttccttccaaaataaaaatggatatctttgtcagttggatatgcagctatgttttgaattactgccaaggactttaattcaattaaatgtaaaattaattttcctgtggttattcttcctgtatattgtttgatataatttaaaagaaagatatcagcgtattcaaaatagtaatttacaaaaaaatcaataaactctgattttaatgtggaatatgattaaggagatttatagatgttccatatgtagagagtgttgttgggaaaatgtatatagttgtctgagagaggtgagaaacaagttcaaatgatcacttttaaggcaataagaaataatctttggccaggcgcggttgctcacacctgtaatcccagcactttgagaagccgaggtgggtggatcacatgaggtcagcagttcaagaccagcctagccaacatggcgaaccctgtttctactaaaaataccaaataactgggcgtggtggcgggagcctgtaatcccagcagcttgggaggctgaggcacaggtgaatggcctgaaccctagaggcagaggtttcagtgagctgagatcacggcactgcaccccagcctaggtaacagagtgagattctgtctcaaagagtaaaaaaaaaagataaaataaaataaatgttttactctatcttccttcaaaggcgaccagtcttcacatttctagcctcagtgaaattttataacttaggtactacaaatagaaaataatacttgcctttacgaacgttttaaattggcacttttgtctttaaccacccgttgtgtcttttgtgtaaatgagtgattaaatgttggagcttccctttcacgttgggagtaataaagaagctgcgagagttgtccaaacacgttatagtaacattatgaactagagcgatgcactagaaaaggaaaggaactgatggatatgagaaaataaaatctggtagaataagtgcttgattcttaagtctaatgactaaattagatggatgcccactatattgtagagtgtgtggaccgtaacagatactggcactttggaaacattttcagttgactccaacatggatcttttataggtgtttttaaagttgacaccatttttaaaaagtgtttagaatgtagactcattctaaatgaccagctcattctagaccaacttcatgcattaaaattttaaattggattcaagcaacaaatgtttaaaacaaaaagcttttactatgtaaaaacgtrtcctcagaaatggtataattattcagatacattttatgtcttcctgttaaagagctgaaacttttcaattagagcgaacagaatattcattgattgtagtagtttttttaattttgatatttgcaatttgaacaaaatagttttaaattttttacatttatgaatgatcagtagtagcaaccggctatttttcacctttattttaaccttgactatgaatctgagattgaaaaaccactacatgctgatcctatagtgtagtgttgaaatgattagactcttgaaatagatccccttgttgtgatttcctacttagtattttttgctatgtgaccttcatcaaactagtaaacccctttttcttgttggggaacaataattgtacctaccttataggattaaatgaattaatatttagagagtgcttacaacagtgcctggaattttagttattattgtttctaataaagtgcttaggagatatctcatatttccagttatgattaatctatgcacattgataattctgcaggtttaaaattgtattcattacattacaaaatggaattcgtatagagatacgagttttttcaaawgttaagatatgtttcsttagttttcttattatatttattcttgagactatttttatactaattatgccaactggaatttttatagcactttataaagctttaaactaatttatctcattttatctttatggtgtctctaaatgtgcattatctcattatgccctgtaaataagatgcaatgaattgcccagtgtcacacagctgtaattggggaaggtagaagtccagtccaagtatcctaattcagaatgtctgtgctccttttctgatttactatgcaggcttttatgggcatcccaaatcaaaactaaaagagtctagattcaccaatgtcttttttccttgtccatcataataaaccagaaccaaagatctctcctgctctggggcattttgtctaagattactattaactatccttccttattctttcattcgttctttcagccagaagttattgagtttctgtgggagatactgtgctttgaaaattcttggtatggatccaacctattctcagtgcatttrtatacatatratttttccagttataattgctatgtttaaaaaaagatttgtggcaacctcatagctacatgaaatatagcaaggtaatataaattagaagttattgataaaggaaaaaatacatacatatgcatacacatacagtaaaaatataaaatgcactccaaaatgagacttaggaggccctatgtatataccctacagcccttgatgtatattacatatgtgggaaggcataaagtgattgaccttaagtcaaagtatgcctctaataatcatgctgagagcaaataatttatactatatataatgctatcttgaaaaacatttaaaagaaggtatttaagatatagtatgtctgtcttagcaatatttaaacmaagtatggaaggtgattgatacatgatgatgatgagatggtactaacaatattcatttgggtttttacatagagtatttgtggagaatgtagtattatgaaggtttaaaatttttttctatttgtttgtcaatgttaattatctgagtttacctaaagttatattttaagtaatgtcactgacttacagtattaatggttgaaatgtgagtctgaattattttactgtattatgagaaatgacagaatttagtttcagctgtgtatagtattcactgataacttctgtatcctttggtttagaagtatttcttattcgaggaagtgaaacctactgagtcatttagaatagacggagtcctcagtacttcctcttaacattcacagaatggtggaaactagaaaatgagttatttattggtctttattctccattaatgcatattatttgatcttgcattaagtatacattgacagaaacattattttaattattgtattgaagacattcttcatgtgtatttaatcaaccacctgacagaaactagggcagagtaaccaaagtaacatttgagactttatggttagacgtctaatttgcatgtgacagtagtccatttataaagtgtgrtggatgaagtcatattagagtaagtaccattagagacacattcattgtgatcygtgtttttgcaaatcaaaattaatggtcattgcagctgtttgttgatctgttgagtaatgtaaactctcaacaacaaagctgaagagaagatgtattttgtgatatctactcttataacaggcactcttaacaacatcagtaatttgtataacattaaatgttcaagtagcatagagaaaaayctaaattcagttttagatgaacagttctttgttttttcttgtgctataaagacacagttattgcctttcacctcctcccccttcaaaactcaatattttcagttatctcttgtgaggaaatatatcacataaactggaagtcatccttaaccagagcaatatgtragttgaccctggaggttcaaagagaaacttacgtagcctaatagtgtggcttgcacattctatgcactgtactaaaaaataatgtaactttcatgatttcgattgggtggaataatttttagttacgataattgcactgaaattaggtctttaaaaggttcttggtttttagttaygatactaaaatatttaccagtgaatttatatgatgtgtaggaggtacttcaaaacgatctaagagtgaaaggaacaagagaacatatagatgaaactggactggggatgaattgataattgttgaagtcgggtgataggtacatagaaatttatagttttccctcaaattttatgtgtatctgagattttctataataatttttttaaatgtatgagactatgtacgtctcaaagtactgctttccrttcttcatgtgttaaagacagagggaccatcagatcttcagatcttgctttctttttttcttttcttttcttttttttttttttttttttggcacggggtcttacccttacacctaggctgagggcagtcatgctgtcgtagctcactgcagcctcaaactcctggtctcaagcgaagcccccagctcagcctcacgaccagctgggacttcaggtgtgtatcacaacacctggctaattttttaaacatttattttttatagagacaaggtcttgctatgttgcccaggctggcacagcttgctgttaaataaaactatctttttgaaattgtcttatgtaaatctgtaaaagtattccactataggcacctaatatggatctcttttgacttttataacaaggggagttttgcctaaatgataatatatattgaatatgactttaaatttaatactctttttataggagaaagattttgcttttcttaaatatttactcctgtgttagaaaatatcattgcaaggaggttatcaaaaatagaagaattaaatcttggttttgttatctgtaaaatgatggagcaaataatatttaatgtgttttgaagccccctggacatgaacatgtatggtggtaaaccttgaaggattctatatttatatgtctgtatttctttataccaccttagttcaactgttttaccattccaagtttcttttccaaattatgtacaagcagatgaataagaatatgttgcaattgatttttcttaagcaagctcagtgttttttgttttttgacactttgtttggcaaaggaggtgttcaatttgttgagctgactgagacttagaaagaataaactatcacaggatctgccacaaagtagatgtgaggtagttgttcagtgagaagagagtgagagagttattccatccttgatccaaacatcactgttgggcaggtagatcactaatttcctattaaaccaagtggayaggacagtcctgaattaattatggaacagtttctttaaagacgtcagctctctgcatcccttgtcttgccactgaaatggtgctatttcatcccatttctcccttaaagtaattttgtgatttttgccacttttaaataacacattgctaaagtcagggtataatgcaaaaccaaaaatcgggtggagaatatcatataccatcttatctctagaaagcaatgttgtctgtagggcaagaaaacagtctttatttccctgcaaattgtgaatttttaatgtagttagttttgagaaatgaatgtaggaaactttgagcaaaacatccaataatgaccagtaaatacatttccagcccaaaagtatttgcacaaatctttttgtatcatattgtttaaaagcaagataagggcaaaacttagtatctcacagagaactttatatttgagctgtgtgtcaggatgacaggctttcaggacagatgatggcttttgaatataaatgtacacattttaatttttcctaattgtgtataaagwttttaaaatacacaggcagttaaaacaaatatttagccacagttagatgcacaagtattgtatttttctcaccgatactactgctttattatgaatttttaccaaaatatacttttttatggaatgtttggttagtactgcactcttttcataaggagagatacgattcaatttccagttttcttcaggactctaatgccttgatacattagaataataagtgaacagtcaggaaaataaagaggtttcttttcttgggaaaatcaaactttcttaaaactttwtttttccttcggaaactgaagatactgaccatttattatacattttgttggctccctgttctatacccactaccacttcaagagaaatcttcccccacctcctaccccaaaaagtctttttgggggtgtgacttttatagttgtagaacattattagcatttctcggtactgtttattttgaacaaaaccaatccatgcattttctatttgtttaggagtcggatggtcagggctgccctttctgtcgttgtgaaataaaaggaactgagcccataatcgtggayccctttgatccaagagatgaaggctccaggtgttgcagcatcattgacccctttggcatgccgatgctmgacttggacgacgatgatgatcgtgaggagtccttgatgatgaatcggttggcaaacgtccgaaaggtaaaactagaaacatgggtttagttaaggtgatgtgaccatatgaaaaggaaatgatgccgtcataaatggagtatgactcagtgtatttgagtttagaaaagaggcacacacacatactagcctaggcctgtacagggtcaggatcatcaatatcactgtcttctacctccacatcttgtcccactggaaggtcttcaggggcagtaacacacgtggagctgtcatctcctatgataacaacgccttcttctagaatacctcctgaagaacctatctgagactatgttacggttaactttttttcataagtaggagtatactctaaaataatgataaaaagtatagtatartaagtacataaaccagtaacattcatttattatcattatcacatattatgtactgtacacaagtatatgtgctatacttttatgcaaccagctgcacagtaggtttgtttacaccagcatcacacaaacacgtgagtaatgctttgtgctatgacgttaaggtggctatgatgtcacccaccaggcaataggaatttttcagcttcattataatcttrtaggatcaccatgatgtatgtggtccattaccgaaatgtcattgtgcagggcacaactactataatgttgacaggctgatataatcatagtttgagagagaactagattctcctcaaggtactctcattggttttaaacatcataatgagaggtaatgagagtgtttgtataaaattaaacgtcatctaacactggcaatagcaaatctgtgaagaaaaaatttaagaaaggaaattattaaatttggaaatggtgaaactgaatttgattaaaaatattctttgttcaaatctagaagaagtgtctgatagagttttttcttaatgggaaggctgtctcactgtttggcttctaagaggtcacataagatttacttttgtgaatttaccagaatctgagtttgctcattaatgttgttgactcacaaaaattgaccttgtcagttcactgagaatggatgttactgcccagtttaagtttatataaccaggtacacaacagactagtcaatgaaccagaatgccaactgattaatttrcagaccagaaatacagtggtcaagagaggtagactcttggatatcaggctattccctgtacaggaagatacatgaaatcccaattactttcacaaattttttgctctcaaaatcagagaaatgggattgagtggtgtgaaaggtcttcatatatggtgccacccttcctcctgacttgggcagacatggctaatcagtcatgatacttaccgccgctgagttcagacttggccaacagagcctttcaacacagccctgaagatcttccactgtagttcattaggatttggcaggtagcatgaaacctatttgccattgtcactaggtggagtgatgataatgtgtaatggcatcagattgtattcaccgtattcatctatctctgtaggaaggaaatgcttggtagtggaattttgacaaggcatttctttgggttacttcatttttagggctgtgtgcgagttttcctcttgggaaactcctgcattttctcccttccaatgttccatgctgaccaaatacattcccttaggatattttacatacaaatttttacataggaagatatgttaacatcaccaacatggctactctcaaattttgcatttttctggaatgatttttattatttatcttattggtttttcataaatgttataatttaacactcagagaaactacacgatttcactctttaatcctgaaagatacagtttttattaatagtttgaattatgtgattttttttgacctaagaaatggaagaaagtagttattcctcagaaatcctgaaggatgaacaagaaaaaataatcttagattgaaacagacttgagacttgagtctcaaaacaaagttaacttaaggaagacgtggaataaagcaccagttctgctacagagtagtaatggcatgctaggcaagttatataacctctttcttcctcagtttaccccttcgtaaaacagaaaaataatagtagcttctctgttgggtgttgtgatgatcaaacgggatcaaggacctaagaacctagaagaacgtcaggtcaccaaagtcataaatgctcactatattattaccaatgttaattaataatactatgtaatacatattctaggatatactccataatctgagttagtagaaatcatttcatcactatgcatgtgagagagctacatatgcggagctggtgatattgatgtactgttccccagaagacataagtttgaatactggctctacaatgtacaaatacaaacaaatcacatgactagtctgagcctgatttcctcttctgaaaaatgagaagaataatacctccctaaattgttgaaagaatgacatatgttattaatgctggttttattgatttgtgaccctttttactgcaagttaaaaatgattttacattttaagtggtgtatatttaaattcctatataagtacctacaaaatgtccttgattttacatcttgtcctaaaatattcactacctggccctttaagaaaaagtttgcagccccaggtctaggacatagtaagcatttaaagaatggttattgaatggatggataatggagaatgacagaaaagtatttgagatacaacagctcaagtagttgaagtgctccaggtagcagtgttttttttagctgtgaagacatttcaattttctttactaaatgggttttcatcttcagtgatccatgtgagagggtaggtctaggctttaagagaaattttaaaaagaatttttgtataccttactgcttgggagaaaacagtatctgccctatgtgaatttgggaaaagttgcagtctcaacctgctttccattgaattaagttgaagcttgagcctcttttcagtagtggcactaacaatcgaaaggaaatgctgggaacataacatgagaagcagaatgttccaaggtgactctagtgtttctccttgatcttatcacccgctcccaagaccattcatatttcattctctctggcacactggtgagctttctgtcaagggagctgagacattttcaaattgatcctttctgttttttaccccacaaagagtagaatgatgatctcaagcattattgtcctagaagtcacacttcagtagcttatttggcagtcagcagtgtcatttaataaagctttacttcactacaatcttgttatactttcytatgggagttagatagtttagaaatttatatcacttgtaattatttgtttttaagttgaagaggtatatttcagttaaatgtctttatgtctactaatctgcctctagtcaattaaactgattgtgacttttatagcatttcataaatgtgtaccacttaattttcaataaaacctaaatttttatatagatacaagcataattctttctgaataatttggaagaatattgctatgatgttatgttcttatagtattttatatgtacttctatatcaggagttacactaaattgttatttaaaggactgtctttaaggccagggacaatgccttgtatttgtgttcccaggcacctaaatgcactcaataaatatttactaagtgaactaataaatgcacactcctgcacacatgttcctttagggcaatgacctaatcttatgcatattttaaactttgttccaacctgaatactaaatatatatatacacagagcatcaaactgatagattttatccagttttttcttataggagtggttataaacaaatgtcacatggtcattttgacacagtagttcttctacctgaatgttcttcctctgttttttaaatcattcttttgtcattcattcatgcattttcattcattcactcattcatttattcatttattttttaattaactgatgaattaatttagagctggagtctcgctttgttgcccaggctggactgcagtggcactatcttggttcactgcaacctctgcctccctggttcaagtgatttttctgtctcagcctcccgagtagctgggattgcagaygcctgccaccacgcctggctaatttttgtatttttagtagagacagggttttaccacattggtcagcctagtctcgaactcctgacctcaagtgatccagccgcctcagcctcccaaagtgctgggattacaggcatgagccaccgtgcctggtgcctggacttactcatttatttttaaaacattttattctctcagttaaaagagtgactgccagtgattgtccaacagaatggttccattgtttctatctgccattttgaatactcatctttttcttcttttatgagcgggccaatgataatattgtgaaattgtttcttcctgtcttcagcatattacattctttaaatgagtaatgctgccatcgtagcatggaaacctgctttgattgtatattcctgttaccatggtgatatcccacagctggagttcataaatagtagcatactaaacatatagtgtatttctattatttcttttatagttaaatgtgtttaataatgctaatccttacagaagcaatagaacctaaaagtctataatacatactttttgattccctctctgatagaaagtattttgtgatwctaactagaatatgttttagattttgcccaagtctgtatcgttgcctgagttttcaagctgtcagaatcctgggataattagatctgatgtgagccctcagacaaagtccaggatgtgactggtaagatcacagccttctctctgacttcattcagatcagagctaaaaaacagtatctgttgctacccagtgatttgcttcattttgccagaggattaagaggaatcttaacagtttttcacagtattagtcaccaaatacataacatttacatttgaaataaataaaaatttgcatataaaaataaaatgttgacagactgaactagtgaatgagcccagattagttcttattgtcttaaacattgtattttcttaaaataatatttaaaatcttaatggccacattagaacaaaaatgggtatgaacaaaagtcaaggaagttattcttttttatgcattctcctttgttgccttcttcaattaaaatacatcttgctaattagaaatgtaacatgtcatctaagtattgcatttcctaataagtgtgaagaacgtctctatagcaggggtccccaaaccccaggccatggaccagtaccagtctgtgatctgttaggaatcggctgtgcagcaggaggtgagcaacaggctagtgagcgaagcttcatctgtatttacagccactccccacagctcgcattaccgcctgagctctgcctcctctcacatcagcagtggcatcagattctcaaaggagtatgaactctattttgaactgcacatgggagggttctaggttgtgygcttattaggagaatctaatgcctgatgatctgtcactgtctcccatcacccctagatgggactgtctagttgaaggaaaataagctcagggctcccactgattctaaattatggtgaggtttataattatttcattatatattatagtgtaataataatagaaataatgtgcataataaatgtaacacatttgaatcatcccaaaaccatccccttcccctccctgccaccgttcgtggaaaaaatgtcttctacgaaaccagtccctggtgccaaaaaggttggggactgctgctgcatagtattcctgatcctaaggaaaggggtgtgtgtgcatatcacagtgttttgcagctatttttaggaggatgttgcctttttacgttgtctatttaaatctgaatcacaggattagagtccgtgttggagccgtaagatcaaaaattacaacagaagtgaaatacaaaaataaaaatagacattcgaaatgcagaacatggttctcaactataggcaattttacctcttgagggtattcagtaatatatggggacacttttgttttttgcaatgactaaaggatggcaaatactgctggcattgagtgggaagggccagagatactaaatatcctgcaagcccatgggtggtcctacccaaaagaattattctgaccatagtactaatagtctagtcctcaccactgccttcccacaacatttaggtagagccgtgagtgacagtaagcaatccgaaggcacaggtttgttgttcatcgtttacttgcactctgtttactgatcttctaaaagctcttcgtgcaaaatagtggtattttctttattagcatgtgattagcaaaagaaacaactgcatcatccaagtgctgtgtgatgtcrtaggataccttgaagacattgttacttatttctcaaaaataacttgaatacatagtatattagaagaagcaacacttgaactctaaaagttttgagtccactgcctcaggtagattgtcagctccttgaggacacaggctatgctttattcttctttccattcttagaggtttgcatggtgcttgatacacagtaggcccttgagaaggatttttttttttttaatgatcagtggtgacactgttcttaattgttatattcttaagtagagctgccctcttggagtgaaactgcctgggctcatcttctagttttcctacttagtatctatgtgccttgttttatttaacaccccctcccactccccttcccccaagtacttggtccataaaactctgcctctttaagattaaatgagttcatatatataaaaagccattagaacagtgctggcacatggaaaatgctaagtattggttgttattaatattatttttaaagtaaattaacaaagatggggtctcactctaatgcccagcatagtcttgaaatcctggcctcaagttatccttccacttcggcctcccaaagtgccaggattacaggtgtgagccatcacacctggccacattttttatactagtgttatttaagactcctgaaatattgctgtacttctaagaattaagttattagtatttttgagttgtctatggaaggttttcttttagatgttgatagcattccattaggaagaattagatgccaaaattttattggttaccaagcaattggttgtatttctttaacatattaacatctatatagttataatttcattgcatgaccacattaaaataatttactgttaaaccatgcttcaagtttgaaactcagaaaatgcaaacttgtcaacatgtcagctgaaacactattttgaggattaaataatttagataaggttacaatgttcttattttctgtataactaagttgaaatgattaagtattatctaaagtagggtgaagaactacagtaaccaaatagcaattgcttgttccaaccagctttagctggcatttggagagcaataagggttttcacatgaaagcattttttcagtgaccaaaatttattcctttaattctcagaatgttcttgtttcttggccatttttatggaaatatttctgaattatatgtcacccttccctgccttctcaaaattggttatgcagctgagygaaccaaagggcataagaagccactgtagtcaacatgacacatttctaaaagcttacattttgctacaagatttgagggtagcttgcataaagagaagagaaccataaatttaaattaaaatcacacatrtatttggatcaggatataaaatttgtgtaaatgtttaaagtaaaatacaraactttaaagaaatttcaaggttatggaggctgatcataggccaggagatcaagtccctctcataagaaggtacttcaaggagaagcagtatcatcacttgtgttaacagtgtttaatatttcagtagagcagtgcccttaaggttatccccaagtgtgagactgcactactttaaaggagacctrtcggcaactttattgaccacttctctgccagacctcaaagagaaatcagctcttattccatttggtgtttcttaatatataggtttctgttttcctccgcttctttattgcttctaattkgaaaatttccagaagttactagtggaacatagacagtaattcagcctttgaattagtgaacttcattttacacagaaatcaaatgtccatattcttaggaaggtagcagggtgcctacattctgtttctgtattaagaagtagaaaaaaaaatgttcctcctacttcagaggactttcctgtttcattctgggtttctccccaaattattgtaggttgagacttctggaagtatgaccatgggtaagcaggaaatgattgtattgctctaacacaatattmttcatataagcttttgtttattatctgtggaggtactctaaaatagataacacaagtcatttacttaagctataatgccatatgaatatgtgagtatgtgtgtaagcatttttgtagcatataccctctctgaataatattctgtataggctactattttaaatactcttgatttttgttttgttcacaaaataaartgaaaaaactgagaatagtagcaagtaaaatatgcttagaytattttatcatgtgataaaagttttatcaatgtcttcattaattttcacgcatttatagaaaaacattgactctctgagtccttctcatcatccttattatagtaactgtatataccttkttcagatatggaaattcattaagtaaaaatcttgttaaaagtattataaaattgactttgattatctctgggactgtcagaactctcatcttattagtaattggagaggttttctcttgtcctgtttttataataagcctgactgtgcttgaagtttcttaccaaatgttttgccatttccataataatggatcttattaacgtttttataaaatggctctttaaaggtgtggataaaatgaagagtgactaaaatagaatgagttcccaattattattggtaattgctgaacatartgagatgggcttttgactactttacttcttagggtttttctgtcaggattttctgttaagattgaacatgtggatttctctgttcctcrtggtagttataaaggattctgtgcattttgtcagaaaaataaataatagtatttattaatttccaaagcaaaaggatgagtatgtagacgtaaaagaatccaatgtggtctttaaatttctagaacaccaggattctagtttgtaaaagatgttctcatctgttactaggattgaagaacttaagagaaattgttagttagacaaatatactggtgtgatgataatacaggaaggaatcaaggctggctcagcctttggatttggaaagaagctgaaacagataatttatcataaagttttagaaacaagtgtaatactagaaaaatgtgagaatcacctaaaatcaagataaaggaatgaagtgatactgatcagtatcttttaacttgaaaggatgtttgtgtctttcccaacttttgcagttacctctacataaggattttggatattgtgaataagttctatacagttaattctgtgttcacattctactttctatgctttatgacttaatttttccatacttatatttgtttgtcttaagattagakagatgaacatgaaggagtgacaaagaaaggaactcatttaagcagtgctcaaaaggacatgatactttagtcattcattaacacatgaaaaccagaagagcacaggcgaaatctctaccatgaaaaagtcagaaaaatttaactgcagaaaaaatagtgacagcaattataacagatagaaagaggttgactatcctaatatataaagagcactttcaaatcaacaaagaggaaattagtggatatggggaccaaaaaaatgtaaaaagctagtgacccaaagaagaagtacacatgtccaacaaagattgcatttctttcaaattatttgtcaaggaaggaagggcaaatttaaacattggtatggcccattaaaatgacaatcaagcatcaaagcaaacaaaatattctttgcatttgagttttgtgtaatggtaattatcacacatggctggtgagagaataaattggttttaccatctggacagcaaaagagccttaaaaatattcataaattcgacacggttacatgtctagtatcttgtgctcaaaaaaattgtatgattctttccttaaaaactagcacatatatggttaaagatttctttatgatactactttataataaagaaaacttgaaaacagcataagtgttcattgcacaggaatggttttgtaaatccatatatgcatactttaaaattatattcatgaagaatgtttaccgctaatttttttttgtataatgctaataaacattgagtagacttaacattgtgtatgtgattaggaaccatcaccaatggctatatgtaggtgttctttaaaatatctttatatttccctataattccaaaatttcctagagtgaaattatgttctttataatgaagagagaaaaagtgaaataaacagaaaattgaaaagatacaaggacagaactgccaaaaccagtaaaacgtattttttatgggaaacagtttgacaacatgcatacccctaaatttataagcctaatccaattcttaaactacttttcttgttatcatttgttgtttttgtgtttaagaccctttctaggttaaaaagaaagcctaatcatgttaaattaaattttaagtttgcttttttaaaggtcagtgctaataatagcaaataatccaagaggcatttctatttgacttttgaatgcatttttacttaatttaattatttggttagatatttgattttgttactattgcattaagagctgatagtgggaggaattgtctgggacaaaataagaaataacaagggtgggcattttgtttaacagtaactttaatggaattaccttttggcagtgtagatgggcaagctttgactagaaatttggagataatataatagattacattctgtcccttttacatcaaaataatccattttcctaacaatttcatctaaataaaaattaaatattttacatcagcatttattttacataatgtttataaatgttttacatcagcatttattttataatgcattatttaattttattaacccataatgttctgtcaaatgcattaattttattctttaatctacagataacaccaccaataggtggtgacattttcaagactgcatggcctctttatattataactgaaatttaaatataagcaatttgaatataggaaatttaaatataggagatctgtggtttgaaatcaggttatacatttatttatatgattactcaaatgcaaaaaaaaattgttctttataaccagttggcattagagcttagatagtcatacttgaaatttacattttctaatcaagagtatccgtatgaacaaaatactaactgttgttattcagaatttaaatgaatcctttgctacttttctacccaagatgttttatacttatgtatttggtctgcatttttatacacaatggaagtagtagtgattaagaggaacagtggacaaatcagtaagtgataattagcacagttcacagtcttagaatttaaacctgagccaggggattggctctatgtttgtttgttattattgttttaccccaacagctccctttatcacctatcacatgtagaaaaagataaatggcctgggtgatttgagctggggattagaactgtggaagaaagcccagaaaagggtggaggaaatggctgataaggagtcaatttaggggataatatgaactggtgggctaaagatgaattcccacattcaggtcccagctatagaggcatttgaattacctggtgattacctgtacaggggaaaagtctgttactctagaatttagtcttttaaaatgcaaaaataaaaataaaaaatgcagctattacaaaaagacagcattgtcttttaaaggagaaataattttggtctacattgaattgatgtactttgtttttttttattttcagaaggataaaaaagagcagactttttattctttaaagtgagctgataaattttgatgtcctgaatttttaatatctcatccaataaattaattatggactggattgtgcaacattgtgctagatttcctttttttccgtagactttcaaataggaaggaaaaaacacaatttgtgatgactcaaataaattaaaagtgaccttctatatgaacattacctactaaaaatgtttacaaatcttcatagtgtttgaattttaccagcaatgaaagttaaggcaaagcttcagtacactaactgcataattgttttwaaaaatagtaaaaggttcagcaaagaataatgcattactatcaaaagagcattgttaaattatctactcttaggtaggaattttactctaatttaggagaactcaggaaaatgaggtttggtgagtttagtacatataatcaataaagatgaaagatattttttttcttcacatactctccataaaatccttctaactaagccaacttacagatactgtgtagcttctaaatgaattaattcttcaaaaggacagtacataatcaccttcagaacacagtatgaattgcgctaagcaagatatgcttccaattacattcacaaagcttcagagagcctgctcgtctggaagtatctaaaagttcaaggttattactttgccacacacattggtttggatgtctgttctgaggattttcattatactctttcagtatccaacaggctcttcaacacatctgaaatcaaatttacmccatttaaacatgctagaaatttactaactgcttaaatattagtaattaatccaatctagggtgaaagtcaagtcctaatactgataatgggctgttagctctatcacaattctgtgtcttgtttcagttaatgagagaagtaggaaaatatttgcagaaaaaaagtgcttggaggagcacaggtctcattcagcagtctttgcagtgtgtacatctagccctgaaaagtgtttttgcaagtaactaaagaactgtgcattctttctatatataaaaaaatatattgtttgggctagaaacagtattgatagctttgcttcttgattcttctttgtaaaggagagtagccatatcaacaaagcatttttttcaggtaatagcttttctagttctcagagaatataatttatcctaataggaatggtggagaattagatgtcctgtgacaattgctgatctacagtgtcaagatgctgtgatgcaaatagctttacatgaggaattttttctgatctatgatgattttgggattagttttgctccagaaggttcaaatttatggaacatgtgaggccctgtgactttctgggtagaactattcttttgttaagaatcactggctgtactcaagtcagtttgtgactatagagattctttattttctccttcagtgacaattgaatttttttgacttaccataaccgagctaaaagaaatgaaaaagaatcattaatttttaaaaaagaaatgtttctaaaaattgtaatgtaaaattatgttgaattttgttgaatgattttgttattcggcaccaacagagacaaagactttgcagtttagtaatgtcatgacaatattcaggcatatcggaggtatagtcttctgtttagctactcagatttatttattttattatttttttagagacagggtcttgctctgttgcccaggctggagtgcagtggtacgattatagcttactgtagagtcaaactcctgggctcaaggaatcctcctaccttagcctcttgagtagtgggactggaggcgtgtatcaccacaccattctaatttaaaaaaaataaaaaattagtaaagaggaggtcttgccatgttgcccaggctagtctcaaactcctggcttcaagcagtcctcctgccttggcctcccaaagtgctggcattacaggcatcagccaccagggctggcctcagatttatttttaaaaagtctttacaaaggacgcataaatttccaactatataaatgtgggctgtgcagtgacttccttgcaaagagtatactatgggaaggaggagaaaaaaagaaacttaacagtgaagaagtctgataaacaataccacggtcaggtaattaaggtcagcaacagcagtgatgaatcatgttgatagcatggatccttgatatgatgtggtcaaaatgacactttacttccgtggtcctactcctcaaaacttttaaccccaggctaattatttttaaaaattagacaaatcccaataaagaaacattctgtataatctctaaccagtactttacaaaactgtcaaagtcatcagacacaatggatgtctgagaaactgtcagagccaaaaggagagtagggagacgtaataataaaaactaatacagtatcctgcatgaaatcctggagaagaaaaaggacattgggtataaactaaggaaatctgaataaactatggattttagttaattaacaaaagccttatacaatgtaactaagtgtgaatgtgaacgcaaatccattatctcagttaaagacagactaaatgataaagctgctgagttcatattaaattgtcaaatgatgacatcagcaattcgtacaaaggtaagtaatgttaggaggaaaatggcttacaaataagtttaaaactataaatactagcattcagaaacagaacaatatcaaagcatgatagatagtgttgtaaacattaagtctaaatcttcaaagagctagtaacttagacttggaaactgcccagtattttagaacagaatattgtttatcctgttaaggctacttgattaactgtatggcttttataacaaatagaaattaggttatgctgcattaaaacacatagacacacacacacaaacacacaacattatgcaataggaagtgttacgtacaaattgaaatacttactggcttttcgatgctactttatctaccagacaatatggaaaacttgtagtaacagaaacwtagtttttgccagaagtacagacagactttcctagatatagttcattgtgtttcaagaaaaatgtttaacttgagaatcttttccatgtgtagtattaaggaaaaaaaaataggcttaaatcagtttgttttaaacacacaattatttttttaaaaccccacctgatttaattggtttgcaggaaaatagactacatacaagatacatgtttggaacaaagcaatagctaagtattagaatgtacaaagctcgagcaaaaaaatttataatatagagatccaagagcaatgtgcattattgcattatgtgtttctggattcctcataaaatatagatggttttcttgaagaatatctgcatttgattgtctttatactatacttttgctgttcttttttcttagcccctttctgcaatatgtaggaaaaacttatcagtcttttcttttcgtaatactacccttgagggacagtatgaactatttgcttctattaatcagggtaaactaagggaattcattttaacaaatgtatggtgccagaaaccttcttccaaccaaatrtattctttaagaacagagaacactctgcacagctaataaacagcggcatctttctctttttctgttctagtgcactgacaggcagaactcaccagtcacatcaccaggatcctctccccttgcccagagaagaaagccacagcctgacccactccagatcccacatctaagcctgccacccgtgcctcctcgcctggatctaattcagaaaggcatagttagatctccctgtggcagcccaacrggttcaccaaaggtagatcaattttattagaaacacagatgaaaattttgtaagacaattattgattgctcagattcttttaaattccattactcatatttttttgcttytaattgtgaataagtttgatgagtttctcgtttagtttatggtgagcccacattcatatttcttgttttattactatgagagttacacataatttttgcagagagcatatgtctgtagccccatgatttgccagaataagaagcagagtaagtatagttattttgtaaaatagatttaaaaggtcattatatgcattraaataatttgcatgctgttatcaaatgatattttacgctcatttttatagtgccatgacaagaaaaatgtgatgggagtatatttgcataagggcttaaggtatgacaaattatcacccttgtttcaaggcractcagaagagggaattatatgtagtttttaaacctggagaaattaattacaatgaattgcaatatttgcagagtaattatattactgtttaatattaaagacataattyttactctacagttaaacctacagtttattttactgtgtggattttttcctcgaatttgataagtataagattttaaaaattaattttatttggtaacatgctctgttgtctaaaatttgttggaagcacaatatatttagtagtgtttkattttcctgtattaccagttaacctggttttaagatcacacattattagaatatcatttagaattatgtaaacacaacagattccttttttctctgctattttctaacattaaaattacaartcaatcatcagattaaccatgtaaataaaagtcaaaagctacgaaaagcatactcattcaattcattgatctatacctttatatttctatgtaagaatcagcctgatcttttaaaatactgtaagaattcataaaattgaagtaattccatatgtagtgctgctctgttacttgtgatcttttactattctggtaataacygataaagaagcagagcacatttgcccccatatcagttttgctgtatcacagtgatgaaaacaaaaataaagaaaaagcttttaatcttctaaaaatattacaaatattacaaatcaagttactctttaaaaaaactgaaaccatgacaacttttctcctctctcctaaatcatagagatgtgcaaataaattattgacatattcttttaatgtcaaagtcattgtatgattttgatcttctacttgtttctgtatcatttctataacttaacatttggatttatgtactcatttctactttttcctaatgaaatgtatttatgagttttttattctcatttaaatttcattaactagtaataaaagcaacttattaaaagatggcacaggaatctagtaaaactccttgtttggcttagaaaattaaagcaataatacactagtttggaagttctgtcagtgcatggtacaacctttagtttttttttttttttttttttttctcttctgtttctttagtcttctccttgcatggtgagaaaacaagataaaccactcccagcaccacctcctcccttaagagatcctcctccaccgccacctgaaagacctccaccaatcccaccagacaatagactgagtagacacatccatcatgtggaaagcgtgccttccagagacccgccaatgcctcttgaagcatggtgccctcgggatgtgtttgggactaatcagcttgtgggatgtcgactcctaggggagggctctccaaaacctggaatcacagcragttcaaatgtcaatggaaggcacagtagagtgggctctgacccagtgcttatgcggaaacacagacgccatgatttgcctttagaaggagctaaggtaagaaatacgcaaagcagaagctagagaatctgcttataaatgcttctgatggtcagtagcataaaaggttgggaagtgtttttttttgcctagcatggcacttccctgtaagtctttaattatccccaagttataaataatcagaagctcattaaaacttgaacttaagagaagtcaggaggttctaagtaatgatttaattttaatgtgaagacactagacaatttgccagagatttatttcaccttcccgtatttcatttgccaaaaatttcttctattaacaacttagtggtggtataatcagcctgcatttttttttttttttgagacgaagcctcgctcttgccccccaggctggagtgcagtggcgtgatctcggctcactgcaacctctgcctcccaggttcaagcgattctcctgcctcagcctcctgagtagctgggattgcaggcacctgccaccacgcctagctaatttttgtatttttagtagagatggggtttcaccatgttggccaggctggtcttgaactcttgagctcaggggatccacccgcctcagcctcccaaagtgctgggattacaggcatgagccactgtgcccagccagcacggtatttttaacaaactcctttagttccatccaatttttacaagttgtgttactrtacatgtcataaatcagttgttggagttagttattgttgcctgggacagtgcacattaggcagccaggtaaaatgaacctcctatatacttaaaaacactaaaccaagtttactcttaaaaatcaagttcttttcccaagttcttttcccctaaaattgagagattctcacccttgttgacttctcacttgaaggatgttactactatcatttatatgtccaggaaggagtttatgtgtgcaggaaactgaagagacagcagcagaaatcatttacttkagaattcttggtagttccttggcagaggtatactgtaataatttctggtatttggttccagggtgcttttgactctgagattagatccttgccatcttccctctgctgatggaggccttggctcttctgaagactataatattaaagtgatctcatctctgtagaccttaaattgatattttacagaagtagtctagtccttcaatataatggttaaagttggtgagttcatcttatattcaggatataaggaagaagcgtgacttgcactcagctcctctgtgtgtggaggtacagtgataatgaacactttgtatgacagtatttaacctcagtgatatggggtagccaggaaaggaagagtcacaactcagtagcacagcattcaaaaccaaaggcaaggagtggtggcagtttgctttgactctttgctggtgactcaccttggtaccttcagtctcatctattataaatatgaggatctctaaaggtttcctcaggttcacctaaatataatgtaaatgtaagagaacatactaataaaaccaattttataataatctctgttagtggggagctcctcctcaaaagagtttttccacaacctagaatgctgattggaaggacctgccattcattttcaaaaattttcaggtttttttttttccccctttagctttactttttattcatatgtgatcacacttgtcttgggaagagtgttagaagaagctgtaattaactagttatatctcagcagcatgttataatttattttctaaacggacttcaaaaatacttgaaatataatagttgttatagccatttcattgaagatatcttgtctcggggttcttttagataacatgttatagttttaatgctattataaatttgccctcctaagctctagaaaactggctgttaatttttttatgagatgttaccccaatttcttaggttattggtatgagatactgtttttattttattaactataggtatgaaatattgtgagttcagttataaaaacattcctttaaatatttctgtgtgaactttcatgttgtgatcattgaaacagattagtataatagagaacactgagtgaaaattttatctcttattgaaagctgaactttaatattgcttagttctctctaaataattctcattaagatttcctaagttctaatctcatatattgtgggtatttatattgcaatgctaatatcctccagttaatttcatgttactcttagatttggtgtttcaaccaaaattagacttctgagatttctaatttcaacctaattgtttaacttctggagtgagctgtaaaaaagaatttatatatagttgattcattgaatgccacaaaactataaaacagaccatgtctcctcttttattactgttataaaggaaaaatgattcacttcattagatcatagggcataccagaacttagataaattagaaaaggcctaattcctcttctcatttcattgttgggagacttaagaggttggcttcaactaacaactgacataatcacttaggatcctgtaattctcagtttctgtgatcctgggttggagtttgttaccaggctccaaaatcaggcctggatttcactttttgctctagaatatactggctttgtccccaaccttacttattttccttataaataaagtggaactttattttattcctttatataaaatggaataataataatacctggtatctaggataatagttagcttccagctatctaaatttctaaaccccttggttcaggaataaaaccaaaaataacagctgtacatagagtgtcaaaataagttgtaacacttggcatttttattcaaaatagttgtctgttttttaaaccgaaacatcttctctttgtttcactccttttttcttttatttaacgtagttcctaatgaatgcttggtaagcactcaataaccaagttaataacttggttaagcattcaataaccaagttaataactcggtgcttataatataatacttacttggtgctagtaatctaacactaaagccagtggtggagacaaacagtatatgtgcttgggtttgagtgtgggcaggtgtaggccaggagagaaaaggtggagggagaggatggctgtgatatgcaaggagttacaaagggacaggtttttatgtatcttgcatagttttcttatttaaaataggatttttgttcctctgcagaagagtagtcattttaaacatgtagatcatatacaacaagaaaaggagagcgggtgaagagaaaggggagatattttgattttttaaaaagactaagatttttaatgaaaatagtagatgttaacgtattttcacccttcatacctaatagtgccattttgttttgtcttactttatcattggattaaagagtgggagatttaggtatttggaggctgttttattcacataatttatcaggcccctaatataagcaaatgcgctttttttttttttttttttttggtcaaatggtaaaaactgccgcttaggtttagtagttttcattagcggcaaagcttcaaatctagtagcatcttcccattttagagataagaaaatgtagataagtactaaaaatttaagtgaaaactaattatacatgtggaacacaagggaatttataaaagtcaataccctgtcaatgggcgaggactcgcttcccttcattactcgtcctgtcattatgtcagttcccatcatccagaagaaccatttgccttttctgtttgcattgtcactagaacaatgaatgataggggaaatggaaataaattaagctctaattactccatttggtaattgtagagagctctgaggaaaaaattattctagctcatagttaaaatgaagtctaagaagtttttgtgatattcatttactccctttactcttcccctcctacctagcataatcaaaagctagccaaggtaatactttactttaaatgtggatctacaagctaagagttattgtttatttatctgattttgatggtaagagatttctatcctatagcattgtttccattctctgaaagtctcagattttagtcaccttataaagctgttccttaataaacatcttgttggctagatatttattgttgttggtggtttgttttaattatctgagcaaaataattcaccaaaatatattaaaatatgactaaaaacttgcaatgtatctacttatttctagatattaacattatacccaactgtcattatttgttctcttgaggcagtaagaatactgctgtttcttatatgataaaactatctttaactggtcatgtwacttacrgtgacattgtcctaaagatgacctttgcatgataatcttttgaagatgctgcaagataaatatatcaaatgatttccctttttgcagttgtggcttgttgtacttttggtggagaggcacatgtttacattcatgaccttaaagttatctataaatttcaagggctgtctttcagaaaatcagtcctstgtgtgtgctggtttcatgtacagtctgacgttgaaggacaaattatagggatacttttgaggtagcatgtgtaggggtttacatgtgtaggataaggtaaaggcttgtgttttgtaagatttttaaaagatgtttttcttaattgtgctaagattttcacaaaattgttttctctgtatctcaagggtcccatatgttttaatcttcagtttttaaacaatatctgaatcacaagaaaacattttacactttaggattagatgataccttgaggcatttagagaaatattactctaagataacctagatttctaataaattatacaagccagtttatacttctttcacaagtctacacttccactattttcttagttcttcaacctcattacctaattcagctatatgagtacctaggatgttcaagacactctggggaatacaaagaggaataaagcacagaaaagctagtcaggatgagacaggcatgtgattaagaggtaaggcatatgagaagcatccagaaaatgtgtgggatccccaagaagaaaaaaaattccaagatgcaggactgaaaaaggaataaagaaagcttcatgcaagagggtcactggctataaacattaaaagattggcagctgttgtttttgtaggtatgacagaaagaaatagcatggaggtgggagaatatgtatagtaataatgtagtcagttttggatagcctatagcataaaaagagtaggcaggtgaggtaagaccatggcaaggaaagttaaaaccaattatgaagtgtcttgaattctacattaagtaatcataatttggtaggcaggaaagaatatttaaagttttcttttctggcagaggaatgctagaaacagaattgggaatttagaagatttaaattggtagcatttccaatgcaattgtgatagatttcagacagtgagctaagaatgcagaggacaaaaaaatgtttcttagttgaggattcagtgaggtttcagtgtgaactgcttcagttgatactatcagtctgtgcatttgaggaactatagttcttttttaccatttgcaaacaggtttttcagatatctggaaaatatataaagtatttatttttagcccccaaagttgtgatttattgtactcactcaggtagtggcagctaaaatgatttttgggtgtaaagaaatggttgcaggtgagaacatgaaattcagaatgacataatgttaaatcttgtcctctagccaccgtcaataaatatgaacagccattttagatgaacggaaacatgatcatcattttataaagtacctgcgcatttaggtcctttgctatctcaatctactaattaggaaagaactatacagttctmttccaagttttgtattaggcgtattgtcaactctcagtacatatttatgawcagtttataggaataacagccattaagcaaattatatatatgtgtgtgtgtgtgtatgtgtatatatgtatgtatgtatatatatgtatgtgtatatatataacatatatatactcacacatatttgctgagagtatttcagtaataatgaatttctttcagctaaacctaaggaaagtgatttcactagttaatacttccattaataagtgcatctgagccaatcagcagtcaatattaatttaagccttactgtgtgtaaagcacygtaaggcatatgctataaaatggtaaaggagtaatagaatttttgtcctgaaagaggcccagtgtggcctaaattctccttgacaaaacgtaagtacacagaacatgagcaaaatattatcagatgccaaacatcaaatgaatggttcagaaaagacactacagcatttcagtggccatagaaatcctttagttactatacatcagtaacaaatggtatttctgaaacagttagaaaaagtgacatttgcattttaaagcagattaatggattgtttcaaaaaattaggaataagtcacttaattttcttaggtattgccctccaagagtaagttacctcattaattgtactttgtggctttactagtgatagrcatcattgcctgtatgacttgtcttcatgaaatttaatagtagtacataaaaatatgcaaactctgttattagtattttattctcatttacctaatgtgcaagatgaaagcaatttcaataccagtaaatgtttgagtgtattggtattttttaaagatacgttcataatgttctgattataaaatcatagttggtttattgttaaattagagccaatacagctgaaactattattcccatatctgtcttttattttattgttgctgaaattttattaagcatctatctatgttggatgctttgtcctaaaataacaaactattgcatataaaatccacattacattttcccaaatgagttttatatgtatttgtaatatgaattaaggaaatttgattgcagatatcttacattgtgtctattcctgcagcatgcaaagaattccaatgaagaatgacttccaatgctcaatatcacaatgagcgtttgtggtttgatatgtgtgtttgtctgttaaaaggcctttttttatgttaaaggattttattaaacttcaaaatgattaatatctattaggaaatttcttctttctggcacacttcagaacactttgccttgttctgttatttggccacagtcaaaagcccagataaaatcattgtatttaaaggtaatattttgtcatggtatggctacagtatattgagtctaatgaagggaaacatgaaaaaagagaaattggtactaaagcataagaccagtctctagtgaaactttaaagctataaaatttgattttgtagctttgaaatacgaacgttgatacatttcaaatatgttctttaaacttgtttcttattttaagttgataggtaagggtatggtcttttaaattttgtattctaaagcttccacatcattttagaaatatgatgggggaaagtaattggtaagtccttgactgaattatctagcactgctcaaattactttacatgtatttagccccaccatcagtctacctattaaatatgaattaataagagtttgcaaaataactccatgataaaaatctaatgattgcttataggtcttaaaatgtgttcaattttttcttgtgaatatgtttctgcaaaattatcctctcataaccgcccccctttaagttgctgtaatttcaaattgtaggagaaacgaacagtttttcagacatttcctgtagtgtaacagaaatctagacatcagaatctcctaattcagagtaattgaacactggctttggatggtcccatatgagcaagttagaaattgtggtttgtgtgttcacaaactgaaaattttgtttaaatttgcctgcacttggaaagccagaacaggtctctagttatcattagcacagaagcttcaaccatgaaagaacaaaggcacttctgattatattaatgtactgtttcatcagaaagtttaagaatgttccgttcaccatggagaaatataatttagagcactttaatttggaaggaattaaaaaaagaataacatcagtgctgcttttttctttaccccttatagagaatgctaacttttcaataaaaactgatcatagttggtgaattttactgtctacctatttagccattaatatctgtatctggtgtatataaattatagtattccctctcagtgtttaagaatcatggtgtaacatttttattttttgtgtaagcttgaacccctttgggcagtggtgaatcatcagtgtggtgctactgactcctgaataaattgtatgacatttcacttatttaaatatactgaacttacatattgtcttcagaatggtagagcagctatggctttaaggtccttcagaagttaaattcttggaaactaacaatttgatttactttcaggtcttttccaatggtcaccttggaagtgaagaatatgatgttcctccccggctttctcctcctcctccagttaccaccctcctccctagcataaagtgagttttgttgaatttggagatcacttgtctatgcatcaagatatggtagagtggttttgagargttctcagtacagacactacatgatgaatagaaagtcattgatagtaaacagccagctgtatttacaaactaaattaccataaattaagatccttccctatactttgctggtaaccacaacatctgtgagacttacctaaactcttgaggttacatagagcaacagggagagaaagctacgcattccttgcatcaaagagggtagagtagcacaatgaggtatcccttcaaatttacctcttctcctcagaggtatcccattttatctcagcttcccagtttgacatcataaaataatctttggttccaccaggtttctcatttctcacatccattcagctactaagtccttttgattattcttttggagtttttcatattcctctaatcttctccattgctctagctttgcctcagagctggacaactgaaagagccttttatctgataatctcttatgatcggagagttagtatcaatgggtttacggctagtaaaatgagataactgggtatctcatttgaaaaatggggccccagaggcacactagatatctctcattgatatcttcccaagttaaaccaggataaactggatatcccaattctaattttcctgctctttatatgaagtcaggatgtctgcctttcctccagtatattttgttcactgtaactgagttcatttaatttaacttctgccttccccaggtcaccttcccactcaaaaactagcattgtttccctttttccattaaattaactctatgcacttctgctaacagtaagatcctacagaattttacccaactaaaatatttttyagtgattcctaatacttgccctgtaattatatctggattgttttttctgactttgtgagatttttatgctgttcctcctgtgcttcaccttttcctaatctttatcctaaaggtccatatctcagactctatttctttgtgaaatgttctgtgacttcttcaattgtagtgattaagactgatttacattcctcttcctgcagtttatttcctactcatttaattatatactctgccatactgttttctaattttaatgtgactctccaattgaaaagattacaagactttgaggacaaaaactttgtgttctctatctcccataacatcttactgtatttgatatatactaagtaaatgatttgcatatagtaagtaagtacacagagaatacgtggatgcttggtttattgatttaaattttatctgctgaggtccttatttacaatagaargtcttagagcttcttcattccttcatctgcagttcactgaactcccactatacatatcaatgcaaaagaaaaataaggtagatcccagccccccagaaatttacagtctactttagaaaataacattaatgtatatgaaatcattagagaatggtgtgcactaacatttataatgctaacttagtagtttcaaatgagtttggaggagaggctgttatagactttgtgaatgaaggatgtcatggagggatgggcatttcatgactcatgaagtacaggcacaattgggaaaggcagaatrtgagaaaaaacaagggtgtgaaatttggcatcwttcaggggacrgtgggaaactcagcgaattagatcattctccagtgggaacttctcttggaactgcgagatatttagcaggcataggagttggaagcaattatacatactctgggtagtaggctctaaatcagtgacaacatatgattatattctagtgctaaatgaactctggatatatgtgyatgtaataaaacatctaagctcaattacctttgataactcagagaacattagaaaatgaaatcttgctaattagagattaaatgttcacattctgtttattaaattcatattggcaagcgagctggaagttgcaktgtgcttcatttgtatttaacattaaatacctgcttctcctgtaaatgaagcaagaataacaaattgatagtaaaatgtattttttctaatacttcagttggtaagtgcatctaaaattagtcatactttctccctatttactcttgatttttccctcagaaacagtgcaattgtttcacttaactagagaaatattttaacagtgcatgcttgccagcaaattagttttcaattttgcatgctgcaagtcagccatagttagcagtacaaatgctagcttttaatggcacagttatctctccagtttatttttgtttctgactctgtgggtagcagttgttcactgtagacaatatgcaaagtatataagagaaagaaaaaagtgagatacataagcacaagcatatgcatatgctaaatatcaatgtccagagttttaacattttgacattttttatttaaacttgtttttaccttatttagattatatggtagagataattttatgccctcctttcttaacattatcataagcatttttcttaattgtttagttatgcattgtgtttattacaaaaccagcatggaatgctgatgtgaacagtagaataaaatcagactgtgtaccacacctgactccgccattaagtatttgtcttttttttttttttttttgagatggagtctcactctgtcgcccaggctggagtgcagtggcgcgatctcggctcactgcaacctctgcctcctgggttcaagcggttctcctgcctcagcctttcaagtagctgggactatagtcgtccgccactatgcccggctaatttttttatttttagtggagacggggtttcaccatattggccaggctggtctcgaactcctgaccttgtgatccacccgcctcacactcccaaagtgctgggattacaggcgtgagccaccatgcccagcctttgtcttatttttaacaggaaaacttctctgggcctttccccatctggtagaagagaggatcartttaacttaaattatctccaaaatccttttgagattcagctttttaggttctatacagtgtgtttttttaaaggatactgatggcaaacctgacaataacagtgagtcaagagtcttggctgtggatggtcttagaacagaggtcttagcaaaatgccactcacagaaataggaatgtcggatgttcgagagttcatttccatcttagactcttggtatatgtttcaaaatcaggccaaagcaaaattacgcattcctaccaaacatacacttctgtagttcttacaaatgttgaaaactccaatgttaaatccaagaatgtcaaagctaacatttaccttacatttatactatgttgttataaatatttactgaaatagaattgttaaatatttgatattgtttactctgattcccatttacatgatgtcagaggctgctctgtcatagtgtttcctgttaaactgtatctttgcaattatttgacttttattgtgtaatttgtcttgagacctagaagagtatgaaatttacttttaaaaaacatactgttgtaaaagcaatctgaaattatttgtatctatatacttaatttttctaaattaatgtttttttctaaatggtttctgcttaacatctttgacacttagctataaatataaaattttaagtaaatcctagaaacatgggtaattatttttttggagggagaacaaaataatcctatgtggattctttttactttatagtttaaattatttatttactaaattatatttattttgaaataatttgatttttcaaaattaaaactaaatgatactctgaatagttaaggaaatatttattttacttggcacacaatagattggcaaatgaacagaggcattattacaagtaataatggagtaattacttccaggtaagataatgttctgaaatgctgaggaatatctttttttttttttaagaattttttttgtgtgtgtgccttgtcttttagagatggaccttttgtacttttgatatattaaacttaggctttcaaatagccatgaatcaatattacttggttttgcatttttgtaagaaaggtttttttgttgttggaggtggtattatctatttttatgaatatatattcttataatatatatttttctaaagagataagtccttgtatttttggttccataaacagagaatacaaatttcacctaactgtcctgttttcattcagttgctttactgactagaggttcagtttgtacaagataaaatcctttatcctctttggaatttaagctctagttagggagaagagaaagtaaacaaataactatattgtatattgtcagctagtggtaagtgctaggaggaaaaataagcagggaagaggataaataatgatagagaggtttatactttagatgaggtcattaggaaagacctctctgaaaggctaatatttgaacagaaacttgaaggaagtaagggagcaaaccatgaggttatctgtgtgaagagcacagaggctggatagaacacaagtacaaagcaacttcaaatctgtttctccgatttacaaacaagttagtgaaaatgcttataagtaaagcttatcttaaagcttgatagtataccacacagacttttttttgatgtcatgaaagacccttgaaaattagcatgtatatgataaaatttagtgttttgaggaaatgatttatatgtggcacatgtgcaaaaatcatttcaaatrtagctatattttgttttgtctcttctctggactatttatttgagttagacatttttccctgttaggattgggataatgtaatataagaaatatggtgtaatgtatagggcaagctctaaagattctattttaacagaagatattttttcgttacttgccttcagatactattaaaggaagatagattcttatatgtagaaaacaagcttactaattaagcatagcattggatactatctcctgtgctggygtgaaaattcacttstttcttggtttgtttcaagtgtgcatatgtagaagatgaatgtatttatcactgaaggctcaaataactaacacaatgaatttaataaaatgtccaggttgtggggggggtggtgactatgcatctttgagagtgtatgtccctatgtattaccagtgtattaactcagtaataacagcatcagtgcagaacactccgggaatgtaggatgagaatataaagggattgcagtaataagtgtaatggtaggctttaatgtggagtcagccaaatacaatttgttcagctttattcctctggtatcctaaaaatttcccgtaagtttagtcaatgactgaaaattgtcccatgccccataagatagaaattttttctactgccaaatgtcacatacatggatagataatgactaaatataaatctrattattttmcctgttatttagtagtaagtaaaattaaacctgttttttgaatgagtttgtagaggaaaataaaaccccacatgtaattccagatggtataattagttacatgactctagttttttattttgctattttatatacaacttctttatctcatttgtaccatcctcttctgttattttttttgatagaaaccagttttttttttcakaactggataagattaatttttaataaaaactatgtaatcttgaataaaatacactggaatgttattcttttggtttatttctaatccaaatagactattatactgatattaaacattttcattaaaaaacataagcagaaaaataaaatctgaatctttagaactttattaaaatggtgataaatggaacacctaagtatttttttcatatttagatacaaacaccacttgaaaactattttttcacttctagatataattctctaaaatctgtgtaagytgacaatttatactagtaagttttagcaataagccttattattccatgaagtattagatgagctttgcttttcacttcattctgaaataatctactgatttgtggcaaagcaaaagagtgggggaaattactcgagaaattctctatcaatgaaggtaaaatatcaaattagccacaacrtatgtgatttaaaaaatggtccattgttgactcataatgaactgcttctttggaaacttaaatctttggagggaacctgcaacaggcagatcttagaacatttctgatattgaatagttgttgaatgtttagtgaaaaatactgttttctttttacatagtgtatgcttgaattgcatagaaagggattcattataaatgaaagtatcttaggcatagagaggatgtacagtatatatttctcatttcatttggtaatagaacccattctggtccttgacttagctaaattgatggctgtgtttacaggaatttatggaaaagtaatattataagtctctcccagttccagtgccatcagatcaccattttgcagcccatatacttaacttcctttaattggaaagtaaatcctccaaagttaaaccataataggtgtaataatagattattattaaggcccttagcttgtgctgtaggtagtgacactggaccttttgtcactatgcttttgtctctgtgcttttgtctccctgtaacgctcatgtgaattctaaagttgctcaaacaacaagaatttaaagatcagtattgaaatttttttcaaagataggtatcaataaacatacacttgaaaaatcttagtttttctttgatytttgaatgtcctatctaatgacttagataatatggttgaaacttaaatctttagatttttcaaaatgccttcttgtaatggtcacaaagaaaagcccctaaaattgtttctgttctaactaataaaaagaaataaaaatgaatgttaattcaggcatgtttgtttaatataccaaaggcctcttgctccctctatagaaggtgctgcaaaattgcagtcacttagtttttttgttttttttttttccttcctttttaaatygaacagatttctcatgaggttcatgatgattaacaaaaagatttggatccatgtgtgtattcccaatgccttgcaaactagttggtcgtcctaaagtgaatcaggatgagtttgtgcatttctgccttggcatttttcattggcttcagccagggttagattaaactctggtagcaacagttacgaaaaacattgtttatgtttgcccatttgtttgggtttgttttatttggtttatttactcttatggataagtgaaatgcttaatgtttttgatattaggtgatggttttactcattttaattctcttttatttagccagggaatttaaaccataaaaataatgtacttcaaagacttaaaaataagttctctcattatctacatctaatcattccattcatttctagctctcagttgttggtaggaagaaaaacctaacaacttcaactataatttcacaggatagttaagttttacagaattaaactggatatttttccaactatagataatattcacaggagacaaaaagtttgaccattctataaagacttctttaatatataaaacaaccatgcttattattgtagcatcatattttacccatttaatttaaattggaacaaaatattaatattttaatagatttggtttgaataaatttgtacattttgtcttacaaatccaacatctttttattttattcgacaggttactagtttttcctattgtgccatttaaaattgtgaggatgaaaattcttttatcccatcaagggtcttaacaaaagattgaaaattgttttcatttgtatttgatataagaacagcttctctgatgataccctgtaattraaaaatgaacataagtgataaagtagcttctttgacttgaatatgtcacatcagacttgcctgttttgaatattatgcttaaactagattggattttttttcccctggtaggtgtactggtccrttagcaaattctctttcagagaaaacaagagacccagtagaggaagatgatgatgaatacaagattccttcatcccaccctgtttccctgaattcacaaccatctcattgtcataatgtaaaacctcctgttcggtaagagtatgggcagatttttgccacttacatctgcataagcattatcatttgtaatgtttgtttttaaacaattgattcacgtctaattaaaaatccttaatttccagctcaaatccttctcttcctattrtaccatttccagcattacttttaaagaaaactaaaagatgcagatttctcattaatcaggaagtcactttattttatcagttctaaacacctatctcatgaagaaaaattagtgctcagaaactaaggtattattctgaccttccttagaatttttcttcatgatgtacatactagtataatttaaattcattttccttcttgatgtacttgctacctacttctattcagattttgaagaagtgggaaaaaaataccaaggtgtttctcttaactttttgtttttctatcaagtgctatttaccttcctttagatcaaataagaatgtgaggaataggccaggcgyggtggctcacgcctgtaatcctagcactttgggaggctgaggcgggcagatcatgaggtcaggagtttgaaaccagcctgaccaacatggtgaaaccctgtctctactaaaaatacaaaaatgagccgggtgtggtggtgggcgcctgtaatcccagctactcaggaggctgaggcaggagaatcgcttgaacccgggaggcggaggttgcagtgagccgagattgtgccactgcactccagcctgggtgacagagcgagacaccatctcaaaaaaaaaaaaagaatgtgtggaataatgggggttttttccttacttttgtggcttattctcacttacatggggatagccttggtctttgacttggaagctccatcgaggtaaataagagttattaataatgggttgtttgtattgaaatattactttatctttaagtaaaggcatgagtctgcatttatattattgaatttataaactgaaatctattatttctgggtttgtttgttttacctgactgaaatatatgaggtactcagtactcccagctacaaaayttactttctgagttctggtttcctttgtataacattcctggggccatgcttggcacatagaatagggctcaagtactgctggtggccctacattccagcatctctccatgactgactragggataggggagatggcaattacttcagtcatctgtgccatctttacttagtgtgccatttccttttgaggtcaagtcaatcaactgaaaacattttataagtacagtgttcccttcttttccaatgaaaaactaaaaaatgttttaatgtgtttcttcaggcatctcactgaggtaggaaatgcagcacttggaaagagaagcacattttcattttaagcagatgtctgtcttaataagtgaccctggttagaattatcaacaytctgctgaattattacccagaattgttaatagtctacagcgcaggactttatttttttaaaagcaagaacctaaacactccttgctattgctggtgtttagataagacatctgttgataaaatcatatcattgagaagacaaagaaataacgaggagctaattttatgtatcagaagaaccaagtagctagtgatgtatttgagaacaaaagatattccttctcatcaaatataagttgttacaattttyggttctttggctcttacaaatgtgcagtaatttttaaaaactaaagtaggatgagctttttttggtctctttgggagtcttattttttttcattgctggataagtgaggagtataattttaatacgttaaattttaattgttacatcatattggatgtgattttttgtggcagagctcccaaatcttgaaaataaatttgaattataaccatcattaccatttttctattgttacagaaaagtaataaacgttgataatccctaaatgtaattggagtgaattctttatctaatttgttcttgaaagctgatggatgaagtatcttcttttgtgctctccaaagagctctttaagcttaacactttctttccctgtgtgtatttttccccctttggaacatcaggagaagtgaattgtcaatatgtagaaaaagtgacccagtaaatgagtaattcaatttaatttcagtaaaaatccatcattattatgaagattcaatacatrataactatttttaaatgaactatatctggccccttaaagagaagtggccaccagagagaatagaaatgaatttcagatgaagcattcttgcattatctattcaaatatccaccrtctcttccattacatacgcacttttactttgctctaaaaattcagagtaaatcagagaaaagtaaaatgtaaactctgatttctatagctctttgtcagttgattgttatagagctatatgctgaaggcaaaatatgctccttatcttctcttcctgctgctatcttcccatggctcaattttaaccattgtgttcatagtatgattccgaagaattaataccaataatttggctgggttcggtggctcatgcctgttatcccagcactttgggagggtgaggtaggcagatcacttgcggccaggagtttgagaccagcctgggcaacatggcaaaaccctactaaaaaataaaaaaaattggctgggcrtggtggtgcacgcttgtaatcccagctacttgggaggctaaggcatgggaattgcttgaacctggtaggcggaggttgcggtgagccaagatcatgccacwgcactccagcctttgcaacacacagatacacacacaacaaaacaaaaaaagccccaacaactcaagcatacttttctggtaagtagtaccctttacaaacacattaaaaactgtacttgtcgtgtacccaaggcctttgctaaagtcattttctgtagtgtcagagggccagaattttgttcttggcagtggtgaaatagtaccacaggctctagttctttgaatgttcctgtcagaattgtaatggaattattgaaagttcaataatttttcttcttttatgtgctgtagcttatttttattacaaggaaattttaagttacagaagcaaaaatatgatattaaatactatcaacaaataataaagtcattgagactgctatatgtttttgccttggcacatacatctttttttacttcaaaaacttgaccaggttctattgaattcttccacagagataagttaattttacatagtgtttaggatatcaacaatttttgtggcccttgtaattcttggttatagtttaaaaaaagagagactgtgttacttgagatayttacttctacattttaaaataagggatgagtatcttgatgttattactggtaattttgagaaaagaaaaatatatgttcaaactttattaaataaacaggaatactagttccctctacctctcaagttacttttaattggaaagtattctccttatataattttactctgaactgtcctttaggtcttgtgataatggtcactgtatgctgaatggaacacatggtccatcttcagagaagaaatcaaacatccctgacttaagcatatatttaaagggtacgtatagaatataatttcctttgtgatgtacatcttaatggtcagaatttaaaggcaaaatttcatgccattgtactgaaaatacattaaggttttgtgttatcctctaggagatgtttttgattcagcctctgatcccgtgccattaccacctgccaggcctccaactygggacaatccaaagcatggttcttcactcaacaggacgccctctgattatgatcttctcatccctccattaggttgaaacctttaaaaaagttttgaacaacccacccctccttcttttaatttcagaattttcagaattcagagttcagtataacacagactcactgggttgtgaatttgcctgaaatttgaatgggttctccaggtgccggtgactcccaagttcacgagaccattactccatgtagatgattaaggtagtagtgtagtagttgggcatcagtcaggttttaagcaagttgttttgtccatactaaatgtagtctaaaaacacatgagagctttgtgctctagtagttttgaagtgatgacttgaagtgttgagattttctttaagtataataattcttaataaatatgaacttgcttttcttgcagcatgagcaccagttccacttacgctaattaaattatgcaaaattaaatagttgtatgtagagaactgataataaattctgttttattctaatcattacaactgtaacacattcaaaaaaatctcaatttccttgtttcaaattataataatgaagaaacatcctatgtgtatttttgtttgtatccacaggtgaaggtatatgtaggtgtgtgtatatgttgaagttggctggtgccactstcactgttaatttcattaattctaattaggaagcatctcaccctgtttttagaagacagaatgtctgcacaccttacataacgcttcacaataacaagtcactgtaacataaaataatatatgatgaaagtcaatttacaagcttttctgaactggctgttaggccaccagaaatacgaaatgaacctttccattttctcacaagtaccactgactagtattttgaatgacacaattgyagtatcttttgctcctgttctctctgtagttcaggactttattctcacctacatcaattacaaaaggctcctaactctgttacctacagtctttctctcccttccacttcttcctgcacacttgtttttgacatattacccagatcttcatcacctggataagcattgttcaataaagctttctgtggtgatgtaaaggatctgtatatttgcatatgggttaagtgtgattatggaactgacttttcattaaatttaaatagctaaatgtggatgggtgactactttatatgacaaagtagacagattttccaacctgtctttttaccttgacctttttctaggtcttcttatgcgtgtcatttttttcttcatactgtttactctacttagacgatcctgtccttgcatttgatgaataaatttttgagccttctgatatcccaggacttcctgttcttcaacacttcactgaataccacttgtctacatttctctttcctcatccaatgcatatgtctcttttatgggaccaataaaacactttcacttgtaaatcatacctatttgtgagcttttttttaagctcctttcatggaatctcagctccttgagtcagagccttataattttgattttcatatcatgcatgagcctggcccagtgtcagatgtttaagggctgaaaaaagatttgaataaatatgataatgtaggaaatagctgaaggttaaaatgatagcaaaactctgtctygtgcatcttcagatgtgttaataagaaaaatatgattaaagaaattagtgtgccaattttttctaaagcaagttcagtaaatagtaatatcttttttttttttgagacagtctttctctgtcaccaggctggagtgcaatggcacgatcgtggctcactgcagcctcygcctcctgggttcaagcgattcccctgcctcagcctcccgagtagccgggattacagtcacgtaccaccatgcccggctaattttttgtattttagcagacatggggtttcaccatgttggccaggatggtctagatctcctgacctcatgatccacccaccttggcctcccaaaatgctgggattacagacatgagccaccacgtcaagcctcatttttctttaaatatgccattatgtttaaatcattcaacttaaaagtgtgaatttttattattagaatatgtgtttatgtataccctgtctcattcctaaagtattttgagatagcttaccaaacatgtgctttttttttttttttttttttttttwaagactcaaggtaatgaaaactatgagtagaatagtaaggtgtgacaggggacaaataagtagatataaaactatgctgcaatattytagttattaaagctgggaaatatgcaaatgtaagtagtgcttggarccagagaaggttctatatttagctgttcttctgtagctaaatctgacaaattgaaaaatatcatattctctgctctaggtacattttatgtatattttgacagcatatcaaatatatgaaacattaggttaaataaattaaaatccagtggaataaactatatgggataatctaaactattctttgacattaaattatatgtatttgaggtgattttccagttaaaggctgtgaactctttttgctacacagaaaatcctgttttcatagtgtgactgataataatttttagttcaaactctgagtcctaatattataaaggttacaagtgaactatgagctgtttcataagttacaatgctgctttttataaaaaggcctgatagaaaaagtttgcatgggtgtgtttgtacgtatgtatgtatgtatatgtgtgcatgtgtgtgtttctctccagactctcccacaaaataattagatcccattatcaaagttggtgaactgctggataaaccctgcgagtgaaattctttataagcagcaagagaaaatcarttattacttttgttagatgctgtgtattttgattaatgaagttctrctgctgatatcgacctttctttaaatgcaggtgaagatgcttttgatgccctccctccatctctcccacctcccccacctcctgcaaggcatagtctcattgaacattcaaaacctcctggctccagtagccggccatcctcaggacaggatcyttttcttcttccttcaggtaggagggaaaagccaaagaaaactattcacttaaagcaaaaatatttccaaaaccatactatcaaataaatgttagtgattcattagtctctacctccctagcagaacagaaaaatccctgggtggtaaaagtagcaatcgtgggtacgtttgtttgtcagttgattggtttaatgccaacataattacagagatggaaagagcaataaggaactacagtagaaatgatgctgtagagattgtccagtccagaaacctccttatgttacaaatgcaaccctgagaaccagaactgctaaggggttaggctaatagtaatgggaacaatatttagactttgtcttccgattcccaatgcaatgttttttaataggtttttaaaattttactagatatgccttagtgtcataattttgttcaaaacataagattttggtaaattatgttgttataacaagaatagagaagtttttctgaaatagctgcattttattgttttgttgtgatatttttaatgcctcagtgtgtatctactcactaattattggtattctaaggaaaactaattttttcttagtaactatttaatattattatttacatatgtatatattatataatattatttgtttaatattagtaaactaattttttatattagtatattttaaaatttcaaaagaggatctgaaataaaaatgaagacttaataaactrtctgttgcattagttagaattatcaggaaaaagaaaaaaaaatgttatatggaatctgctgatactaattaacagttccagtctgtcttgttagtgatactgtgccctgaaacctttgcctccttggacttgatttgggaaaatacagggtaaagatgttctttttttcatagttccttacatttctacatgagataaatcatgaaaatctttaaaaagtgctcagtttgtcctttagctacgtatatgcctcatggaaacttgagaatctttattcccaactgattcccttatcagcttcctcagttgattattagtcatgtctaccattagtttttcttagttttttttttttttttttacttggtttgatagtttagaaagtttgaagagatttgataagacacacaagttatggacgtacaacttggaatacacagcttcaatttcttaaagtggtttatttttcaagaataatcttctgcttttacatcagtaaatattgattgagccattcactgtttacccatttgtgatagatgcctcctgacctgtggaaccttatgagtttactggattctgccaatgaaagcactagtgtcataatccattccggtccaagcaggaagtatagtgtatgagtccgttttcacactgccataaaagcactacccaagactaggtaatttgtaaagaaaaggggtttcattgcttcacagttctgcatgcctggggaggcctcagaaaacatacaatcatggcagaggtgaaggggaaccagggcatgtcttacatggcagcaggtgccagagagagtgagcaagcagggaaaatgccagacatttatcaaaaaccagatctcatgagcactcactatcatgagaacagcatgggggaaccacccccatgatccagtcatctcccatcagttccctccctaacacgtggggattacaactcaaaatgaaatttgagtggggacacagagccaaaccatatcataactgcttgggcttttattcatatagttagttacatgtaaacactgctgtatttcgctattttttttcacttattcaaaactttgtcttatacatagactttaacatgatttttagaacaatgagtcattccaaatcttagttacttaaatttcctgatgctaagttcaagatagtttctggctctcctattaccttttatatgcgtaacttaagccccaatagatggaactttgatgatgtggcttttctgacaaataaagtcaagctttccaagagctataataaaagagaacattttacacaaatacacacttttacctgtttttgtcaaaagaattgtaaaaggttttagttatttattttatcttaattgttcatttccttttatataaaatcttcataaagaaacccctcaagattaattgctaaaaaaaattactagtttaaaatgaaaatgtcccctcttattagctaaaatgcaatttttataaaccgttgtatttattttatagatttgcctgttttgtgtttgcttggctgccagggagctcaacaacacttatccttaacttagagtgtcaggctagcatgggagtcagggcaatgtttttcaagcctgttgactctctcttgactttcattaatagatggacatattctaattctcttcccaataatatcaacatcccttataataagtatttcttaaaaaaaaaaaaaggcaacttttttgtttccttttccagtctttcataatcatttacatgacagatttctagtctggtaccagatcctttatgactttttttttttttttttttttgagacagggtctcactctgttgcccaggctggagtacagtggtgcgatctcagttcactgcaacctctgcctccaaggttcaagtgattctcctgcctctaccccctaagtagctgggattacaggtgtgcaccactacactcggctaattttttatatttttagtagagatggggttttgccatgttggccaggctggtctcgaactcctggccttatgtgatccccctgcttcaacctcccaaaatgctagaattgcaggcgtgaaccactgcacccagcccctttatgactttcattgtgacaattattttgattcaaatttaaaaccgtgtgtattagctttcctccttttcaaaagaaatattttaatattttaatgctattgcatatcatagagcataaagatttttttggctgataaatgagcatttgagtattgttttgcaaagtatttaatacattatactgtctaaagaaatgtaaaagattcattatagcagttctccctaagaattgactttattaagaatatgctataaatgctaaagtttaactcagtagttttagaattataaaaggtaaataaaagggactgcaaaatttaaacaaactctgtgagcattttaccgttgttttcgttgttcagtctgtaaaatcttagtctggtgtaatgatacatcttttctaaacattattgagatttggtttcctgaggaaataattatttctaattaaagacaaatgataggtgtcttaggaagagaggttgaattttctcatgatattatactaagtacctaatcaagcctacatttttattccagcattcagtgccctgcacagttgggccaggttcagcttttcagccttatagctcattgacttctatatagtagtgattgtcaaattgcagtgtcctatgtctctgcaaaagtgcctcagtactgttgtaggatcaagggggcagggcaagcagaggcagggctctcattcttcttttatctcttttctattttaggccttcatgtaagatttcttttggcagaatagtaatgcctacagctgtacatgagccctcagttttggacaggccaatcatatcttaacaaaacctgaagtccccaacaaaagctttacactcttttgtctccaatcccaaggctaccactagtgtatatgtgcttttttccatattacaaaaaagtacttcctttttgctggtagattgaagtagacacccctacctctactttgtgccaggtcagggctcaagaaacaaagcaaagactgtatttaagtcctgctcataaccataactaggtgtctttgtgcagtgcacaaaatacagtgtttttgtcagtctttatgctacctttattttgctgtttctstaacctgtaatctcacttgaagatcttatctaatcttaaagtcacagttcaactctgaaagctagccaaattgactttattaaagataaatggaagttttattcttggatccagaaatgcaactgcataagtaaaatatgaagaaaatccagatcattagcaacaattgttgaaaaggttttaggggttttgttgactacaatctttataaagcatcatcatgatgagaaagcgcatgccatttggggcttgaactcacagaattcaaatctgaggagtgaagtcctccacagtactcagcctttgtggagaccactgtgttcagatgttgaagcattaatgggctagagcagcaattctcaaattgtgttctccggattcacaacattagcatctcctggggatttgctttaaaatgaaaattcaagacttaataaatcagaaaccctgggaatgggactcagtggtcacaagccttcctggtgattctgatgcatgttcaagtttgaaatatactgggctggggtattctcaaaaaagtgcaaccaggatgataaagtaaactagagtggattaaaggaactgagaattggctcagagaagagaagaccttggatgtagacgagagttgtcttcagttacagtatttgggaaagaaggattatattttttccatgtcacttcagaaggtaggagtaagatcaatgggaaatgttaagaatgaaaattgcattcatcctacaaagaagtttcctaaatcattacgaattgttctaccttgagtgtagtgagttatctgacactggaggatttaaaccaatggtagatcattacatagtagagatatgaacatgagctaaagcatgagggcagcaaagaggggagaactttgtttcacctaaatggctcttcaaaccttttttagcattagtttctgctttgrtatactctattaaaatttgggggataattgataaatcttccaggtggtttatggayggccagggaggaaatttgccattgttttaattatttaattttatttgcctctgtttttacacttggtaaaaatttggaagtgtttcagatagtgaagaaaaaaaagaattaagaaaaacattccaggccaggtacaggctcatgcctgtaatcccagcactttgggaggctgaggcaggcatattkcttgagctcaggaatttgacaccagcctggccaacatggtgaaactccagctctacaaaaatacaaaaattagccgggtgttggtggctcgcgcctgtagtctcagctacttgggaggccaaggcaagagaatggcttgtgcccgggaggcagaggttgcagtgagtcaagattgaaccactccactccagcctgggtgacagaacaagacgctctctcaaaaaaaaaaaaaaaaaaatccatacttcctcctcctaatcattgataggtatccttcctttttttttgttgtttttttgtttagttttgttttgttttttgcctacgagtatgtaagttcacatttatgtaaaatttatttctcatagtatatgctatttataaccattttccagttaatatgtcatgagcaatgtatatagttgttaaatatttgtacacaatataatttttattgatgtatatttcctcatttcttttttaagtagcaaaccatttcctcccagtcttcccttagttttttataatctctcaaataagtactaaattttcagttttgcagtgctgtactataaatcacaggcagtagtactttgctttttacaacagattagtctctgtatgtgtatccatttatttctcaaacacttatataagtgataaattggctgtgatcatttcagtttgttttaatcctgtggwtataatatttttctttagtttttgaagaatttattttagaaaagctttattactttacaaagttttcttatcaggggacaattggtaattattatactctgtgtagcaattgtgttatatctaatctctttccctttaaagcctgaatgcttccaactttataatttgctttagagagcccagtttaccctatggctgacaaatagcaaacttaggatatgatgcaagatagaacatgataatgattcaaaacagaaccataagcaggtatttttgctatttataataatattttgagtgtatctagtaccttttaaataatatagtttaatggaagaatatagtacagtggtatattttatagtctatgtatggctctgaagtgtatccagagtttactttttaaccttaaataaatagatgattagaaatagcattaagtgtatttgacaaacctataaatttcccgtaaagaaataagcaagtgtatgtattgtaaaagacagtctttcctctgacttaatgttgtatcaggggcatttagagtctacaagaacctaaagtaaattttatgaaatatctagtgcaaaatctttgggaaatttcaaaatttatgctgaaatcaccatatttgtttcctttggtttctctaacaaaccaaaagatcaacattgtctcatgcgatttatcttctcattccttcctaaaaatatttctggaaaattaatggagctggaccaccaattcttcaaatattgaaaactcaaaatctaagagttattttaatcttgaaattaatgaaaacaagttaaagagccttgtctaagtcaaaaagtcctcagcaaagctggtgataattattatactccaaaaaaggtgaaaagataatggcttcaaatcctgccttacattatccagtcaaaaactaatataaaaatagtcaatatttaagcctatgttttcatcgtaagtaatcaaatacttacatattattaatgtctaagggagtggaagttaaaacaatgaaattcaatcgggtcttctttaatatttacaatttttgctttacattagcaattcaggtttcactgattttaaaattgtgaacaatctgaatttgtgtggatttatttgtggtagttaaaagtaaatattaagtgcaagctatttgccaagagtgttctaggtgctatgtttgatttaggaggtataattcaaacatgagaagtaggaaaagatccctcagatccctgtcctcagaagaattgacggtactttcagagatatcgacaacataaaagtactatgagaggaaagcagcggtgcctgaggtgggagtgatagctagataaattattagtgaaccaaggttttcagatgtaatgtttgtctactcaaaaagggaatcaattctctaagaatttaaacccatataatactatgaatgttaaaccagttgggtttatggtattaatgatttaatacagcaacactgacaaaatctctttttctccctttagttccagttagtaaatatcatattttttactatttcagatgccccgtctctgactgccaaggtggtaaattatcacattttactgtatattcaaatgttaattactaaatggcataattttaacaattaaatttactattttgtgagccaactaacaacaatgatgttaagcataggatgcccaatataataataagcaccttgtatgtacagaagattttacatgcacaaattcatttaatccacacaaatccgaagtttcaggtctgttttacaaattttgtatgcccaatgcttagagagatcaagtaatttgataatactcttatagggaggatccaaacccatggttttatgtatatttgtttgtttgttttttgcttttactttagaacagtttctatacattgtacaggttggattgggacagaaaataaaatttagaagctgtttttattgtcaacaatcttataattaaatatatctgcaaaatataaatataaaacaagtagtctttattatctggaaataaatgtgaagagcatatttaagcaagtgatgaataaattagaaaatatgcaggcagtaaaaaatggttaatatcagtcatgaatttaattttctaatttatttttgaaagccataatcttcataaaataattctagaatttttttcttcagccaatcaacagagatcatccttttaatttgaaacttgtttttatttttaagatccctttgttgatctagcaagtggccaagttcctttgcctccygctagaaggttaccaggtgaaaatgtcaaaactracagaacatcacaggactatgatcagcttccttcatgttcaggtgagttggctagtaacagtaacaataataccttattgttatatagtgctttttgcttttcagaacaccttcttattcattatataatttaatgaatgttgtccacccaagaaagtattttgatcatcattgcattttgcttataaagctggcattgtgagaggaatggctacagaactgcctcattgaaaagaaaaatattaagcttaatattatctttgatcactcagtggagccacttctttgattcaaaatgtattcattatctaactttcattttgtctcagatttaggaaatgaggaaaatctctttgtacattgcaatgctgttttatagcaatctctatggaattaatactggcaccaaactattcattttcttagcttatttagggctccaaccagtgctgcactgacagccatcaaatagaaggatgtaccatttttgtaaatacaagtcatactcacaacygttaataatggaatrctgcttctttgcttcttgaggaggctttccctgaacatatctaaatagctcctatcttctgcagttattttctttccttttttgctttatttttcttcatagcacccgtcactacttaaaattttgttattcagaattcatttggttgattgttggttatctgtctcgtctgctaaagtattaacactttggagataagaatgttgtctggttcactgcttgtcctagtcagttcaggctactataacacaataccatagactggattgcctaaacagcaaacatttatatctcacagttctggaagctgggaagtccaagatcaagctaccaacattcagtgtctagtgagggccctcttccaggttcatagataactgccttcatactgtgtcctcacaagggcaagggagtgctctgggatctgtttcataaggaaactaatccctttcatgagggcttcccctgcataatctaatcatctcccaaaagcctcccctccaaatatcattacaaaagggattaggttttaacatatggatttgcagggaaaaggggacagacattcagtccatagcattgctttatcctcaagtgtccaacatagtgcccagcatatgtctctttgatggatagttggggatggatggatggatggatggatggatggatggatggatttgagtggacaaataggcaaaaggagggaagaatagctgatgtctgtattaaactaaatgcaaatatctgataagcaatatttttgtcacatatttgtgaatatcagaagttttcctatatgaacttttgtcttatttcaaaatttttttaagctaaaacctcagttcatagaagacttgctaatactattagcaatacattctgaaacttctgaatcaagataattaatgagctgttttaagaattgtcagtacggtagttcttacgtgctcgatgccatgcatgggagatgcagaaatccctgtgtatttatatgtttaactgcttgcatgtaactcaggaaagcatagaaaatctttttaatcttttcaaattttggccagtgttctcttatcagtttatttctagtcattctaaggtttcatatgtatccatgagtagcctgtaattccagtcaaaataatttgatgacaaaacatgaaagtcaagaaagaaagacaatatctgacagcttctatataacataaggaagcaattttttttaaagaaaatagtattaaaatataactttgagcaaagtgctatgactgatttaaaataacatattcagtaccaccagctctggattaaaagaaacctatactttagttaggggaaaacttgtagccaaaacacagtkttttcmcagcttctttacagttttctccataataagtgggtgttgtagagcccagaggaacatcattcacatatatgatttcaagcagtatgaatccctattagcattacactagaaatgtctggaagaacttcaaatcacaaaccttgttgaaatatccccgaatagccatttgccagaagcctgaactggcttttacctaagtaataaaagagtcctgactattactctgagggcccagctagctgtaacatcaaatatttcaatctactccctaaattctctttacaaacacagtcaaccacagaaaataagatacttttttccaacatatgtttgttcacatgaagttcacaggcctaccaggctgttcactagtttattttacatcagcagagagactgagcttgccttctagatgaggtctttccattcaacccttgagactgaatgcatatgcgcctttaggattctaatagctcttattttgcagtaattaatctgtttttattaaggcctttttaagatgaccaaatggggttctggtatgattgctctgccttatgaattcaagttctgttatcacttatggctgtctaaataattgatagtcatttatgaataggcttctatggaaagtatatttctaaagaagtttaaaatgtagtttcattgattttaaaatatctcccttgttttcttatctaaaaagtatgtctgcatgtatatgtatgtctacatatataaagagccttctaaatgtttattcctcccaaagaaaatattttatgcttttcttaaagtttttctaaatgtataattgaaatttaaatatatgaacgtatcataggtagtccagatataagaagagcttaccagcccatgttaaattcacatatatcggtatataggacaaacatttttgctagtaatctgcttgtttctttacatggatgtattattcacatggggcacatgtctcttctatctatgtgtgaggttttacaaatttctcagtttgcttttctcttgttgtaagacatattgtactacagtttgaataccattctttgaaaactctaaaaggctgtattaatgaagtgcaccattcactcttgaggtgatttttcatattgttagtatttagaaggaagttcaaggtaacacttgaaaacaatgcttgattttagcacaactcaaatgtgtttgaaaccattaaaagaccttattgccaaataagccaatctcattataaaataaaggagatctcattacaaaatgaattaatttcaatactaccattagtttactagcttaaaggagaattgttggaatgttgaatacattttatattaggaccaagtattcaatagtttatctctgttaagatctcaattggaaatcgtggcttcacttcacgcaagggttggaattttaaggtagattatgtgtctttaagattttgtgtttcaacaaaggaaatggcaatgttgagttttcccacagtttagctatgtgaaatactggggcttacagacagcttcagtttgaaagccagagaacctagagttgttttccttacaaatctaagattaaataaccattttctggatatatttaaaacagtgtatgtgaagatttttttatttgtaatttagtttattaaatcatgtccttctataggcagtatttctttttttttgagatggagtctcgctctgtcgcccaggctggagtgcagtggcgtgatctcagctcccagcaatttccacctcccaggttcaagtagttctcatgcctcagcttcccgagtagctgggattacaggcatccaccatcatgcccggctaatttttgtatttttagtagagatggggtttcaccatgttggccaggctggtctcgaactcctgaccttgtgatctgcccacctcagcctcctaaagtgctgggattacaggcttgagccactgcgcgtggccagcagtatttctatagaggcagtaattcaaccttatggcataaaaatgaatcccagaattaattgatccaacttctagtagaataacaaagttamtcataatgtgtttgagatttcttttattccttgatcaattaagtgtatttatatttttttctaattctgttattgttatagttgagaaggtcagtagtctaagagttttgatatctgtcccaagaattgtcactggtttactaagtaaatttagacagtatgtttcagataatatatacaatattattttatctaattaaaattcgttaagtttgttaagcatttactatagtcctgatgctttgctaagtattttagagacagatatataattttttttttttttgagacgagtctcactctgttgcccaggctagagtgcagtggcacgatcttggctcactgcaacctccacctcctgggtttaagcagttctgcctcagcctcctgagtagctgggactacaggcgcccaccaccatgcccagctaatttttacatttttagtagagacggggtttcaccatattggccaggctgatctcaaactcttgaccttgtgatccgcccacctcggcctcccaaagtgctgggattacaggcatgagtcaccacgcccagccagatacagatatataaattttatataagttaatattatatataattgtatttatatagttatgcagtaaaatataaatattcatgttattttatttaataatgtatattttatattatctgtttataattatacatttatatatttgatattgttatacaaatatrtggttatataatatggtatagatataaatataaatttatttttactgtgtaatatagaaatagatataattttatttctcctaaccactctgaaatatatatatgtgtgtgtgtgtgtatatatatgtgtgtgtgtgtgtatatatatatatatatatatatatatatatatatttatttatttatttttttggagacagagtctcgctctgtcacccagcaggctggagtgcagtggtgcaatcttgtctcactgcaacctccacgttccgggttcaagcaattctcctgtttcagcctcccaagtagctgggactataggcagtttttatatttttagtatagacagggtttcaccatattggtcaggctggtcttgaattcctgacctcaggtgatccacctgcctcagcctctcaaactgctaggattataggcgtgagccactgcgcctggcctgaaatagataytattaatgtcaatttatagaagaaagaaagacataacaaagtttagtaactaactcaagctgctgcagaaagtgtaagcctgatagaatttacatcagtttcagttttttaaaaatttgttaataaagtttatgttgttatcccatcatcatgccagaattaagttagaaaaaaatgtacacatgcatctcacgtctccagactgagtttggagatgttcagtggtaaaatcatgataatagtgatggaatagtagtgatgacaaaataatgaagggttttagaaatagtaaaactgtactagaaatttcaaaatctagattctgattatttttcacatgaccttaggaaagccactcactatgtacttcctatatttttcacatgagcgaaatcgatctctggttctcagtcttagatacttgtgcagctgaggcctttaagagtatcagaggagatctgagactattttgttgttggtggtggtttttctaattatgcgcatattatacacgcattggaaaataaaaggaaattacagagaaaacaattaataagaaaaagcaatcacttaaaaccctatcttcaataaggaacattattgccattttcaagtgcagccttctaaatgttttgtctatgcacattttcacttacgatcttaagatcatactcaatatgtcaattctatctcagttccatttaggagtattataagtattttaccacattattttaaaaaataaatgtcattttaaattattgtatgacaatccattatttttatgtactatcaaatactatttttaacattttgaaagtctaacagaaaccctaactttatatactagaaaactttcacattaaatccctttgctgtgacctagatatacagaagctcagtgttatatttattgttgaacatgatccagtataatagaaaatgggaaaatgtattcatcaatacaatagcatttgcttattagacacatctttcagaatatagaaaaagaaaacccaacccaatctttagatgatgaggggagtaataaagactttttgtggcaaaataattgacagccactgaaatgaaatatcctcagttctttaaatggaggttatgtagatatacagcagtgcgtctcacttaaaaaaaaaaaatatggtctgcctacgggccttttggacacttttttttttttttttcctaataagctttctgtccccagcaataatgaaagtttaaactacagatgtgcttagtagacatagagatagaggtatatctctatgtaccatggctctttggaaggccacaaaccattttaccatctaaaattgttttctttcatcccacaagaaccaatgattgcccccgtctagaatgtatgacctagagtaatcattctgggtattattccaaccatgttaggctaattcccatgcaatccaggaatgttctgtttgtcactctgttggaggctgaaagaatgagggtcgtgatcaactcactataccactggaggctatatgagtgaacagcaaactgttctcataaaagcagaatgttgacaaactgacaaactgcatctgctgcccaggaggaatgctgagggcagtcacgacccaggcacaagtgttkcttttgattaggcacatctgaagcctgttaacaataatgtgaacctgtgatcagtcaagcagctgaccaatcgttacctcctcatccstgctctttctacccaataaatacaaagggctatggaagctcagggctgctgcctttgctcacttcttcttcctcagaccctttccttaaaacagtttcttttgttttttgttatcatttctaggttcttcccttagttcagtcttgtaatgatggtctcaggtagtaacagaagtaactgttgtaatgactgtctcaaatagtaacagcagtaactgtgatagtgaaggtctcaagtagtaacagcagtaactgtgatagtgaaggtctcaagtagtaacagcagtaactgtgatagtgaaggtctcaagtagtaacagcagtaactgtgatagtgaaggtctcaggtagtaacagcagtaactgtcatagtgaaggtctcaggtagtaacagcagtaactgtgatagtgaaggtctcaggtagtaacagtagtaactctcgtagtgacggtctcaagtagtaacagcagtaactgttgtagtgaaggtctcaagtagtaacagtagtaactctcctaatgacagtctcaagtggtaacagtattatagtaactgtagtattgatggtctcaagtagtagcagtggcggtcggccacatcactctsttcttttatatgctcagaaaaggaaagctgaatcaaaatttactcctaaaccagggcttctcaaatctttctttctcaaagaagagttgacagtgaacaacacaagggctgggacattaggtaaaagaggacaatatttagttttttagtgcaagacattgtttctattttgtctcaaaaatttgtgcaaactttatattttactccttagtgtatctgtattcatttcagtgctttaaaatattaatgaccttatatcttttaagaaaattggtaacccagaagatgtactatttatattctgtggctcacattcttgtacttattttgataycactgcaattactcataagagttcaaaaataccatgaacatggatggtagcactagagcaaacacatgcttttccaaaataactatttttaaggatgatgtatattcaggtacagaaattccacagggttgataaaatttatagttatttcagtgtgctcccaaactgcaatataataatcttaggggaccagaagatagtttcatcttcatttcattgcttccttccactaccctacacattcgaaagtgctaaagtaaatgaggacctggtgtaatccacttttaggtactgtgaaaaagaaaagtggagaaagtgaaggctgcgtctgggctttgggaagagacagaaagagtaatcggttctaagcaatttgctctaatggtcagtgtggaaatgatctcctcctccccactttttaacagcttccactagtagttcaggttgcaccagatcttgctttttaatattctgctagaaggctttctgtagaatcagatactcacaacaaattttgtgttctttgttctttcacacttctctggcattcctgttatagtaattgctggtttatagcatttgagtatagcacttatcattataaatattaattcattgttctttctttttaatggtctcctcagtccatatactgtatattacattaattgttatactacctggttgaaagggataaataatacctctaaacacagatatataaagtagatttggagaatgagaattgtgaaagtaaattgcttagcccaagatcttagcggccaaactgagatttaagattcaattgccagttataccatttattagaggcattcgtcatagtattcatcccacttgtatacacagctgttcttttcaaacatgcctggcattcatgtgcacatctcagtatcctggacagacaaaataacaatattaaaaatctcttagaaaattacccgtagaaaacaagttaattgttttctaagtctaggtacttttgtatcaaagtctaggtacttttctcatctaaaagtgtctcagaacagacatgatttaaatgtatgaattttttggtaattgattaaaggaaagctttcaataatttctaatagttttgaaaatgattaaaagcaaaacataatttattgtccattcctgtatgacataatgaaaataataggaaaataaatggaactacaaaacatactaagaaacgcagtttatcagacgataatagtttgagatgtttaattacagatgcaagaaacagtacagatattagcaagaaccagaaattatatgttcttatatatgggcatactttaatatacattgtctacagctataatattttctaaaactggacattttgttacaaaaaaggaataatttaaaataagactgtcatcatggccggacgtggtggctcacgcctgtaattttagcattttgggaggccaagatggaaggattgcctgaggacaggagttcgagaccagcctggtcaacataatgagacttcatctcatttaaaaaaaaaaaaaaaagaagaagacatcctatttgatgtggaaacaaatgcttttatcctagaggctttgttttatgtatgttatattgatattgctataattgtatataggatgatgtttttacaagttatccttctcctggaaaaatatcatacatcttttgatttagaaaggaaaaatattgaataatacatcagattagcttttattatttacgtttattattattgaaaatatcagcttacagtatctcctgaagccattgggaaagttgctgaggcagcaggagtggggagacaagatgggaacattaagcatgagacgtttggcttttaacctcacatcaccattcacttaactctgtccttgaatttattgtttggcatttgtcagtggtctgagagaaaggtattaaatattgttgtctagatagtcttaaatccataagtgtatttcatgacataaagatgacattttaaaatgtatatatgggccaggtgcggtggctcactcctgtaatcccagcactttgggaggccaaggtgggtggatcacttgaggtcaggagttcaagaccagcctgatcaacatggtgaaaccctgtctccactgggaaaaaaaaaaaaaattagccaggcatggtggtgcacgcctgtaatcccagctacttgggaagctgaggcggtagtagaattgcttgaactcgggaggtggaggttgcagtgagctgagactacgccattgcactccagcctgggcaacaagagtaaaactccatctcatgtataygtatagtgtgtgtatgtgtgtattttttgtctaggcttttgagataaagtgctatacataaccaggaaatacatgatgaaagtgccctgtcaagttagctagcccatgacctgggaccttttcttttttcttaaggttactctccattcatgggtgccaatgtcattggtttaaattggaggctgtattatcaccaagggactaatctagaacccaattctctactcctaatatttcttctaggtttgctttttcttgagcaaaacttcctacattgcaatctgtataaagtatttgagcaaagcactgagtttccttccgttcagcctgttgactaacagtagagtcaaagcatctactattttgttttttttttctcctagcatcagtaaggcacagattattaacttgaaaaatcagctaggaaaatgctacagagcatctgttttagagcagttctgctgtgacatggatgggactcaggacctgtggggacgttctgccatggctgtttgtgagcttgtgaacaaagtttcctctcatagaaacctcccaagattgttcytctggagaaccatcaaccagagcctgtgctgtagtagagtgtgaactgtattgctaaacaaagtgaaaggcttccctttttagatagttattttaattattttttcctttctctatctctctgaccacatatggcttgaagaataaaatgtggaatagagaaggagatgtgtaaatttctcagtggaactaccaacacactgtaccttaattttctgttgttcaaaatgaggataatactacctatctcacaatagtatggaaaaattgaaaaaaagtttatttgtaaagaaaacaagaaataatatttccataggaaatgagataatgctgttatgttatcttgccttcatttttatttcactgtttaaatagtatctctctttaaaaatctacacagatggttcacaggcaccagccagaccccctaaaccacgaccgcgcaggactgcaccagaaattcaccacagaaaaccccatgggcctgaggyggcattggaaaatgtcgatgcaaaaattgcaaaactcatgggagagggttatgcctttgaagaggtgaagagagccttagagatagcccagaataatgtcgaagttgccyggagcatcctccgagaatttgccttccctcctccagtatccccacgtctaaatctatagcagccagaactgtagacaccaaaatggaaagcaatcgatgtattccaagagtgtggaaataaagagaactgagatggaattcaagagagaagtgtctcctcctcgtgtagcagcttgagaagaggcttgggagtgcagcttctcaaaggagaccgatgcttgctcaggatgtcgacagctgtggcttccttgtttttgctagccatatttttaaatcagggttgaactgacaaaaataatttaaagacgtttacttcccttgaactttgaacctgtgaaatgctttaccttgtttacartttggcaaagttgcagtttgttcttgtttttagtttagttttgttttggtgttttgatacctgtactgtgttcttcacagaccctttgtagcgtggtcaggtctgctgtaacatttcccaccaactctcttgctgtccacatcaacagctaaatcatttattcatatggatctctaccatccccatgccttgcccaggtccagttccatttctctcattcacaagatgctttgaaggttctgattttcaactgatcaaactaatgcaaaaaaaaaaaagtatgtattcttcactactgagtttcttctttggaaaccatcactattgagagatgggaaaaacctgaatgtataaagcatttatttgtcaataaactgccttttgtaaggggttttcacataacatagaggagcttcccttttttgtttaagttttgtaacctttaatcctccatattctcatgtctgtcatcccaggggtgtcacaactgtaaaaatctacaatattagaaagcagctaytacagatgtggaagagagaacacttgtataagacaatgctgtactgaagttaaataacaaggtcccctgatacttatgcctgcattactttgagggatgctgaatgagaggaccatctccctgaaatatattaataattttcagataaaattatgaacataacataccttttctcaagtggaattagagttcatttcccatttaagtgattacactctatctcctaagagctgtgggaaccagttcatattgcagtggaaacattaactcttcgttgcactgttgagtgtcaaggctactgtggcaatgttttttgcaaagttctcagtaattttctctctgcaatcaaattagagttcatatttaatttgcagattctctcattcattgctccacactgctttatcaaatcaggtgaaagaaattaatgtagttttgcctattttacaaaatggtggttggttctttaaacaccatgttattactcttaataaatctacaaatatttattgagcatctatgatatgcttggtgctgttaggcactgtgtttttaaagcacaaactctcaaaagctgattccagcgtaatgttttatttttgtttttctgtgttttttatgacaaagtctgtctgatagacaaagcctggaaggtttcccccagggctttagaatttagaattagctggttttcatttcaaatgggaaattaatggagaaatgagataaaatcatctctgtgtaaatgcttgaacccacagaaagttttctaaatatggactaattgtgggtttgtgcatatttctgtgtctcctcttttcacttcacacccaccatgatataaaaagatgcatcagagagtgagcctgccttcaggacctgaaaggacatgactgaacatctagtagatctggtggaaattaatgttatacaaaagacacgtagactaagttgaccctgggagaggagttaatacattcctttgcaaagtgacatgtgccctttttttgacagtctggctttcatggtatgagatgaggactcacaggccttgggtaatttctgcttttgtatgaattttttcagatggttctgagctggttatgtccctggaggggaatttttcatttgccttagatgttcttcccatgagtaggtacatgagtgaagtttcttacacttttaaaattgcattggcaaattttcttttgctttatgaacccctgttttgtcattatgatttttcacttgttttaacagtttcagatgtcaccttggaatagcactgtttattttggcctttttatgattgctgatgataggtacagtctaaaggccaaaagttgccacttcattgtgataacattgttgcaacattcctaatatattagagaatgatgtaaaataagaatgttagagaacatagcacattctcattcagtttataaacaatatttgaaaatttccagtgagaattaaaaaaggactagtgatgatatagcaaacctggacctgaaatttgggggtggggggtggggggatatctgttttgcagagaaaatttaccagcctccagcaaaatctctgcatcttgtactcaatagcaaccattagtattgtcatttaaaaagaatgaatcaaaaattcatacgtaatggaatgaaaagaggaaaactttctattaaacactgtcaagaaagacccattgctatctatcacctatgaaattaaacctaaaaaaaattttttttattgtaaaagcgactgctcgttgatgtctggaagtgatccagactttgtttcactgtgatccaaaaagttagacattccttccatttctcaagatttggtaacaattttttcttaagtcagcatttcatataatacataaaattaagacaaattaacttactgatatgtggccaatatcaacccttctcacccaacccaaacatgttctggagatagaaggacttatcctcaattatattccagtaaatttatctccataatctgttttatcccctaatgtatgatatatctcaccaaatttttctagaattgaataaaagcagtttttgcttaacttgaatttccttccacaaatacaaccttcagctcttccctctctgtttcccttttgcccacattgcaaatagtcttcataatagaaccctcaccgcaacttaaaagggtcccatttcttaactcagcatttcatataccaagaacacttgcaaagatttcttcataatgtgattttttaatttttcagttccagaagcatttcctrcagttcgaacgttattttttctctcagattttcaacttgaagctttgatttgcactgaattaacttggataaaattttagtttctctcttcagctaacagatttggaagcaaattacagtatacttgaataattcaggtactacctgttgacctggaattttagtgattctgggaaagttttccagacaaagacaccaatagagtgaagggttttttccccaattactattttattgttttttaaaatgcctttttaaaacttgtgtgatgtggcaaaatagtcatatgttcaattaatttatattttattcattccttttcaattctggttattatgtaacctcaagtactttatctgttcttttaaagtattttataaaatgaacgttaactaaatgcagagttggtactttatttttcaaatgaacacaaaaattttagagcatttctatgatgtaatttttctttttcatgtctaattgaacaaagtggtgcaaggtgtacccatcctaggtaatttagttattaagtaccaaaatcacaattttaaggtagcctaatagataaaattgcccctatgtcatagatctgaatgtcaaaggtgtatcaaggttccaagtaagaaatatcatatctgggaaatgctgaaagccttcaggatgatgtactataatatataattgataattcctgatcaacagtaccatctggtctttaaattcctcatttcttaaatcattttttcactgatcagtatatagtggggagagaacaacagagataacaatgttaataattgcttttatatcaagaatcatggcagaatattgtgaaactaattgttacatgcaaagttccgtgcatagtaataacaattacttcctggaagcatataccatgaaatggaagatacacataagcaagtaattccagtacaaaaatgtgtgtacaacataccacattgtactagaattacgtctgtatgataagtgcttaagaactaattattgagcctttattatgtgtaaggagcttagtgtcaaagcatttaatgctttcgacaaccctgcctcttttaggactgtggaagggaagttgggaattatatttctaatagaaagtttgacaacccataagactaagtagtcttttgtaagcctaaaaggagcaaggatttgttgttggtattaagaaagaaattcagagttaaagcttttcaaataggaagagcacacatgataaaatattgttatttaagcaaaggtgagatgccgctcatcatcacttcagtgctttgagaagacttgttcttctctcctaaaagccccccctccccccgggaaacctctgtgggactcattaagaggctggtggcagaacttccattcctgtgtcctaagagtcatcatgagcagaagaggatgggctggagggttacctgggaaaagtgagtgatgagtgagaatgttctgggtttggtccacctctcccaattcaactaatgatagctcccagagaacaccaattatagatattagggaactggcattttattctgttagagtccacacagtggacttactgatctgccatctgcggttactagagcagagcagaacataactagagaggagtcaacagtgaatcaggtaataagcatctccaccattgggagaacaaggatacatcatacgcccctgggataggcagagccctgtcaaggcagctgagctggagttgtcttggcaggacccaagaaggccacctgtcagccacagtaacccaagcagcaagagactttggggtatacactgctggactaggcacaaggaagtcaagccagtggatatctgatgtatctgatgtgtcagacactaaccgagtgtcctcccacttgagcttgacaacaaagtccacctttgagaacttactgtatgggcaaaatacaaaatcaaacatgccctacaatagcacttgtaaaaagaattttactcctttccttaactcttcttcccctatcccaatcccaaagaagcagaaatgtaagaatgaagaggagtgattaaaaagggtacatcttgccccttctctgctcctagtccctgaggttaagggctgcccaacactgggagacagtggacaggctagactgaattagaatgcaggtgattaaacaaggaaagataattaatagttaaaagaagtgattaaagaaaaaatctcaacataccatgttggcagcctatcaggttcaaggtgtttagtaaattactaaaaaaaaaaaaaaaagccagacatttcatttcaaatgaactttagtggtttccttagtttaacaaaaagtatttatagtcagatagccatcattagagggtccttctatggggagatggtgtgggatggatagatgcattttatttctctggaaatactccctgcctggcaagctcagagggctcacccctggagatgcaaattctgcctaacccctcccacagtcttttgagcagagatcctctcctctgtcccttagcagtgcagggcccaatctcacccagttctcccttcactgcaagcattgcttccccctcagtaaactacccaaacctcatttgttagcttgtttatgaagtaaatatcagggacatgaaataaaacgtctggcagcaacttccctaggacatcagtgactgtcctcaaactactctcaaaaggagctgtacatttccctaaagaaccattccaatgtaagatgcaaagtatccttgcagaaaattaaacctaaccacaagtgcctaggccctaggctatttagacatgaatcaaaaacagcagtaccaaggcacttatttgtatagatgtttaatcaagagtgatgcttaatgtctatctggaatttcttgcaaaaaaagagaggatagatggtctaaaacaagactaatatatctctactgggcattttaatcagtgctaacataattaaatatttatacagcactttgggtttgggaacattttctgtttgattttcaaagttgcatttctcaaaattcttgtaaagtaggtccattacacttgataccttctctttgcacatagaatttataaatcagagaacataactttccctgagtcactcaacaattgacaagcactagaattatgatcgtatcaattagtcccacctcatgcattagatattaaaaatagacctaaaaacagttaggcaagatctaagcaatccttctgtgggcaagaaagagaatttaaaataagtatgtgactttcacctcctgctattatcacatattgcaggaggtatcacccagaaagataagtacatgttgacatgatttggctgttctccacccaaatctcatcttgaaatatagttcatgtaatccccacatgttgtgagagggacccagtgggaggtaattgaatcacaggggcagttaaccctcatgttctcgtgatagtgagtaagtctcacgagatctgatggttttataaggggctcttccccccgtggctgggcacttctctttgttgccgccatgtataagaggacgtgtttgcttccccttatgccatgattgtaagtttcctgaggcatctccagccatgctggactgtgtgtcaattaaaactctttcctttatgaatacccagtctcaggtatgtctttattagtgtgagaactgactcctacatgttaaacatga

SEQ ID NO: 94107 - DNA, 114463 bp, Homo sapiens
actccagtgtgaaggatactcagccaacattcacatcatatcaggattgaacgagctgaacagactgtctactccttcattatttgtgtattaacagatgccaaaaatcacctctgcaagatgggttcaagagacaacacaggcttttgatttagagatctgactcacttttatcaagagtgttcatgaaatcaaggatacattgatttttctaacattgttggcagttaaaagaacctttaacaggactcatatatttctgagctcacagcagggtcacgttcatagaattttaaaatagcacagaaaacttagaaatcatgtagttcagttccctcattttatagatgaattaggccaagaaaacctgggtgacttgttcaagatgatcaactaatttaatggcaagctgagatacaaactgctctcttcctcttagtcctgtactctcttaccaccacaatgttggagccaaccagaatttcaaaaatgattcctaacaatggcctccacctcttctttccccctttatacataatattcactctgaaaagaatgggagtgtgtgtgtcagtgagggatggtatattttaaggaaagagttttggatccaaaaacagtattagtttttcaacgggtttgactatgtatttgtgtttctgagtttctgtttcttcaacagcaaactgggcacagattcttattaaataattattaaatattaataaactgcataattaagattactaggattaataatctatacaaataagcttgcacatagtaggtgctcaaaagccatagctagtattaaatggtaaccctcctcccctaaatcatttatatgccataaaaacccttcagtatttgaggaatgtgcagttgacactactgacacttttataataaattagcattttatgtttaaatgaaagttatacacacacccccacacagctgtttaaaaaaaaaaacctgtttttattgaatgaaaaatccacaaacgtaagtcaactctatacaaatcaatattctctgcacctcccactgtttcatttggatgcttgaaaacaattcttatgtctttagacacaatctgcttactttcaaattgcctaaaaggaaacacaaaacattgtattttaaaaagtacaataatgggccctgaagaatgaagcaatccaagtgaaggcacagctctgtataccagatctgctgcataggtgaggggaggctaagtgtggtgatgacccaaggcttatcctcatcagtaaaaatgacccatatttgcttaacactttacagtgaacacagggtttcccttcccttccctcccctcctctcctcttcccctcccctccccctctcctccctaatccccctcccctcccctcccttcccttcccctctccccttctctctctttctctttctttccttccttcccctccctccctcccccttctttttctttctttctttcttcccttttctttcctttcctttycttttcttttccctccctcttcctttccttttcttttcttttccctccctcttcctttcctttcctttcctttcctttcctttcctttcctttcctttcctttcctttccttttcttgacagggtctcactctgtcacccaggctggagtgcagtggcatggtcttggctcactgcagcctccatctgccagctacatcaatccttctacctcagtctccctagtagctggaccaggcctggctaatttctttgtatcttttgtagatatggggtgttaccatgttgcccaggctgctctctaactcttgggctcaggggatcctccccagggttttcattgtattagtatgttctcacactgctaatacaaatgtacccgagactgggtaatttataaaggaaggaggtttaactgactcacagttcagcatggcttgtggggggcctcagaaaactgaccaccatggtggaaaaggaagccaatacacccttcttcacatggaggcaccaaggagaagtaccgagcaaaagggggaaaagcccttcataaaaccatcagatctcaagagaactcactcactatcatgagaacagaaagggggtaactgcccccatgattaaattacctcctgctggatccttcccacaacacatggggattatcagaactgcggttcaagatgagatttgggtggggacacacccaaaccatatcattccagccctgacccttcccaaatctcatgtcctcacatttttaaacacaatcatacccttccaacagtcccccaaagtcctaactcattcaggtattaacccaaaagtccaagtccaaagtcttacctgagacaaggcaagtcccttccacctataagcctgtaaaatcaaaagcaagttagttacttcccagatacagtggagggagttacaggcattcagtaaatatacccattccaaatgggagaaattggccaaaatgaaggggctacaagccccacatgagtctgaaatccaatagggcagtcattaaaccttaaagttccaaaatgatctcctttgactttatgtctcacatccaggtcatgctaatgcaagaggtgggctcccacctctttggcagctatgcccctgtggctttgcaggacacagcccccctcccagcttccttcacaggctggtgttgagtgtctgcagcttttccaggtgcacggtgaaagctgtcggtggatctaccattctggggtctggaggatggtggccctcttctcacagctccactaggcagtgccccagtggaaactctgtatggggctccaaccctacatttctcttctgcactgtcctagcagaggttctgcatgagagatctgccaccacagaaaacttctgcctggacatccaggcatttctatacatgctctgaaatctaggcagaggttcccaaacttgaattcttgacttctgtcaaggctgaacaccatgtggaagatgccaaggcttggagcttgcaccctcaagccatggcctgagctgtacgttggccccctttaaccacagctggaacacagggcgccaagtcccaaggctgcacaaagcagcaaggccctgggcctggcccacagaaccattttttcctcctaggcctctgggtctgtgatgggaggggctgctgtgaagacctctgacatgccctggagacgttttccccattgtcttggagaataacatttggctccaaattacttaggcaaatttctgcagctggtctgaatttctcctcagaaaataggtttttctttcttatcacattgtcaggctgcaaattttccaaacttttatgctctgcttcccttttaaacataagttccaattccaagccatattatttgtgaatatataaaactgaatacttttaacagcacccaagacacctcttgaatgctttgctgctttgaaatttcttctgccagataccctaaatcatctctctcaagttcaaagtttcacagatctctttgctaaaacatagcaaaagtcacctttattctagttcccaaaaagatcatctccatctgggaccacctcagcctggacttcattgtccatatccctatcagtaatttagtcaaagccattcaacaagtctccaggaagttccaaacttccccacattttcctgtcttcctatgagccctccaaaccattccaacctctgcctgttacccagttccaaaggtgcttccatatttttgggtatccttatagcagcacctcccagtagcaatttactatattagtctgttctcatgctgctcataaagacacactcaagactgggtaatttataaaggaaagaagtttaattgactcactgttcagcatggctggggaggcctcagaaaactgatcatcatgctagaaggggaagccaacacaaccttcttcacatagaggcaggaaggagaagtgctaagcaaaagggggaaaagccccctataaaaccatcagatcttgtgagaactcactcactatcatgagaacagcatgaaggtaactgcccccatgattaaattacctcctaccgggtccctcctacaacacgtgtggattatgggaactacaattgaagatgagatttgtgtggggacacagccaaaccatatcattcatatatataattttaaaagtattcttacagaaccaaagaaaggctgatatatacttcttgtggcaacagaagcagaagtagggaagactattcagacagattggctctctagagtattgaatttactttattgctgcactagtttgctagggctgctgtaaaaaagcaccacaaattgggaggcttagaacaataggaactaactgtctcgcagttctagaggccagaagttcaaaatcaaggtgtcagcagtgcgacagtcctgtgaaggtgctaagaaaggatctgttccaggtctttctcctagcttccagtagttccttggcttgtggcagcacagttccaatctttacatggtattttccctgtatgtatatgtatttctgtgtctaaatttctccactatatgaggccaccaatcacactggattagggtgcaccctaatgacctcatcttaacttgagcatgtacaaagaccttatttccaaataaggccacatttatagtcattgagagttatatgattttggggacacacaattcaaccaataagaattgccatctccttctttcttttaactttgccaaacacactggtggccaacagcactcactcactcactcattcattcattaaataagcatttgcctatgtcaggctctgttctggtgttgatgcaaaaaataaaaacaaaagaaaactgaatacagacccagtccttgagaaatcacacttcagagggaatcagaggcacattattatgataataagtactattactgagttggtattgctaggaatgggcacttttcaactaattttcacggtagtgtgaaaagtgatgtaacagaaacatacttggagaacccagggaggtcctaaatttgccctagggatcaggaatactttcagaaattagttattatttcatctgagtctaaagggatgcgtagaaatatcctaggtagctcaaaggtggtaatattgagtactggattccaaagaagagtattttatagaggaaaaaacagcaaaggttaagagacaaattgtaaaccccaggaggggtggggttttagtctgttttattaagtatctcctgtatctctagtgctttgaacagtgcctagttcattcaaaaagtaatcattgaatgaatttaagggcatcatatatctaagggatgccatggcctgcagttcactgtcgctggaaaagtagacaaacgtccagtttcaaagagaccggtaaactacattaaatgtaagagacgaggggtgaaaggttgatgatatatatcgctagtattaaaaaaattccaggaagtccaggaatgcctggcatccgtcctgccaattacccttttccccagagtatgtacaagggggaggaggcacccaagggccaggagagtggaggggcacagctccacaatctccaaagtagggttctctggccaaagcaggattgaagcacatggtttggacttgaaatgtacgtggagcctcccactctcctccttccactccatcctcccctcactctccgcccgactccaccactggctcctgaaggaaaccggacaatttccaggccctccccaaatcccacgggaggaatcgccgagcgcgctcctgcccgccggccccgcccccttaccctctggaacgcagcgagagcgcacgcgcgcctaacggagcagcgcgcgcgcccgcaagctccccgcatccccgtgctcatccgggtctcagcgagcctcggccaatggtggccgctcatggcccttgggggcggggctaagccttccctcacaaggggcctgtggtcaacgcgatttgcttccaagggacggccaccagtcggcacaggaaaggggcagaggcagtgagttcagcgtgtggacgagggtcaacaagtttgggatcaagcggctgccgctcctccaaaagcgaccgaagcgcgagcagattacccctccgagccagtgtagtaaacacacttcagaaacgtgaggtgccggtggtcacgaggggagcgcgccctccaatgaggagccgggggcggggccgaggccgctgacgcggcggcggcggcagagtcacccgggcagcctcgggaccggtcaccggccggcaaccgtccagcggcctcgaccaccgcctctagcctccgttcccggtcctttctcccgggccgagagacagcgtcgccgacaggggctcattcccctccggttctcctcggtgactcacctcgggcgggccgttttgtctttaggggccgccttggtggggcgaggtttccgtgacgaatctcctggggccgtccgtgccggctcgggccgtcgtggcgrctcgagctcctggaacttgctyaggctccggaggtccgaggccctcgaagttatgcgtcgcctccaggcggttgcggcgggcgcgggctcctaaagggcgtcacacccggactccgccgactaggcaacctccattcatctttccactgcgcctccrgcgcccccgccttctccggtcccctcctcggagtcattttttcctgttycccctctgccgccctttcctcacgccccgggtgaggcaattctcttggaagcgaaggtgtcggctatgagccggagcctccttccttgaatttctccgtggaggacccgccgcgccccccggcatgggggtgaacgccgtgcactggttccgaaaggggctccggctccacgacaaccccgccctgaaggagtgcattcagggcgccgacaccatccgctgcgtctacatcctggacccctggttcgccggctcctccaatgtgggcatcaacaggtggcggtgagtcacaagcccgtgggaaatggatttgggtgtttaatgagtctgatgttaatgaattccatgcgatccgccaaatctgtgaatttagacgtgggactgtcttgcttataccgcttacgaattttaggtgccctaagtattaaatagaattgacttaatacttctctggccaaagagtactgacgacctgaaacactcggtcttcatcagtgagttatgtgtctttctgtgctaactggagctcctcccctgaatttgtggagaattcttagtgctggagttaaagaaacacctttcctgtccttagtggccattgtatatggattcccttggcctttttgtggcattcggaaggattgtgatgtttcctgtttacgtttgtgtctaggtaactcatagtatggagaaaaatcattcattcagtacagcaggctccagatccagtgttcttccaccttgaggttactgtgggaaaagcaagggaaacagcattatctggtttctctgctcggttctttttctcaactcctccttgtggttgccgagacaaagcacagtttttctttctaggcaagttgtagtccttctagggatcagagcactgaaagaaatcttagagatgctttatgatcttttcctgaaacaccaggctacatgattgttaggccccctggtggaaataaaagcatagctcaacagatagactcttgatcacttagcatgtgccaggcactgatttaaatgctagggatatagcagtgagtgaaagacagaaagtcatgtcttcaagcagaaagtaaaatatgtagtattttaggtggtgataagtattgtggaaaaaaatagagcagagtaaagggataaagaatacaagggtagggatggggttgcaattttaagtatgatcgggggaaaagtcacagagaaggtgacacttgagcagacctgaaggaggtggtgggatgcagatatctaagggaagaccattccaggcaaagggaagagtaagggaaaaggcagaaatatgcttgacctttggaaggaacagcagaagaatccagtatgtctggagcagaataagtgagggaaaaatagtagacgatgaggtcagagttgacttagggccagattgaagagagccttataagcagttttcaagatttgggtttttacttagtgaaatgggaataactgcaggattatgagcagagaagtaatgtgatctgacataagtttggaaaagaatttttctgcttgtggttctgaattggggagtggaggtggacaagaagcaggaagtccaattaagaagctgttggcattcatccaggtgagagatgataacggcttgaatcatagtaataatcgtggacgtggtgagaaataaacagatgctggttatattctgaaggcaaaatacagggtatttgttggcagattggatatgtagtgagagagaaagaaaaggagttaggctgggcgcggtggctcatccctgtaatcccagcactttgggaggctgaggccaggagttcgagaccagcctggccatcgtggcaaaaccctgtctctattaatactgaaaatataaaaattaggtgagcatggtrgcgcatgcctgttatctcagccactcaggaggctgaggcacgagaatcgcatgaacctaggagacggaggttgcagtgagctgagatcgtgccwctgcactccagcctgagtgacagagtactctgtcgcaagaaaaaaaaaaaaggacttatagtttggtgctatataaaaagcaccaaaattcagtgctttttatatagtagcagtttagttactgtttgagaaaatttttggcttgagaaactggaaggatggggctacactttgctaagaaagtgaagccagctggagaagccattgggagggtgattggagttctctttcattaagtcattaagtttgagatgtattttacacattcaaatggagatagcaaataggcagttggatgtatctggagctcaagacagagatccaggcaggaagtataaattggagaattcattagtttatagataatatataaagccatttattcatccaaccatttattgaacaaatatttgtcaagcacctactatatgccaggcactgttttaggtgctagagatccagtataaacaaaacagcccccaattctcaccctgttggagctacattctagtggagccgtgagactgacagcattaataaaatgagatagacaagagatgcaaatggtgcaagggctgaaccttgaatactcttaatgtttataaattgtggagctgtgaaagaaccagcatatgagactgcgaaggagccactagtaatgtaagaagaaaacccagaagagtatggtgtcttagaagccaagtaaagaaagtattttggtcaggcatgtaatcccagcactttgggaggctgaggcaggcagatcacttgaggcccggagtttgagaccagcctggccaatatggcaaaaccccgtctctagtaaaaaacacaaaaaaattagataggcgtatggcacatgcctgtaatcccagctactcgaggaggctgaggcaggagaatcgattgaacccaggaggcagaggttgcagtgaggcgagatcgtgccactgcactccagcctgggcaacagagccagactctgtmtcaaaaaaaaaaagaaaaagaaaaaaaagaaagaaggaaaatatttcaaggaagagtgttttacttacgtcagatgctaccgataggtcaagaggagaactgaaaaataaaaattggatttagcaattttaggtcatttggaattttatctggagtggttttggtagtgtcagaggcaaaagtctttttggaatcactcatagtaccaaattcagtgctttttatatagtagtagctcaattattgtttgttgaatatagtgatatcttggagtcaataattttatatttaaacagctttattaatttacttattgactatgggataatgcccaaattccttagcctggcaagatctaccttttggcttatgtatttcattttctgctgtttacaatatgtgatttcaactccagggggaaaaccctcttagttttctttagaagctatcttgtattttcttcggtcaacactttttagacttttggatttaacagaaaagcaaaattttaaatagtattctacctaataagcacattaacaaaaccactttttgatattgccatcctttcatttaaaaaggatgttttatatttaaaaaaaaaaagtttggcagagctcaatgtctcatgcctgcaatcccagctactcaggaggctgaggcaggagaatcacttgagcccaggagttggaagctgcaatgagctatgaatgggctactgcactccagcctgggtacacagagagaccctatctcttaaaaaacaaacaaacaaacaacaacaacaaaaaatttgaaggacattgtctcagaataacatgtttttgatttgggtaaatttacaagctttatgaaaatttgcatctcttagaaaaattatcctatacaaaaacttatacactaacattcacagaagcattattcataatagccaaaaggtgggaacaacccaaatggccatcagttgatgaatgggtaaacaaaatatggtatatccatataatggaatattatttggccataaaaaggaatgaagtactgatatacgctacatgtatgaatgaaccttaaaaacaaactaaacgaaagaagccagtcacaaaattccatgtgttatatgattctgtttatatggaatgtccacagtgggcaaatgtatagagagaggaagcagactagtggctccttaggactggggaagctagggagttgggaggtgatagctaaggggcacaaggtttctttttgagatgatgaaactgttctagaaggtgatgratgattgtacaactctgtgcttgtctgggatgattagcagtattctgaactcttgcaccactttttgctgttgctcctcacatcactcttagcatttgctgccctcatttgtgaatgttagtattgttttattaatagtttgtttgagctgctataacaaaatacctttagactaggtagtttataaacaacaggaatttatttctcacagttttggaagatgtccagaatcaaggcaccagcagattcagtgtctctgctgaatagacgatgctttctctgtctcctcacatggcagaaggggtaaacaagttcctgcagccctttttataagagcactcccttagtctgtttgtgttattataaagggatacctgagggtgggtaatttataaagaaaagaggtttacttggttcatagttttgcaggctttactagaagcatggcttcagcctctggttctggtgaggacctcagaaagcttttaatcatgatggaaggggaagtggagctgacatatcacatggcgagagagagaggggagggataccagtctctttttaataattaattgttctgttaattaatagagtgagaagtcactcattacgtgatagcaccaagccattcatgagggatcttatctcatgttccaaacacctctcacctccaacattggggataacattttaacatgagatttgaaaaggacaaatatctaaactatatcactccacttctagccccccaaatatcttgtcttatttatttattatttttatttttatttttgagacggggtatcactctgttgcccaggctggagtgcagaggcgtgatcatggctcactgtagcctcaaccacctgggctcaagcagttgtcccacctcagcctcccaagtagctgggaccacaggcatgcattaccatggccaggtaattttttttattacttgtagaggtgagatctcactaagctgtctcatactcccgggctaaagcaattctcctgcctcagcctctgaaagtgctgggattataggtgtaagccaccatgcccaccctcttttttctattgtaagatataatcatctctttcaaagtccccagaaatcttaactagtttcaacatcaactcaaagtctaaaatcttatccgagactcaaggcagattccttatagctatgaacctgtaagatcaaaaacaagttatctacttttaagatacaatggtggaacagacattgggtaaatattttcattttaaaagggacaaattgaccaacaaaaagggacccacccaagtctgaaacctacaagggcagacattaaatcttaaagctgtaaaataatctcgcttgactcttgtcccataactgagcacactggtccaagaggtgggctcttgaagccttgggcagccccatctctatggcttggttgggcacagaccacatggcttctttcatggattggagtctaatgtctgtcacttctccaggctgagggtgtgtgctgttttcatccaaaggattcttttaatctttccacttcctcactttccactccctcccacatcctgagcacactggtccaagaggtgagctctcaaaaccttgggcagctgcatctctatggcttggttgggcatagcccacatggctgctctcatggattggagtctaatgtctgtcacttttccaggctgagggtgtatgctgtttacatccaaaggatacttttaatctttccactccctgacttttcttttccttttctttttttcttttctcttttcttttcctttctttctttttctttctttctttgtttctttctttttctttttcttaacagtatttaacacatttgaccacacctttctcttcttctcttggctttagttagactgccaccactgtgggtcctggagggcagtgcccctgttcccgctgctctacagtgagttctctgtggggactgtaaccccatatttccccttggcaccagcctagtagaatctctctgtaggagctctgctgtggcaggcttctgcctggacasccagacttcttgacatatcttgtgaaatctaggtggaagctgccaaacctccatggatcttgtattctgtatacctgcagacttaacaycacttggaaaccatcaaggcctatggtttgcacccactggagtggcagtccagacagtacctggggccttttgagccctggctgcagccagagcagccagaacgtggggagtagcatctcaagaccgcacaaggcagcaacaccctgggcctggcctcccaaaccattttgcccgaggaggcctctgagcctgtgatggaaggggtagccttgatttctggaatgtcttgggggcttttccccattgtcttgactgttaacaactggctctcttttattcatgttaattgctttaacaacctgttctgtcagggcctggtacctggggctaggtagtttggatttctctcctgaaaacttccctctaccacatggttaggttgtaaatttttcaaatttgtatgctctgtttttctcttaattattagctttaactttgtcttttttttgaactcccatatctgatagtaggctgttagaagcagccatgtcaccttttgaacgctttgttgtttagaaacttttttttgccaggtagcttaagtcattactcttaagttcagccttttacaaagtcctaggcatggatacaatgtagccaagttttttgttaacaagcataacatataatgtggccatttttttgttttagtttttaaaaattttatttgagatctcatgaacgtggcctttactgtctatattttaatcagcatttttatcacaacctcttaaccagtctctaaaaagttttaaagtttttcttgtgtatgaggttttttgtttttgttttgttttgttttgagttctctaagctcttgtaagcagctttagtttttgctttttttttaatactttaagttctgggatacatgtacagaacctgcaggtttgttacgtaggtatacatgtgccatggtggttttgctrcacccatcaacctgtcatctaggttttaagccccacatgcattaggtatttgtcctaatggtctccatccccttgcccctcaacccctggcaggccccggtatgtgctgttcccctccccgtgtccatgtgttctcattgttcaactcctacttatggagaacatgcgatgtttggttttctgttcctatgttagtttgctgagaatgatgctttccagcttcatccatgtccctgcaaaggacatgaactcattcttttttatggctgcttcatattccacagtgtatatgtgccagattttctttatccagtctatcattgatgggcatttgggttggttccaagtctttgctattgtgaacagtgccacaataaacatacatgtgcctgtgtcattatagtagaatgatttataatcctttgggtatatacccagtaatgggattgctgggtcaaatgatatttctgtttctagatccttgaggaatcaccacactgtcttccataatggttgacctaatttacactcccaccaacagtgtaaaagcgttcctatttcttcacatcctctccagcatctgttgtttcctgacttttaataatcgctgttctaactggcatgaaatggtatctcattgtggttttgatttgcatttctctaatgaccagtgatgatgagcttttttttcatgttttttggccacataaatgtcttttgagaagtgtctgttcatatccttcacccactttttgatgggtttttttttttttgtaaatttgtttaagttccttgtagattttagatattagacctttgtcagatggatagattgcaaaaattttctcccattctataggttgtctgttcactctgatgatggtttctttcactgtgcagaaactctttagtttaattagatcccatttgtcaagtttggcttttgttgccattgcttttggtgttttagtcatgaagtctttgcccatgcctatgtcctgaatggtattgcctaggttttcttctagggtttttatggttttaggttttacatgtaagtctttaattcgtcttgagtgaatttttgtatacagtgtaaggaaggggtccagtttcagttttctgcatatggctagccagttttcccagcaccatttattaaatagggaatcctttccccatttcttgtttttgtcaagatcagatggttgtaggtgtgtggtgttatttctgaggcctctgttctgttccactggtctatgtatctgttttggtaccagtaccatgctattttggttactgtagccttgtagtatagtttgaagtcaggtagcatgatgcttccagctttgttctttttgcttaggattgtcttggctatacaggctctttttttggttccatatgaaatttaaagtagttgtttctagttctgtgaagaaagtcaatggtaacttgatgggaatagcattgaatctattaattactttgggcagtatggccattttcatgatgctgattcttcctatccatgagcatggaatgtttttccatttgtttgtgtcctctcttatttctttgagcagtggtttgtagttctccttgaagaggtccttcacatcccttgtaagttggattcctaggtattttattttctttgtagcagttgtgaatgggagttcattcgtgacttgactctctattattggtgtataggaatgcttgtgatttttgctgattgattttgtatcccgagactttgctgaagttgcttatcagcttaaggagttttggggctgaggcaatggaattttctaaatatacaatcatgtcatctgcaaacaaagacaatttgactttctttctatttgaataccctttatttctttctcttgcctgattgccctggccagaatttccaatactatgttgaataggagtggtgagagagggcatccttgttttgtgccagttttcaatgggaatgcttccagcttttgcscattcagtatgatattggctatgggtttgtcataaatagctcttattattctgagtaacgttccatcaatacctagtttattgagagtttttagcatgaagcggtgttgaattttgtccaaggccttttctgcatctattgagataattgtgtggtttttgtcattggttctgtttatatgatggattacatttattgatttgcatatggtgaaccagccttacatcccagggatgaagctgccttgatcgtgtggataagctttttgatgtgctgctagattcggtttgccagtattttattgagtattttcatattgatgttcattggggatattgacctgaaattttctttttttgttgtgtctgccaggttttggtatcagaatgatgttggcctcatataaaatgagttagggagcagtccgtctttttcttttgtttggaataatttcagaaggaatggtaccagctcctctttgtacctctggtagaatttggctgtgaatccatctagtcctgggctttttttgsttggtaggctactaattactgcctcaatttcagaacttgttattggtgtattcagggatgtgacttcttcctggtttagtcttgggagagtgtatgtgtccaggaatttatccatttcttctagattttttagtttatttgcatagaggtgtttatagtattctctgatagtagtttgtacttctgagggatcagtggtgatatccctttatcattttttattgtgtctatctgattcttctctcttttatttattagtctgtctagcagtctatcaattttgttaatcttttcaaaaaaccagctcctggattcattgatttttttgaagggtttttcgtgtctctgtctccttcagttttgctccgatcttagttatttcttgtcttctgctagcttttgaatttgtttgcttttgcttctgtagttcttttaattgtgatgttagggtgtcgattttagatctttcttgctttctgatatggacatttagtgctataaatttccctcttaacactgctttagctgtgtcccagagattctggtatgttatctctttgttctcattggtgtcaaagaacttacttacttctgccttaatttctttatttacccagtagtcactcaggagcagattgttcagtttccatgtagttgtgtggttttgagtgagtttcttaatcctgaattcgaatttgattgcactgtggtctgagagactgtttgttatgatttcygttatttgcatttgctgaggagtgttttacttccaattattggtcaattttagaataagtgctatgtggtgtgagaagaatgtatattctgttgatttggggtagagagttctgtagatgtctactaggtctgcttggtccggagttgagttcaagtcctgaatatccttcttaattttctgtctcattgatctaatattgacagtggggtgttaaagtctcccactattattgtgtgggagtctaagtctctttgtaggtctccgagaacttgctttatgaatctgggtgctcttgttttgggtgcatatatatatttaagataatttgctcttcttgttacattgatccatttaccattgtgtaatgcccttctttgtctttttttatcttttttggtttaaagtctgttttatcagagactaggattgcaacccctaagcagctttagttttaaagctgcttttatgtttttagatatctttatagcaacaccccattcctggtaccagttttttgtstttgtctgtccccatgactcagatacctcttgctaggctccatctgcagtattagagatcaagttttaacatgggatttgaaggggacaaatatgtaaactatatcaggcactaatccctctcatgacagtacaatgcatatgaccaaataacttcctaaatgccccacctcttaatactgtagcattgaggattaggttttaacatgaattttgggggaacatagacattcagaccatagcagggatgtattctgtatataatctctctctcacttaacagatagtaccttcctgaagagaagttgcctcttaaatcaaaagtttattttgtgtccctatccattataggcagtattattgatgctgggtatacagtattgaataaaacagaaaaagttgctgccctattccagtggggggaaaayggacagtaagacaaaaataatgtatcaggtggtggtaaattcaatggagagaaataaagcagaatgtgagaacagggacctaaaggaagaggaaacaggctatacatgtatctggggaaagagcctttttgtgttctccacagcatagtggcttatacatagtaggcattaaatattgttttaatttttcttataaatctaaggttgagggataggacagctactttatataatttatatgttaatgtctatcttaaactcataacttaaaaaaaattctcaatgaacagatttgttttagaatttaaacttcaacatgttcattacacatttgaagctatgacttgtaagctctcttaattttcagtaaccaaatctataaatgtgcctacatccttactagttcttccttctagtatacaacttcagtggaagagatactgctgtctcttttcaaaacgagtttcttcttctgtgctccatttcaaagactttgctcattttttatatttattcttaccttttcttctactttttcttctttttaggttgcctccaatcaacatttaaacatgcttaagatcaaattctgtaaaacatacacaacctgtaacaacaaaggaacagaacttagcattaactgtgttccactcctgcaactatgtatctcagtttctttgtagccaatttcttgagcaagatgtctaatagtggctgacttcatttctttatattctacttacccttgaacccaatccaaactaaggcatgtccggcttcactcccacccactctaccaaaactatttttatccaaaggatactttaaatctgcccattccctgacttttttctttttttcttttttatttttttttaacaatgtttgacacatttgaccacaccttcctcttcttcccttggctttattaaaggactcttctgtgctttcctgccagcgctattagtgttcttccttagcttctccttttctgttcaacctttaaatgcccctgaggtctgtgatctccaccctcttttcatttcacatatttctaggcaatcttatctcctctcataaagtccgttaccatttactcgtctatgcccagaattctcaagttagtgtcttcagcgcaaatctctttcctgatccccggacgtgtgtgtgtgtttgtatgtatcatatatacccatttgcctgcttgaatatatgacattacctcaaactcagcttgtccaaaacagagttcatcttcatccttctctattgcacaaaaacaaacaaaccccaaactgagttttcctgtgttttctgtcttcacaaatgatacttccatttgcccatttgagtccttactgtgtgccaattacttgctaatttctgtggatagcatgatagtcaacaggtaatttctctgccctcagggagtttatagtacagaggaagatttattcagaaataaaatagttacataaatacattcttccctctccattgtctctttagcccatatcaccattctctttgcctaggttgtttgggtagcttacaaatcattgtcccccttgcccttctctaattcattcgctacacagcaagtagagtgatctttttaaaattgcaaatctggtcatgtcatttatgctttaaaaccttttaatgacatttctttacccttaggttaaagttcaaaaagccatagcatggtttcaaatccttgtgtaatctggccctctgcttctttctagtctctggtgattatttcactgaggcagttaaactgaaacttgaagtgtaaagtggatcttaataagcaaggcatggagggaagggaattccaagcagagagaagcaaattccagactgaaagaatagcttaaggaaaggcacagtattctgatagtggtgaggaggctgatgtagctgagtcatgtggtgcatgaaaagataggagatgttgtttagtacttttttgtttgctagttggttgcctgagtcaaacaggcttaagcaaaaagaaagtttattggtagatgtaattgaataacctaagggaaactggctttggacatcgcttgataccaggactcagaagatgttaccaggatcacatttctctttgcatctctgaacttcacttattctgccttgacttctcaaataggctgtcctctggtggcaaaatatagcaataacaatggcatttatctcagcaaaaagcatacacctttggcccagaagtctcagcaaaagtcttatggcacttcattggctcttttgggccagtttctgaactagtcatcatgagtttatgattgtcttagctgaagtgtgcttcactggtggaatcagcttgactgaactgaagtaactgaagtaaaatgagtaggaagtaggtggatatcctaaaacaacattgttgcctattatataagaactcagataagtgggtatagttcagaaaagctgcccttgtttggggaaatataaatttagcagctgagtgaatgttagaagagagagtcaagatactagtttggagactttatcaacagttcaagtgaaagataatataggcttaaacaaggggaaaggctatgaggaaggggaagatataagaggaagcctgtagaggtacagtgaaaagcttaggtgactgcctggaaaacacagtttcacagaggaggagggtgagggagaaagtagagtgtaagatcctcatactttgtgcctctgtgacaattagacattaagttaggaaacacagaaatagaccataggtaggtgaggaaaagagtgagtttaggttgttgaccaatttgaagcactgctaagatatcaacatgagaaatggagaaaatagaaatttcactctgggaattatagacattggatctgtgcatatgggaataattcctgtataagtaatggatgaagcatgcctggatgagattggatacagccataaaaagttatgttagtcaaaagcccagtgaaaaaactcagcraatactatgtttaagatgaataggagctggtgaaggaggcgaaagagaaccagagaggtaaaaagaggatccaggagagtgccatatwatggaaactgaatgtggcaagagtgattttaccttgcactacaggaggcaggttaggatgagttttgacaattatgtaggaaaaattatcaaagacttagaggtgggaaaaggaaattattgcatatctagaatgctagatgttgtttagaggaccctccaggagttatatgattctgattaagggatatgcatctttgtatttgattgacaaggctgtttcacaactctgtaaaaagggataaaagttaagttgtagaaaactgaaagcagtacaaatgttttctgcccataccaatgcaaattatgtttgtgccatgaaaatgaattttgtaagttgagaaatagtaaatcagattcttatttgaatcagttttaacatcttatttctttcttccttaatcaatgaattacgtaaattttttgccagatcttcatttcatgtttgtatgagagtcataattttactgttttgaaaattatactttatctgttacaaaggcttttggtgaactttgagataacacttcaatgtaggtgtaaggatagaaatcagattgtataggatgttaacaaaggtgtgtgtagcaggtgaggggaggggagtgggggaaatgattcaggttggaatgtgagggggattttttatgagagaggtaagaaattagctcaaggcataggttctgaacaggctgaggaaaagtgaattttggttagataactagacttttagtcaagactgagcatagtgtattcacaggatgataaataaataaaatatatagataacttttagtcaagactgagcatagtgtattcacaggatgataaataagaaataaaatatatagataaggtgaggcctgaatatgtaattctttgaatgacagactgaagtaagtttagaacatctgactgtactaagacctactttataattcttactttcctattaaatggccgtgggactgaccttgggtaaatctctctcccttcatttagtcattcaggaaaacattcagtgagagcctgttatctaccaggtactgtgcaagtcattggagatacaaagatgaaggttatggttcttgcctgtaaggaaactttcacaccactaaaggacaattagaacatacaatgttaaaaaggacctctgtggaaatctgcaaatacaattgtgaaagcacaaaggaaagacaactttaaaggggtgggaaaaggggtaaaggtgatgagtgtgagttctagaggtgtgtgtgtgtgtgtttgtgtgtatgtgttggggagtgctgggtgtgagatatgagactgagagaggaggaattctagaatgcttctgtagtaggccgttcttgcattgctataaggaaatacctgagactgagttatatataaagaaaagaggtctaattggctcatggttctgcaggctgctcaggaagcatagcagcgtctgcttttggggagcctcaggaaggttacaatcatggtggaaggcaaagggggagcaggcatgttgcatagcaaaggcagaagcaagagagtcggggggaggtgctacacacttttaaatgaccagatttcatgagaactcgccattgtaaagatgtaccaaaagggatgatgctaaataattcgagaaacctgcccttttgatccagtcacctcccagtaggccccacctccaacactggggattacatttcaatatgacatttgggcagggacacatatccaaattagatcagcttcttgaagatacatgagtcagtgtacttacatgaaaagagaggtttttttttttttttttctttgaggcagggtctcattttgtcacgcaggctggagtgtagtggcatgatttcagctcactgcaacctctgcctcctgggttcaaggtgattctcttgcctcagcctcccgagtagctagtggaattacaggtgtgtgccaccatgcctggctaatttttgtatttttagtagagatggagtttcaccatgttggccaggctagtcttgaactcctgacttcaagcaatctgcctgcctcagcctcccaaagtgctgggattacaggcatgcaccactgcgtccagcctgaaaagggagtttctaagaaatcgtctcttatgtgacaccattggaacctgcagttacttgaaaaaggaaatcatttaaaaaaaaaatagaaaagtgtgcattaatttgatagtttttgatgtaaggcttgattccaggtctgagttcttttgctcacttctttatccacatttattctttaggtgatctcatctagttgcatacttgaatacctgataatttcctatcgtgtattacctgcactggcctctatcttgaattccagatttgcctatctagtatttttacttggattcaaaataagcatcttaagctgattttgtctccatctcctctacctcccatggcttctctatatcacagtaaatgtcaacattcacctagttctgcaaaaacccaggagctaccctttcttctttttgtactcaaacttcatatctagtcctaaaacaattgttagagcttttcccttcaaattaaatctcatatccattcaaataacaccctcccactgctatcataatatccaggccaccagcattttttacaagattactgtaaaagcctcctaagttttccacttccatttttgtgcctacctttcccatctgttccatgtggaattcagagtaatatttttaaaaccatagttaggtstggtggctcaatacgtggcacagggtgggtgtcagtatgtccttgtgtattgaatgtataaatgagtattgttctgctgattttgctgatggaatttcaagttgactttcctgtgtaaattacacccgcagactgatattgcctattattcgttaaagttgattaaaaccttcaagaccatggtgaagcaaacttgaatacagaattcctttagtacatttttttcttcccatctagtttagctgtcttatctacagatagttaattagacaaacttttttggtgattcaccttttatcaaggctttttgaagcattcagtttcattttctataaaactttactttttatattctcagtttatataaaatttaaattacgtgatgaaaataagttcagctggcatgaacgtgtttgagaaacacaactgactcttcatatgtctagaactttaactgattggaataggaattggacttaytagaaagcagtagcctattttatttttgtcaarctgaaattagccatgtccatcagtcagcatggcctctgtatgctttgcacagggtatagaaggcatttggttatttgtgtgaattgataaattggagatcactagtagtttttgttttttgttttttgttgtttttttttttgagacagagtttcactcttgttgcccaggctagagtgcagtggcacgatcttggctcactgcaacctccacctcctcggttcaagcgattctcctgcctcagccttccaagtagctgggattataggcatgcgccatcacacccggctaatttttgtatttttactagagacggggtttcatcatgttggccaggcttttcttgaactcctgaactcaggtaatccacccgcctcagcctcccaaggtgctgggattacaggcgtgagccatcgagcccagcttagtagttttaatgtatgttaactacataattgccaaggtcccttctagttctagaattgtatgatttctgtgatggtaataccaaaataatttttagtattataaaagatataacgataggtttttgaaatttgacataaaattcattctcaaatatttttatttggtttgggttgcatattttaaataattggatattagggtttcctagagattaaaaaatgctatttaaaaaaaagagaattctattgactctggttacttttgccatttttatcttatcctatctgtcttctcaatagcaacagcaacaacaaattaaatatcttaatgacacgtatttttatttagttttcttgttttaagtgatgtaggccagcaggagttaaaaggctgtaatagaatgacttaatattaaattactgtgctacagtgtatatgtcttagagaatgtgctgccaagccttttattggtattatgtatggtatggggtcagattctaattttgaggttaaaataccctttttaattgtctggcttagtgttaatattttttgcaattaggggcataatttggggtaatgtgggaatagaaaggaaagattgaatgaaaggaagataattaaaaagaagaataaccatcagagtagagtgacatgtaggtttttggaaaaggaggagtcactgattatattttgagatcccatgaagagagacataacaaagttaaaaggaactagtttagaaattaggataagcttaattttaggtgtatcaaagtttgttttaggtgtattgaggttagggtaacagtgggatatcccgatacagttggttagcagggactgaagctaggaagagaagttgggactaggtgtgtatttttaattggaaacagtcttttgagaggtgataattaaaattagggtaatgggtgagaatactgaaagaggagcatatagcaagacaaaaggaatggcagtcttttctatttttttgaaacggactctgtctcaattggtcgcccaggctggagtgcaatggtgcaatcttggctcactgcaacctctgtctcccgggttcatgcaattcttctgcctcagcctccctggtagctgggattacaggcatgcaccaccatgcccagctaatttttttgtgtttttagtagatacaggattttaccatgttggccaggcttgtcttgaactcctgacctcaagtgatctgccctctgcagcctcccaaagtgctgggattacaggcatgagtcaccgtgcccagccagtaatggcagtctttatgattatgatttttaaaaagtatattttaggccaggcacagtggctcatgcctgtgatcccagctgctcaggaggctgaggcaagaggatcagttgaaccagggagacagaatgcagtgagccgagatcacgccgctgcactccagcctgggtgacaaagtgacacttcgtctcaaaaaaaaaagagagagagagagaaataaaaaaatatattttacatgttaaacttttttgtattcaaacttttatggtttatatcattagcgataagcctcaatgcccctttcccacccaaagatgatataaatatttacaatgtttttstaatacatttagagttttatttacacatataaatctttgttccatctagaatttacattgacactgaggttacactctaacttctttttccccaaatgatgatcattttccacaaaatgatggccagttattccaacactacttattggatcatttccaattcagtgaggtaagtaaatataagtgttaatgtaaatttttaatattttacgatcatttctaggctatttaatttttaaaatgtggattttttctgatgaaaaatacaatcatagtaaagaattcaaatgatacgaagaaagtgtctgtgtaatatcacccataagaagataagaaatacaacactggtagtagttttaaaatatgaaaatataaatgtgcatatatgcacatatgtgttaatatgaatgtgtgtttacatggaaactttgacatctctattcacaagtgtgattaattcatatttttcttttgggagctaattttgttaattttaacaatgagatcatgttagccttatagtaacttcctatcctttttatgcccccaacagtataaataacataggacttctgtgttccataaacctttgctagaattcacctataaagcaatttgggtcaggggtttttgagaggagtcagattatttttatagcaatttcragattcctgtccagtccacacatcaaactgcccacatcaaacccctagttaatacatgaatttagcctctaatttagtagctggtgactctgtaatctactttcattctttctcctctggaaggtttattgagtcaataattgatacctgagctaagctttgcccatttggaatttggaaaagggatgcagagactgtagtcagttggtattgggccttggcactgagtagtcataaaaaatagatatctttgcatagaaaggtggttgtagaaagacaaaagaatgaacacatatgcagaaaggaacaaacaagagagaattcaattccaaaaaggagttgggttctaacattccagaatccttagacttgactatactacttgagcacaagtttccatgaaatactcctatattcttccaatgcttttttttgtttgtatgacctagtttgagtagatttctgttcattgcagtgaaacaattcctgacttagatcatctttgacatactttttatttcatttgtgtttattggttattctaggtttcttgtcagtcagtttgataattgaatttgctattaatgcatattttcctaaaatacctgccgttaaatctagtcttccattctcacatgtattgctaaagttgtataccatatcttttatttaataagtaccacaattgctatgatagtccctttcttacattactaatagatatttatttttttcttctttttctttcttcgacttgctagatgtttttatactttattgatcttttcaaagcataactcctatggaaggaataaagaatattgtcaaagagttacctccacaaaaaacatcaggcttagatagtttcatagttgggttctaccaaagtttaagaaacatgtgacttcagtgatatataaattgttctaaaacatgataaaagaagaggaaacaatgtgtagaattatcaaataggatacagaagcatattttaaatgtatatcctacattcatgttgaaaatgcaggaataattcagtattggaaatatattaatatgtcattatattagtagatcagagtataattatatgatcacttccatagatgctgaaaatacttttgataaagttcaatatttattcctaataaaatttagtactaaaccagaaatagaaggctaccaaatcagctcaaaagtcagcatcatgcttaatgggtaaaatttagaagttctacaaagtctggagcaagatacaaatgctggctgtcatcactattacttattgtgccagaggtactaactaatgcagtataaaaggtataaaaatggaagaggaagtaaaatttattgctgtttttaggacaatattattatatcccaaaatatctaggagaatcaactgaaaaggtactattaataataagagaatccaggccgggcgckgtggctcacgcctgtaatcccagcactttgggaggccgaggcagggggatcaccaggtcaggagatcgagatcatcctggttagcacggtgaaaccctgtctctactaaaaaaaaaaaaaaaattagccaggcatggtggcaggtgcctgtagtcccagctactcaggaggctgaggcaggagaatgstgtgaacccgggaggcagagcttgcagtgagccaaggtcgcgccactacactccagcctgggcgacagagtgagactccatctcaaaataaataaataaataaataaataaataaataaataaataaataaataaaaataagagaatccagcgatgtggctagatacaatttttattagccttaggtgcagagaattagtttaagacattatcattacaggtttatgtaaggtctcttccttgttttctttctttagcctcctttattcctatttgaatttcccttctcccatacataaatgcattgtttgttatacagtatacattgtggttatattctaatatatttatctttttgtaactgtgtgttcatgcaaaacagatattgttttatgtgcatttatttttaacttacataaatgctattgtgttgtatttcttattctgtttttttcccacaagcactaaatgtctaagatgtactcatgttgatactgctaatccattgcttctaacagctgtataatgctctgtgagacctttaccatattatatctgttatcttaatgatagctacctgtttacttctagtttcctgacaccacaaattgttctgcactgaacatccttgcacatgactctgtgttaagtatttgtttggagtgtatatacaaatcaatagaattgctgggacataggttagccccatatgtagtttgactaagaaatgccagattgctattcacagtagctgaacaagtctatattcccactaacaatgcatgagtcttctcatatccttatgtcccaacatttaaaaattatccagctttataaactttactgatctaataagcataaactgatgtttgattcttttaatttgtacttttctagttactaagtttgagcatttcttatacatattagttttggaggtttttctttctgtaaattaccttttaattgtcttgttcatttttctgttgatgtgctgtcttttcagttttatttgtcgaagtttaaagtatatatatgtatatatactttatatatatacttaatatatattacatatatactttatatatatacactatatatacactttatatatatactttatatatatatactttatatatactttatatactttttatatatatactttatatatatatactttatatatatatactttatatatatatactttatatatatactttatatatatattatatatatactttatatatataatatatatataacaaacaatggctacaggcacctgaaaagatgttcaacaccattagtcattaggaaaatgcaaaacaaaaccacagtgcaataccacttcatatgcaccaaaatgactattattgaaaaaattttatacaaaaaattagctgggcgtggtggcgggcgcctgtagtcccagctactcgggaggctgaggcaggagaatggtgtgaacctgggaggtgcagcttgcagtgagccaagattgcaccactgcactccagcctggatgacagagcaagactccatctcaaaaaaaaaaaaaaatttaaacggaaagtaattgttggcgagggtgtggagaaattggaacccttgtacattgctggtgagagaataaaatagtacagctgctgtagaaaaatttgccatttccacaaaaagttaaacatagaattaccagcaatatcactcacagaattccaaaagaatttaaagcaggcattctaacaaaaacttatacatgaatgtccatagcagcactattcacaatcaccaaaatgtggaaacaacctaaatgtctgtccactgatgaatggataaacaaaatatggtctcttcacatgatggaaccataaaaagaaatgagatactacaacatggatgtcagacacattctaagtgaaagaaaccagacaccaaagatcacatattatatgattccgtttatatgaaacatccagaacaggtgaattcatagaaacagaaagcaaattagtggtagctcggggcagggggaaaaatagagagtgattccttaatgggtacaaggtaatcagtacagggttttcatttgtgatacaaatgttttggaactagatagaggtgatagtcacagagcattatcaatgtactcatatgccactgaattgtacattttaacattattaattttgggctgagtgcggttgctcatgcttataatctcagcactttgggaggctgacaagggtggatcacttgaggtcaggagtttgagaccagcctgaccaacatggtgaaaccctgtctctccaaaaaaaatacaaaaattagcggggcatggtggcacatacctgtagtcccagctactcaggaggctgaggcaggaattgcttaaaccaaggaggcggaggttgcagttagccaagatcatggcactgcactccagcctgggcaaaagagtgagacgctgtctcaaagaaaaaattattagttttgtattatatgtattacaattttacctcaaaaaattgtaatcaaatagtttccctatatatcagagattggcaaacttttaatgtaaagggccagatgataaatattttaggtttttcaggccatatgatctctctctcagctacccacctctcctattgtagcatgaaactaattaggatgtctgtgttccagtaacactttatttacaaagaaggcagtgagctggcttgacccatagttggctggccccttgctacatataagcaaccagttagcaaatataacaggaagaaaaattctgtgtataatarcaacaaagagaaatacaacaatctagagataaattcagatacaaagagaatgatgattggatcttgttctctactgaagctcttgttcttatggaatagttaggaactgactgccttatggcccatggaacatcctcggttgagaacatctgtcagaaggaaacctataaattatcattcagtcagtttcaagattccagccttgtcacagactcctgttcattgtcttccttctcctgtcccctacacttttccaacaccttcttccccccattaatctgcagtctggtatctttctgtatagactgttatttactcctagtcatggaagggcctcttttccagatgtcacagatttaaaatgtgaaaaacaaaactataaaagtagtagaagaaaactaaggaagttttttttttttgcctttgaaaagagaaaagtcttcctaacatgcagtcctaaaatcaaaaagaaaagattgggaactttagataatcataaaagttgtgcatgccgatatcaccatgtcagcatctaaagacaacatcccaagggataaaagggagtctgtgagataaaatttgatttccttaatatataaaattctcttgtgtatcagtgaattatgagttccagtagattgtaccttttgtcaatatagagtcgatagtatagactaagtaagggctggcaactttcttgaagagttagacagttaatattttcagctttgtgagccacacatagggtctctttctcatattcttcttttttttatgcagccctttaaaaattaaaagcctttcttaacttgtgggctatacaaaaacaggccacaggtcagatttgtcccatgggccatagtttgcaaacacttctgtagactatttcctatttgttttattgagtccttttgagagaccaaggtgggaggattgcttgagcccaggagttcaagaccagcctgggcaacatagtgagactcagtctcttcaaacaaacaaatacataaataaaattagctgggtgtggtgacatgtgcttgtagtcgcagctactcaggaagctgaggtgggaggatcacttgagcatgtgaggtcgagggtgtggtgagccatgatctccagtgccactgtactccagcctgggcaacagagcaaggctctgtcttgaaaaagcaaaaacaaaacaaacaacagcaacaacaacaaaattaatctaagccaggcacagtgttgcatgcctgtaatcctaacaatttgggaggccgaggcgggtggatgttgagctcaggagttcgagaccagcctgggcaatatggtgaaaccccatctcaacaaaaaatacaaaaattagccagatgtgttggcacatgtctgtagtcccatgtagtctctgttacttggggagctgaggcagggggatcacttggacctgggaggtcgaggctgcagtgagccgagatcgtgccactgcactccagcctgggtgtcaaagtgagaccctgtcttaaaaaaaaaacaaaaaacaaaacttaatctaccatctagaaataaccatcttaaacattatgtaaatcattctgggtctctctatgtacatttaaagataaaaggatgaatggatatagagaaatgaagatgggatcatattatgtacaccattttaaaataaaaagaagtaaatttacttgaatataacaaggaagtaaaatgtaagaatagctaaacttaggataaacttttaaaaattattttagaattatgattttactgaactgtaaagttggtgttgggggatgggcaataatcttcactttcccagtttcggactaatcaaaggagagatgcacacacacaaaggagggttgtactgtcagaaataatattcactttattcctagtaaaaactaggttgtacgactgtgtagtcagaatgagccttatgatactttatttttgaattagacttatttagcaacatagtcatagactgtgcttgtcaaccacagcaggagtggataatgcctctataattttactgcatgggagaatagaaactacatcctatagggctgggttgagcatgtgtacttccttgttttttaatgcagaggcagagataaattgaagatgttccttttactttttcatcttggttgtgaagtagaaattgcttccatttatgaaaatatgaaatgttaggaataagtgtctcattttgggcaacgtccaatttccttatctttcatggtatggatcatttaacatactgtatttctttctaccaccagtgccagattattcttactttgttgaagtttataatagttctgttttattttgttctatacaccaaaattcccagttatttttactcttttttttttgaaacagagtttcgctcttgtcacccaggctggagtgcaatggcgcaatctcagctcactgcaacctcaacctccagtgttcaagtgattctcctgcctcagtctcccgagtagctgggattacaggcgtgcaccaccacgcttggttaatttttttgtatttttagtagaaacaaggtttcaccgtgttagccaggctggcctcaaactcctgacctcaggttatccgcccgccttggcttcccaaagtgctgggattacagatgtgagccaccgcrcccggcctttactccttttttttcagacagagtctcactctgtcgcccaggcttggagtgcagtggcatgatctcagctaactgcaacctctgcctcctgagttcaagcaattcccatgcctcattcctgagtagctggaattgcagacgcgtgccaccatgcctgactgatttttgtatttttagtagagatggggtttcaccattttagttaggctggtcttgaactcctgacctcaagtgatccacccctcttggcctcccaaagtgctgggaaaatggtgtgagccaccatgcccagcccatttttactcctaaataaattcagaacttatcagcagtccttttatctccatttatctgttgtttggcttgatatcattgtccagcttttgcccctccctcaagttcttttagttagagaatgtctgttgctccattagcatgataatctggtggaattatttttcttctaacatatttgtgaatactttttctattccatttgttgtgtttactgtttgaagtttactaattaagttagattggttttgactctcctgtctttttgtggtttctgtcatttcactgtttttctttcaaattattgtgatctcctagaaacacctacatgtcatagttatttggcgatattgtgtggattctgcccatttctatttctaagttattctgtattttgattttcagttttgttagctttgtggtctttttatgtgcttccactgttgatgatttttgtcttctgttttaactttattgaagactgccaaactgttttccaaagtagctataccattttgcattctcactgactatatatgagaccagctgctcctcatccttgtcaacatttggttttgtcaggtttgttctttcccattctaataagtatgtggcggcatctcattgtggttttaatttgcattttgttgttgtctgttttaatgtacttattttccatctatatatctttggtgaagtgtgttactctaatcttttgctaattttttattgggttgattattttcttattactgagttttgagagttctttatgtattctggatattgtctctctttgcctagtttatttcacttagcatagtgtctctacatgcattcacatcacaaatgacagaattttctgctttttaaaggtcgaatagtattccatcccggtcrtaatagaatatttctataattacagaaagttctctcataaccctttttgagtcaatccattcagggaacttaaaaaaaaataagtatactctcagtttctaccccagatctatcaaagaagtaatatccagggtggcgcttaggagatttattttgcaaacccctgtccccccaaccccagtatgaatataatgagccctgattaagaactatgacccagctggacgcagtggctcatgccttaatcccagcactttgggaggctgaggcgggtggatcacatgaggtcagggattcgagaccagcctggccaacatggcaaaaccctgtatctactaaaagtacaaaaattagctgggcgtggtggtgcatgcctgtaatcccagctactctggaggctgaggcaggagaatcacttgaatccaggaggcggaggttgcagtgagccgagatcgcaccactgcactccagcctgggcaacaagagcaagactctgtctcaaaaaacaaacaaaaaaacaaaaactatgacccagctgggttatatattgcatttaccacatggcctagattaccctgtaacatatttgccccctagcctgttgcattttctttccctttaatctccatgtcagcattgaaaaacttgccccaaacatagctttaagtggtgaggcagggaaacaaaagcaaaagaactcatatattagaaatccctaattctcctgagttccagtcctttttatctatttgtcaggtaattgacaactcaaccaagaatatttaaaaccaaatttatttcttaattaatagcgtatcctctcagctcctaagctagaaacttagtgccatttttgaagtttcctcctcttcttggatgtaaaaatcctattggtttccacctctaaaacagctttaagtctgttccatttgtgtacactgcatttcttgcttagaatattaagactccaaaatggtgtcttgagtcttcttaatccaagatcttcctcactgctggcacagttttgtttctaaaattgagttcacaaactgggaaataaagagaacaccatgaaatacatatttttaacttaaaaataaataaagttttgtataaaatcaaatactaccttatatacacagtatcctagtatagcaaatgtcagagaagcaaatgatagtcaagttttaaattgagaaaaacttaatcattaatgaatgttttaggaagtagggaaatatttgccaaaaagactgaaattcacttatgaagctattgactggactgttctggaagaagaggcagaataagctatttgacaatattcttttatcgtatgacgttatggataatcctgtattcatggtatacaatgtaaaagagtcagtactgttaaatactggcttgaatatatatttccttttgtttgaatgcaactcccagtgtgcattgtagaaatgaggtatttgtacttctatggtgtatgtatgagggagatctgcaagataacttactattttatcacagaaaaaccaggagaagaaattcttagtttaatgattcttttgtgactttttttagactggaaaatatatattatgtcagcgctgacacagtactagctttgagcatcaaggaaaaactaagttttaagtgatagtagaataaaataacttgtactgtaatgtaattgctgacattgttttattcagaaaaaagagttggtagtcaacattttgcttcctaatcatgattaattgttgaatgtaatacaaattatgaatataattaaaactataataatcaagtgaaaattgtttcatcttcctgaaaatatcttgagtcaaggctttggtttccatttctgaagtatattataaaaacaaaaggtgctcatgtaagtttttgaaatataggatgagatgaaaacatttattcataatacgatgtcaataaaaagttacttctgtgactttttagtttccggaatagagccaaaataggatttttaatgttgaatgttgaggataagataatagggtttcttttctttttttttttctttttttctttytttttttttttttttgagacagggtcttgctctgttgtccaggctggagtgcagtggcacaaccttggctcactgcatccgcctccacttccagggttcaaggagttctcgtgcctcagcctcccaagtagctgggactacaccactgtgcctgagtagataataggatttctaaagattgaactgtgatggtgaagtttaactccttcccagcattggataattttgatcacttgtttagagaaagaaattaatgatatgctagtggatatggtaagaaaaatgtgtatttttgtgcattgaaataggatttgaagaaatattttccaagtccaaatgcaactaaagaatgtattaggggccgggcgcagtggctcatgcctgtgatcctagcactttgggaggctgaggtggatggatcacttgaggtcaggagttcaagaccagcctggccaacatggtgaaaccccatctctactaaaaagacaaaaaaattagccgggcgtggtggtggatgcctgtaatcccagctacccaggaggctgaggcaggagaattgcttgaacctgggaggcagaggttgcagtgagctaagatcacgccactgaactctgtactctagcctggacaacagagtgagactccatcttaaaaaaaaaaaaaagactgtattaggaatcagtttattactatttcctgaattgaagcatttggctgtcagcttttttagggttcactgaattaacttctgagtgcttatagtagtgagccatcactaataaggtaaagagacactggtaaaatattgtggtagaaaacgatcattgttattattaattaaaatatgtttacattttattaaacattttaatatattttctattaatttacctgaatttagtggtccacatatatgttaaatagttgttatagccatagatcctttaatgaactttttaataaaagtttgataagaaataggagtttaataaacacagacttccagctttttgggaatctcagtaaagagaaataatttttttggtttgtttgatttttgttttttgagacagagtctcactctgtcacccaggctggagtgcagtggcgcgatctcagctcacaacttccgcctcccgggttcaagccattctcctgcctcaccctcccgagtagctgggactacaggtgcccgccaccacacctggctaattttttgtatttttagtagagacggggtttcactgtgttagccaggatggtatccatctcctgacctcgtgatccgcccacctcggctgggattacaggcgtgagccaccacacccggcccaaatttttttaaaaaagagttaaaaggtcatagtttctcttcagaaagacctgcgttcagttcctgatttgagcatttacccactaacaacatgtgtgacctgggtaggatatttaacttttctaagattgtttctttatttttaaatggagataatactatcttagtctgttgtgtgctgctataacacagtaccaaagactgggtaatttttaatgaacaaaaatatattgcttatgggtttggaggctgggaagtcccaagatgaaggggctggcatttgataggaccttcttgccccatcatcccatggcagaagagcaaagagaggacragagagagagagcaataggaggctgaacttgtccttagatgaagaacccacttctgtgataatggcattaatgaaatagagccctcctggcctcatcacatcttaaaggtcccacttctgaacgttgttgcattggggattaagtttctaacatgtgctttttgggggacacattcamactatagcaccacatatctcatagaattgtttgagtattaaatgagataaagaaaaatacttagcatactatattggggaaattatactcagtaaaatgtatattaatatcaacgcatataatatcaatattttgttcttttatgttacatggatggggactacaactgatcactctgatccagattaaatttgatctcagattacctttgatctgcatagtaccaaaatatttatttatatcacacatatttattaaaaacagtattatttatagataacaataaattggtgaattacactgagatcacataataggcttgaagttaactaaagcctgcaggtcttgttcatttcacctgctgccaggctctgttgagaggatttctgaacctaaatgcagagccttacctgtgtagattcattttgttttcaacccagtgttcagttgtttggtataattctgagttctgtcactgtgagatcatcattactatttatgttgatatagtatacatcatctactggttggatatcatggattttgtttgatatctaaattggagaactatttattaaattgtacagctgtatatagatgactttagaagtcttgtccattattttttcaaacctgtattcatgatcaggcatggtagctcatgcctgtaatctcaacactttgggaggctgaagtgggaggattgcttgaggccatgagttcaagaccagcctgggcaacatagcgagacttcatctctactaaaaaaacggaaaaaaaattagacaagtatggtggtgcccactagtttcagtactcaggaggctgaggcagaagggccacttgagccagggaggttgaggctgcagtgagctgygatcatgctactgcactccagcctgggcaacagaacaagaccctgtttcagaaaaataaacaaaatctctattcatgtcccatttttggttatgatatcaatttggggggttgtaacttacattaaaaataatgaaatagactagaaaatattaggcacattatgtcataagagcattctgttttatgaaacttttgttttagttacatacaccaaacacatacatgttagttgcactggatcatttttcttactattaatatgagggactgccagaaagtttgaatgtcactgatttcgtccacttattaratgaggaaataggtccagtgagattaaaccacttgccctaggccatatctgtgcttacagtgtcttaatataaaacgtgattgattagattccaaatccttttagcttttttgtataattgaaaataattatgaaatcatcaagagctgtatgggtacagaaagcctcatgataggctcattggtattagaatccttattccaggttagaatttattcattcaacaatactttattggctacaattcatccagttaaaaatcttatcaacattcagaattttctgtcttcgcaaaaagcatcatttactttgccatatactattgtcatatgttattgccagtctaataatcagaaagtgaaaagaggttatcttgacatgaccttattagtaattcagttttttattttagaacaagctctgttttctaagtacttctaaactttgtttaataaccctttatgttactttcctgaggaaagtaagcacacttactggcttgtaaggaattttccccactgatagccacctttaaaaatccaacttgttttttcatctccagtcctgtaactattttctcaacttgagctcattcattgtgtctgtggtgttctgttactcttgccaagaggtttatcttggacttttgttctctctttaggtttgtacactcctatttaaagtttcttattgaagcgtgtgagtgtgtgtgtgygcatctgtgtctgtgtgtatgtatttaccaggtgctagtggaagaggacgttctgcattctctctgtcatttattaatattatattattctgagttataggcttgtattctctttgttaattttcttgccatgagcatgaattttaaaaggagttatattctcatctttaacttttttttaaacttcagtttgaatattcctgacactttatatatttgtttgtttttttatttttgagacagggccttgctctgttgcccaggctggagtgcagtggtgtgatcatggcttactacagcctcaaactcctgggctcaagtggcctcagcctcctgagtaactgggaccacaggcacatgccaccatgcccagctaattttttttgttgtttttttggagagacggcgtctcactttgttgcccaggctggtcttgaactcctggcctcaatcagttctcttgactcagccttccaaagtgttgcagttacaggtgtgagccaccagtcctaaccttaattaactcattcttattttttcatttatttattcattcttatagagacagggtcttgctctgtcacccaggctggagtacagtggcatgatgatagtccactgtggcccccagctcctggactcaggtgatcctcccacctcagcctcccaagtagctaggagtacaggcacataccaccacgcccagctaagctgaaacttttcttaaaggcttttgtttgtttttgcagttttactcaattatatgccagtcctctcatctttgaaatgtgggtttrtgagaaaactttggagagaaagaaagaggcattcttctattccctcactcctgatgttagattccgctcgttttactcattcacgagtgggtaggcagggctttctttttaaattcctgtgccatattgcctcctgatttgccaacccattatttgctgattattatttatgcctattaagtgacaggcactccataaatctttctacttggcatttattgggctttctttataccattttcattgtttagtcagtgtagatttttcaatcttgttaacaaaagtatgactaagtattgtacaatacttactgcagtatattatggtgcttatgtaactatttgctcttctgtattgtaagtacttaggaggcatctaatgcagtgacttcattttctcttaattttttcttttttttattgttacatgatagctttacatatttcttacatactagacaatcatctgtaatcactttacttctgcctaaaatatatcatttagaattttttttagtgacatcttttggagacaaactcttttatcttttatcaaaatgtctatatgtttgtcttaattcttgaaagatatcttcatgaatatagaattttaggtttctgggtttgttaccagtttattgaaaatattctgttgtcttctggttacctttattgctgttggaaactgtttctcctttgaatgtaatttgtcatctactcctatcctctagctgctttgaagatttttctcattttttgaaagattatttgtgggaacttcctgaggccttttataaggttgtcttcctctagaacaatcttttggcttccctgggccacattggaagaattgtcataggctacacataaaatatactaacattaatgatagctgatgagcttaaaaaaaaaaaagtctgtgcttaaatctcataatgttttgagaaagtttacaaaattgtgttgggccacattcaaagctgacctgggccacatgcagcccgcaggccacaggttgggcaagcttgctctagaatttgaacttacttcttaatggcattagagtcattaccactgcagggcactttaaatttattgtttgagatttcttgtgcccctctgatgaaaatccacctaagggctggccagtgcttacagcctataaattctttactttttatttatattttccatctttttctgctgagtgccaaggcaacctcacaaaaggtgtggaggaggattttgtttctggttcacgtcttccctaacgatgtctagccttttggcatcttggcttaatgttttggagtatcttagactctctgtcttgagctggttctaggctttaatttctgtccttgtaccgtgaggctgtcaaaaccactattaaggttctctgggattattagcaaatgttcttagggcaaaaactaattatatgttcgacttagcttttggtttgggaattccttattgtcttgccaactctttagggagatattttatatatcttaaccagtatttttgtttgtttagaccaattagattgatctaaataacctaagctgttacttgaaattgaaacccatttagctttattcttgtttgatataaatatatgtagtatctatggttattttgcccttttctttcattctttttttttttgagacagggtcttgctctgtctcctacactcaagccattctcctgcctcagtctcccaaagtgctgggattacaggtgtgagcaattacacccaaaccttttcatttttgatattgcttatttgtgtctcctaccttttgtcctgatacatttcatcagaggttggttagttttattgtcttttcagacaaccaactttatttgccttcactatggtaggtttgttttttatttcagaatgtgttaattttatttctttgttctgcttttttttacgctaacttattgaaatggagttagcctattgaataccctatttagcctattcaatttaataggctgaattcttaggctatttttagcctttcctttttatctgatacaattatttaggtgtgtaaatatccctctaattgctactgtagttttattccacattctctttaatgtggtattttcattattcagttcaaaatattttctaaattttgttatgatttttttctttggtctgtgaattatttagaattatatcctttgttacttataatatttattatattccaaacatgcaaagttttctaattgtcttttcagtattaatttttagcataaatacgtcaaggtcagagactatgctgtaaataatttcagttctttgaaatttatatagacttttttttaaatggtccaatatatgctgaatttttaaaaatgttccatgtgtatactgctgtcttcattgttattagacgggatattctttgtttttccattaggtcaaggttgttaataagttgtccaaatcttctgtactcatttttggtctgcttatctcaattattatcagaagaatgttaaaatccccacagtttaatcatagatctgtctttatttgaagctctgtcatttttactttatacaatttgaaatgctaaaattaaatatatgttctcctggtgaagtgaaggcttttgttyttatcattacgaggtgtggagaaatgtgtaaaatatgtatatatttagatgattattaacctggttaaagtcattatgaacgtgactttatagtatatttctttacagttcattatgtttataattaatatagctatggcagctttctttggtatgtttatagtcaacttttttgtatccctttttttttttttcaaactttctggagtcttttagatgtctcttgtaaatagcatatattaacttttgtttatttagtctgatagtttttaattaattgaagcctttcrttagtctgtttacatttgttataattaccaaagtatttggatttattgtcatattattttgtgttttctttttgtccttcctgttctattttttaatattcttttaaattctgttgttttaaatttcattaatttctttctaataactagatttattaatttatcagacttaataaatttattaattaataaaataattacacattattttagctattcttttagtgtttactctagaaattaccagaagcacattggttaatgtctaaagttaatcaataattttgtctatttattagataattcaaggcccttgaaacgcaaactctaattacctttcttctgatttatatattctaattctggtcatttctctgtttttgtttttaaaaaccaaaatatattattcttgttttataaggccagtattcatttacccacatatctactatttacaatgttctttattcttcctagcatctcagctcttccattggggaacatttttcttttatctcagatgtatcttttagaattctctatagaaaaagactggtgatggtaaactctcttaggtttgtttgaagatastggccttgtttacactggatatagaattctaggttgacagtgattttctctgagcctgttggggatgtagttatagtcagctgccactcccactcatactttttttgggggtaatatcttgtttctttttgtctaattttaaatattctctttctctgacatgttctgaagtttttcgatgatgaatctccgtctgagtttctttgtatttacttctcttggatttacagtgctccttgaaacctgtctgttgctatctttcatcagctttgaaagtttttcagctgttactttttcagatcttgctttgccttgctttattttctctttttggaaatacatttgtagccggccaccgtggcttatgcctgtaatcccagcactttgggargccgaggcaggcaaatcacctgaggttggaagttcgagatcagcctgaccaacatggagaaaccccctctctactaaaaatacaaaaaatttgtcgggtgtggtggcacatgcctgtaatcccagctactcaggaggctgaggcaggagaattgcttgaacccgggaggcagaggttatggtgagctgagattgcgccattgcactccagcctgggcagcaagagtgaaactccgtctcaaaaaaaaaatacatttgtacgtgtgttagacatttttactgcactcttttattttcttcatattttccatctctttggttctctgtacttcatttttaaaaatgtctttttatcagctattctataaatgttatttttaactgtatctgttaagtttggatttcaattattatatttttcatatatggagattttctttggttctttttcaaatctgccatttcttattccttgctttttttactttaaacatgttgattaaattatatkggctctgccttcaaaatgtatccaagttcggaccatctcatgcttccacattaactaccgaataatttcccttcagattctctggttctctccttcttcctcttcagctcattgtgatccttcataatcacaagtaggatcaatctctagtggcttatatctcagagtaaaaggcagagcccttaccatagtctacaagatgtcatgtgaactggaacttgataactttctaacctaataatctcttgccactctttcrctctctgtgctgtggccatactggttttttgagtattctttttaaagtgccatgcatgttcttcacctgtgttgtacatctgctgttccctctgcacaaaatgtttccttaccagcactgcttgctctccaactttccttcaggtttctgcacagatgttctattatcagtgagtattttcttgacttgtttcatataaaataccagtctccattcctttattccctgaagtcccagtttcccctttaactttatgttattcagttattaccatttgaacagtttgctttactgtttttgtattattctgtctttactccctctccttctagaatattagcttcaaattgtaggaagtttgactttaaaaaaccacaggtgtgtttctaatatctagtacagtctttagtacataagttctcaataaatatttgttgaataaataaatgattataaagtgttattcaagggactgcccttgtggtaaagaggtactgtcattttaggagagtctcaaatctaattacgttagattttttagaattctctatagtaaaaggctgctaatggtaaactctcccaagtttgtctgaagataccatccytatttacactgggtatagaattctaggttcttttatgaccttcttgattttctttttcttgtctttctctttaaaaatcatccttaccaagtaacygttagaaaaacctcgtgcaaacttgggatagttgtttacaatttatatcataggtcagaaaaatcagaataattttcagcatttttgaataatttttttgagaagggaaatttcttttagactacagaaaatcattatatatagttctaagacaatttgccttttacaaatgcttaacagattttatttaattttatataagtctcctaaagtccccaagtagatcttctgctgattttccctcccctttggagtcacaatatagtgttctttaaaaatagataaaaattagtaggagccttagattacaattacctctatgtggtttttgaaatcatggtggcataagttatatagacttgtgctagtgtaattcaactctagaaggtatatatacttctattacagatcattttatgctgctgtcacaaagtgaaatgctatgatagttaaaaggcccatatcaaagattatcttcgtgaaactttatggaccttccttgacagattgactcctctgtgccatgaactttaataatgcagtttgataggtaatatccatatcttattctcattaaatttgggaggcttcaaggatgggaattctgtatcttcttatttatctatttttaaagctttattgattttttttaactcaagaaaatacccaaatgttgattgaaagaatgagtgaatgaaagtgcttcagatacaattttctgcattttattggtcactaatattttaccrtaaaaaggacataaaagcagtaggactataagaatatttaawaattaatacaggcctaaatgtaactttttacctaaataagataatgtgactcacaggattagttaagaatagttctgttgtttctgtttgtttgtttgttttttctctacataacacatgtttttcatataattacataacagctatatggttagggaacatttttattttcaaatgtgtaaacgcatgtaattgaaatttgttttcagtccatgacaggttcataaccctcttgtttgaaatttttaaactgtttctccacctttcttttgaaaaccacatcatatttagtggctatcttaattggatttattttgttgttctttcattattttcttttttctagagctctcatactcacttcctgttaagtctccttatcaaagtgtctgaatctttctgtcctgctctttctcatccattccactcttcctttctttcatgctgccccctccttctttcataattgacatccaaacacccatttgtcctttctaagactggttagtctgtccttccaaggctggttagtctgtctctgtcatctttacaaagatccatcttacaaaggtctgtcctttctgtcagcctttcttcctttttgtgttatttctgtttgtgctgctatgagggaacatctcagactaggtaatttataaagaaaagagatattttggcacacacttctgtaggctatactggaagctgctgctaacacttgcttctgttgagggcctcaggaaacttacaattgtggcagaaggtgaaagggaagcaggagaatcacatgacaagagagggagcaagagagaggggaggaggtgccagggtcttttaaacaaccaaatcttacatgaactaatagagtgaaaactcacgcatcatgacgatagcaccaacccattgatgaggtatctgccccagtgacccaaatggctcccccctaggcccacctccaatactggaggtcacatttcaacatgagctttgtaggggacacaatgtccaaatcatatcacttattctgtctctcccttccttttttggtgctacctgcctatcctaccttccttcttccaaacttccctccccttgccatctttcttcccagccctcctcattgtttttctctctacctttccattttttctagctttttcttcttctctttccattattcctattttcttatggaaagatgctctcttgcttttactttccccttgtgtctcccccactttgtcttttgtaaccactccattttctttatctccttacttccttgaatgccttagtttttcttccttccaactgttcttccacttgtatatctagttttatagcaattagggccatttctacagtaagtcccaaatttatgtctactattgcagatgtctagcttaaattccagaattatgtacatcattttataattaacaagtcctcttggatgtctcataggcacttcaaactaaatacatgttaaactgggcatttctacttctggaagtggctgatttggttgtcctagaccaaacaccaggtrtgtatactaaaaatacataggaaagctgagaaaatattttttaaaaatctctttgaagccatcagagagttacacagataataagaatttggctggacacgatggctcacacctgtaattccagcactttgggaggccgaagtagggagatcacttgaggtcaggagtttgagaccaggctggccaacatggtgaaaccccaactctacttaaaaaaatacaaaaattagtcaggtttggtggcacgtgcctgtagtcccagctactcaggaggctgagtcaggagaatcacttgaccccaggaggcggaggctgcagtgagccaagatcgcactactgcactctggcctggccaacagaatgagaccccatcccaaaacaaacaaaaaaaagatagtaagaatttgtggggctaagatctggaagaaaaggaaaaccaagataatcgaacttgacatttgatgctgttttttccttaatgcaaaagtcaattctgaaaattacaatggtgactgagagactgagcagaatttttagcagttgtgttgggctgaaagggaaaaaaatggagttcagagactaacaaggaagaggagccctggactatttcagcttttggttgaaacccctgaaaggcaatatcctaggaatagagtgagtaaaatatcctatacaagcactaaagtccatagggaaatcagcttaatacttaagtgattaatggtgttagatcatattttagaagtgtgccacaagtaaatgttaaggttctctaaaggaggatatctatagctttttaaatataatgtctggaacacggtaaaaaataaccaggcattttgaaagacaaaaaatgactgaaaccaggaggaaaaaaaccagacaattagactcataggaaatccacattagacttatcaattatggatttaaaaacagctgtgattaatattttcaaaaattgaatacaatagggaattttgacagagagctttaaatactcaaatgaaaatattagaaatgaaaaatacgatagctgaagttaacaagtcagtggataggtttatcagaagattagatatagctgaggagagaattgataaactgatagttcagaagaaatagccagattcaaacacaaaataataggatggaaaatacagaaaatagcatgagagacatacggtatttggtaaaggaatctgaaatgtttgtattgaaatcccaaaargagaggacagataaacagaatctgcagatcaaatatgaaggaaatctagaggggttttgccaggcaaaaggaaaatgattctatatagaaatacagagatacagaaagatataaagagcaatagaaaccataagtatgtggataaatctgaatgaatggctgggcacagtagcgcacgcctgtaatcccagcactttgggaggccgaggtgggtggatcatgaggtccagagttcgagaccagcctggccaacgtagtgaaaccctgtctctactaaaaatacaaaaagttagccaggtgtggtggcaggtgcctgtaatcccagctactcagaagtctgaggcaggagaattgcttgaacccagggggcggaggttgcagtaaatggagataatgccattgcactccagcctgggcgacagagcaagagtccatctcaaaaaaaaaaatctgaatggatactagcattcaaaaaataatataattgctttgaacagttattttataatagtacttgttttctatattagtctacctattggtttgtcaattttgtctttaaaaattttcattttgttgatcttttgtaattttttttagtctcaattttgtttattttgcaccaaccttgattggtttttttctctatgaattttgggtttgctttgtttttgcttgtctggttccttgtaatgcattgttagattgtttatttgaaatcttcctacttttctgacataggtgtttgtattagtctgttctyataccgctgtgaagaaatacctgagactgggtaatttataaagaaaagaggtttaattgactcacagttctgcagggctggggaggccttaagaaaccttacaatcatggcagaaggggaagcaaactcatccttcttcacgtggcagcaggaaggaaaatgagtgccaagcaaagggggaagcttcttataaaatcatcagatcttgtgagaacaaattcactataaggagaacagcatggtgggaactgcctccatgattcaattaccttccacctagttcctcccatgacactttgggattatgggaactacaattcaagatgagatttgggtgtggacacagagccaaaccatatcagtgtttattgctataagcttcttaatactgtttttgttgtagtccataggttttggtatgttggtttttaattttcatttgtttcaaatgaaatgatttaaatgtttaaatctttttcttaatttcttcattgatccactggtcattcagaagtgggttctttgatttccctatatttgtataacttcaaaagttcttgtagtgatttataattttattccattgtggtcagaaaagatacttgatatgatttcagttatcttaaatttgttgtgtcttgttttgtgacctaacgtgtggtctgtccacaagaacgtttcatatgccaatgaaaagaatgtgtattctacaactgtggaacgaagtrttctaaatgtctgttgggtccatttggtcttgagtgcagtttaagtccagtgtttctttgttgattttcttctgcctagatgatcttctcaatgctgagagttggatgattaagtccctattattgtaatggaatctatccttttagattgaataatatttgctttatatctgggtgctccagtgttggatacattatattaacagttgttatatcctcttgttgaattgatccttttatcattatattatgagcttttgtttctttttagtttttgacttaaattctgctttgtctagtgtaaatattgctattcctttttgcttttggtttttgtttgtgtggaatatctttattcatcccttcactttcattctgtatgtttcttacaggtgaattaagtttcttgttggcagaatacaattggatcattttgtttttaaaatccatttggctactctgtagctttttagtggggaatttaatcaatttattattcaaggttattactgattggtgaggtcttattcctgtcactttgttagttgttttgtgtattctttgtttctttctttctctcttattgtttatcattgtggtttggtggttttctgtagttgtaagtttttattctttttctaatttgtgttatctgttctaccagtgagttttatacttktgcatatttacgtgatagtgattattgtctttgtgtttttagatgtaggatgcctttgagcattttttttttttgaggcaaagtctcactctgtcacccagcctggagtgcagtcacatgatcttggctcactggaacctccacttcctgggttcaagtgattcttgtgcctcagcctcccgagtagctgggatgacaggtgtgtgccaccatgcccaactaattttttttttttttttttaagacagagtcttgctctgtcgccaggctggagtgcagtggtgcaatctcggctcactgcaacctccgcctcctaggttcaagcaattctcctgccccagcctcctgaatagctgggactacaggtgctggccaccacacctagctaatttttgtatttttttgtaattatactttaagttctagggtacatgtggacaacatgcaggtttgttacatatgtatacatgtgccatgttggtgtgctgcacccattaacttatcatttacattaggtatatctcctaatgctatccctcccccgctccccgcaccccacaacaggccccggtgtgtgatgtcccccttcctgtgtccaagtgttctcattgttcagttcccccactatgagtgagctgggacaactggctagccataggtagaaggctgaaactggatcccttccttacaccttatacaaaaattaattcaagatggattaaagacttaaatgttagacctaaaaccataaaaaccctagaagaaaacctaggcaataccattcgggacataggcatgggcaaggacttcatgtataaaataccaaaagcaatggcaacagaagccaaaactgacaaatttttgtatttttagtagagacagggtttcgccacgttggccatgcttgtctctatctcttgacctcatgatccacccacttcagcctcccaaagtgctgggattacgagcatgagccactgcacccggctgcccttgagaatttcttgtaagccttatctagtggtgataaatttcctcagttttgcttgtctgggaaagattttatttctcccttgtttctgaaggatatctttgctgagtatggtatttttggtggcattttttttttctcttagcactttgaatagatcatcccattttctcctggcctgtgagctttcttcagagaaatctgctattagtctaatggagatttccttttatatgacttgacacttttctcttgctgtttttagaattctctctttgtctttaacttttgacaatttgactgtaatgtgccgtgaggaatgatttggattgaatctatttggggacctttgagcttcctggatctgaatgtgcatatttctccccagacttgagaagttttctgctatgatttcattaaataggtttttctacaccttttcccttcttcttctgaaactcccataatagaaagttttgtttgcttaatgttgtctcataagtcttgtaggctttcttcrttctttttcattcttatttccttttctttctccaatgacaaatttcaaataacttaccttcatattcagagattctttctttttgatcaaagtgtgctgctgaagctctctaatgtatttctttaaatttcatttattgaattcttcagctacagcgtttttgtttggttctttttatttatatctctttgttgaatttcttgtttatattgtgaattgttttcctgatttcattgaatagtctgtctgtattggtccctgcattgatgtctgtgcatctggtagaacagttgtctcttccaaacttcctaaaatatctttcatagagacagactttcacctgttattgggttttagtgtgccatttggaaagggtatggtgactctctttccagataggtgcagtggtatagtctccatgcagctgctccagctgcattgaacatcagcaataactgtgggcacctcagtagcctaggctgtagaactttgtggcrgcagcagctgcagcagcatagattgttaatgttcttggtgtcataggctttttgggattcttctattctcattttccccacaattaggagacttagccaaggggattcctcttattgtcaggtctgacacaacctacaagcagctgcagcagctctgggttccaggtgcagatgtccagagcagctgtggggcagatggaggtcctaatctcagggtctcatgaccctgttttggcaactgggtcttggagtacaggttcgctttctgtggcagggttggataccggttgtccatagaaccaaaatctgtgactcaggtaccatctagcagcctggtctcaggaagctgagttgtagctatgattctacccctgaaggaggcagaacacagctctggcctgactccatggagtaaggggtactttggaggtttgagcctggggagcaaaattcagctgcagtttaggaatctgagccaatagggctcagtggcaatttgggttctagaggatgagcaactgtgtagtaataactctagaccgtggtatagtggggctcagcagtatcctccctctgggaggccagatgtagtggcagcaaatacccagaatggcagagcacagctgtcattggaccctgcgaggaacagggaacagcacagttctgaccccaccatcaagggagatgggtatctcagcaactcacactctaggtagctagtccagctccacagaagcaggatactagagctgtttggcctgtagagcagagtatctcagcttagccactgcttttttgccctgggatgcagggtactacatcagctcagctctgagatgtgcagctgctcggctcagccaaggcacctattcccagagggtgataatgctgcttcagctcaagcttggtagagtgtgattattctgggaagaccaggaaccatttccctgggatgtagggctccacttcagcttaggtactgtaatgcatgatcattcttctgggtggccaagtcaccatttcctgggatgcagggcactgcttcatcttagacttcagggagacatgactgctcagagtggccaaggtactgtttttgcaagaggcaagatactacttcagctcaagcacaagggtggaggggtaagtaaagtggctctgtctctgcttggccccacaggaaaggaagcttggcttggggatgttggaccacttggctggggcggtggttcagttgcatcttagtctcagagatgaaggagagtcacggctactcaccgccagagcaagacaccctccagccatagttccaattctacgatggcatagcrtagtagccctgtagctgcagggtgtggagcctagtgtttgctttttctctacggtgagcacagttacgtggactccaggtaattccgtcagctggactttgtacctgtgaggtaagatctctacatgttcaaggtgttgatggaggttgctgggatcctcttgcttatctcctcaccatgagaagttcctcctggctttcagctgatcccatttggaggatgaggtggtggaggcccggcatttccttccattctccgtgtggccatcctaagtttctgtactcaccagggtttctgttcctgtgatataccccagtgttctcccttagctattttcttcaaaatacatttgtttatttgttgttctgtctgtctttgtgatggcgatgagtgctaggggcttccagttggccatcttactcagatacagtatatcattacctggcgaagtattttgtagactgctcctcaatttgattttatctgatattttctcatagttagattaaggttatgcattttgggggaaaaatgccacagaagtgatgtgccttttttttatatcaggggatatgtggtatcggtatgtcttgttacaaatgatactaaccttgatcatgtgtttcagttaatgtctgccaggtttctcagctgtaaaattactatttttcttctgtaattaatattttgggagagatactttcagactttgtaaatattctgtctccttaaacattcaaccatgaattttagtattcaacagtagatcttgcctgaattatgtgctattctaatgatgatttttctattcccttcattcatcctatatttattagttggaattcttctgtaatgaagagttgttccttctccctcattgatttaattattcagtcattcatttataaaagtacagactcatgagtatattttttttactctttgggtcataatgtactgctattactgtttatttcatttaaattgttccagtgttggcacccatcctgttgtttaacatacaccaatcctatttgtcttgagcacttttttctgacactatgaaatgctccagttcatcttctgttttcctttccgcagccccggaatcagcaactgctctgttgagtcttggttattcttattgggggacgatatttaaaaaccaaaatctgggtgctgtattcaacttttacagctttatttttcttttcctggcactcttycccacccccaccccatagtcctaccactatgaaagcatctgaaaaacttgaattcatctagcgtaaaaataggaatatcagaaaaccagcatatatagctcctccatttgcttttgtaaacatgttgaacatacttcatttagttccatattaatcctgtaaagcctagaagtakattttatacatgatttttggcctgtagtgttatgttgcagcagcttctaaaaatacacatggaatagtaaaagtcctatatttcaaatactgttatgtgatttagagattaggaaggcataaattacatagccttatgctagtgttaagtcaacctcagaagttaaaaaatacttcaagtaaagatcaacttaagctgctgtcacaaagtgccatgatagatataaaaagacccagattagttaccatctttctgttataaaaccttagagatcttccctagtataattgctttccttttttatgtgctttaacattggggacatcaatgatacaatgcattcattaatataacaataaatttgtgtattttaatctcattaaatggtggagattctaaggagtagaattttttttttttgtatcctgagtaaacgcccaaatgttggctgtataaatgaaagaatgtacctcaataggcggttctacatgttatctaattaattcttagcttcacctctcatatttctctctgtaagtgtagaacaggttctgtcatttagttgtatagcatccatagggcagatgcagtggctcatgcctgtaatcacagcacttgggaggttgaggcaggaagatcacttgagactgagagttcaagaccagcctgggcagcatagcaagatcccatctcttttttttttttttaaaggtttatatagcatccataaagtcaagagatatgtctcacttacaaagatgaaatcaagtgtatatgcaatatatttgagattcatggaaggttcataactcacttattagtaattgaccttttttgttacagaatatcacgtcagatttaggattctaaaattttggtttgattgttcctatctactcttccctcttcttttttttaaaaatatattttattgctgtaggaataattgagatctaccctgttgaaagatttttaagtgtaaaatacattattaactatagtcacaaagttctacaacagatttttaggaagttttcatcttttggctgggcacatggctcacacctgtaatctcagcactttgggaggccgatgtgggtggatcatgaggtcaggagtttgaaaccagcctggccaatatggtgaaactccatctctactaaatatacaaaaattagccaggtgtggtggtgcacacctgtagtcccagctacttgggaggctggggcagaagaatcacttgaaccaggaggcagaggttgcagtgagccgagattgtgccactgcactccagcctgggtgacagagcgagactctgtctcaaaaaaaaaaaaaaaactaaaaaaaaaaaaaggaaagaaagtattcatctctcataactgacactgtatacctgtcgattagcaacttcctgtttcccctttcctgtagcaccagatagccaccattctatgtattctctgcttctatgagtttgaccagtttatatacctcatataaatggaatcatgcagtatttgtccttttttcactggcttattttacttagcataatgtcctcaaggttcatccatgttgtcacatattgaaggattgcttctttttaatagccaaataatattccattgtgtgtgtattttatatttgtgtgtatgtatgcatatacgtgtgtgtatatgtatgtatgtataatattttcttaatccattcttttggattcattccatcttrtggctattttgaatagtgctgcagtgaacttgggagtgctaatattgctttggaatccttagtttagttcttttggataaaaaccttgagttgagtggccaaatcatatggtagttctattcaaaaattttttaggaacctctatgcttttttctacactgatcacaccattttgcagcgccaccaacattacattagggttccagtttctccatatccttgccaacacattgccttttatttttttgayaatagctaataggtataaggtgatatctcattgtggttttgatttgcatttctctaatgatttgtgatgtgaacatcatttcatatacctgttggccatttgtttgtttcctttagaaaaatgcctgttcaaatgcatagcccattttttaacgggttgttttctgttattgagttgcaggagttccttacatattttggaaatttactccttatcagataaatggtttgcaaatattttcttccattctataggtgagcttttctctctgttgatagtttcctttgctgtgcagaaggttttagtttgatgtcatctatttttgcttttgttgccagttcctttggagtcatattgatgaaagcattgccaagacccaatgtcacaaagctttttcctctgttttcttgtaggagtgttacagtttcagaccttacatttaagtcttaatccatgttgagctgattcttgtgtatagtgtaagatgaaggccttattttatttattttattttttttgaggtggagttttgctgttgttgcccaggctggagtacaatggcacgatcccggctcactgcaacttccgccttccaggttcaagtgattcttctgcctcagccttcccgagtagctgggattacaggcatgcaccaccacgcccagcactctgtgttgaatgatacagatgctagtctcttgggcagcagctgggagggatggaacattggatgtatcttcctcagggaaaacctaggagctgagagttttgtctcaatcatatggctctgtgccaagagtggagattttgatgagagggtgtctcctgctagtttcagtgtggctagtttcacattctcccaatgtgcaggagcttctcaactagtttgtttctcacaaagggaattgatctgtgtattgctgttgaatcagtgtgtctgtggatgaaaggaaagtccaggacttcctattctatcatttcactgacatcgttcttatttccttctttttgaccctcttacgattttccatctgtctttatccattcttgcttttatattccgttagtcttcgttttgctgtcccacatgcccttgcttctgtcttctatctttgcttctctgtcccatttagctgtttttccttcctccatttcttttataagtcaatccatccatctttccttctgagaatacatacatctatcctttgccactgcttctgtagactttattccatctttcctcttttctgctctctcttcagccttctctatcattccttctgtttattcaaagtgaagctgcttctttctgtcagccattcttttccttcatctagtcttaagactactacaaatgtgctgatgatttccagttttatatctcaaattcagccttctaccatgaactccagacttagtcatctcatttcctttgctgtattagctcttgaatttctattcagatccccactcttttaccattttcaccattaccagttttatccatgtcatcatcatctctcttgtaaagaagtagtaacctctaagtgattttcctgtgcctgccctttctttgcctggtacttattttctactcagcagcccaagtgatccttttaaaggcaaattcagggccagctgtggtggctcacacctgtaatcctaatgctttgggaggccaaagcagaaggattgcttgagattgggagttcgaatccagccttggcaacatagtgagaccccatagctacaaaaaattaaaaagttagccaggtgtgctggtatgtgcctgtagtcccagctacttgggaggctgaggtgggaggatcgtttaagcctaggaatttgaggctgcagtgagctatgatcatgccactgcacttcagcctgggcaacagagtgagactctttctctaaaataaataaataaataaataaataaaataatttctaaaaaacaaatttatattatgttccaacctctgctcaaaagctttcaatgagttcccaactcactcagagtaaaaacttaagtctctaccatgatttacacggacacatgtgattgactcccagtagaacctgaacatcattttccttttttttttgaaattgagtttcactcttgctgcccacactggagtgcaatggtgtgatcttggctcactgcaacctccacctcccagtttcaagtgattctcctgcctctgcctcccgagtagttgggattataggcgcgcaccaccacgcctggctaatttttgtattttcagtaaagacagggtttcaccatgttggccaggctggtctcgaactcctgacctcaggtgatccacctgccttggcccccaaagtgctgggattaccattttcttattattctttccccttactatttgatgtccaagcatattggcctattttttgttcctcaaacagtcatgaggtcccatgtgtctgggcctttattccctctgtgatgttctgttttctctgttatctgtataggtcatttacccccttaggtgtctttctgctcacatgtcatcttcattcattgaaactatatatatttattgaatgtagtgaataaaagaggcaaaaaccttactttcatggaatttacatctgagtgggggtgagatacaggtcattaacacataaataaattatatagtatgttaaagagatagcaaggaagggggctcaggaatgctaggggccagargtggggagaggtctattttagataagatggtcagagagagcctcacttcagagatgacctttgagcaatgacctaaagaaagagaggaattgaaccctgtggatgtatgagggaaatgtattctggatggaaagaacatcctgtgcaaaggtactgaagtaggagcatttctggcatgctcacaggatcccaaggaggacatgtggctggaacagagtgagtgagaaggagagtagtaagaaagatggagtcatagtggtattggttgcccgggttcgttctgtaggacctagaaagccattttaaggacttaaaaaaaaaaaaaaaccaccaactttaaatggactgggaagtcattgcagttggagactttgttcatagagatgacatgaccacttggcatctgggtgaagactggactggatggcagtaaggacaagtatggaagcagtgagatcagatagaaggccagtggaatcatctaggtcagaaatgatgaagaattgaacctgagctgtagaggtaaaggcagtcagaagtaatcagattctggatgtattttgaacatagagctgttaagatttgccatagttttagatgtggactatgaaagaaagagaggtcaaggatgatgtggtagtgttcaccaatatccaattcaccattcgtacctgggctatgcaacatttcaattctcagctmtctttgcagtctggcgaggccgtgtgactctttctggccaatgaattgtgtgaggaagtacttggtgaaggcaatgtaaagccctgtatgtttcccagttcttcccctactgtggaggaggccttgtgttgaaattatagaaccacaaggtcataatagctgggacggtaaagtcaccattagaagataactagctggagctgcagtgaactcagcatgagcaagatgaaaacttttgttttgtcaagccactgatttgggaggttgtttgttactgcagcataaccctgttctattctgaccaaccaggtgagtctttgccctgattaacttgaaggatggaattaaatgagattggaagactgtgggaggagatggtctgaggcaatcttcaaagggagatgtttaataaatggaaggatatgaataaatccttctatgactgctttgcataaaattataccccccgatatccttctactctattttagttttctccataaaaattatcagcactgaaatactgtatggttcaaggagcttggaatttggagccaagctgactgggtttgaaatcatggctttgccactttattattcaagtgtccttgggaaaattacttaaccagtatatgtttcagtttcctcatttgaaatggaggaagtacctatatcaaagggttattgagtataaacatttaaagtgcttagagcagtgtcttatacacactttctaaatgtttgcagctgtaatcatcattatcatcataattatcatctaacatccaaacctcatgatagcaggcacttaattttgttctctgctttattaccagggaccacaacaatgtctgacacttaataggctctcaataaattgttaatagatacattactggatagattgcataagtgactaaatttttgcagtaatgtcagtacgagaaaaatcttgaccattggccaaacttcaaacagacctgaatagttacatgtgctaagtcatagatcaaaaaaagtggaataatttttcagcattattaatatctttttgaaggacagaaatttgaaayagggctgttagactacagaaaagcattattcatagatctgggacagcatgtttttgaacacgttaggcagatgttattttagttgtatgtagatcctttaaatcctagaagtatatcttatactttatttggcctaacctggtagagtcacaatgcagtgatttctaaagttagataagaactaatacaatttctggactataaatagctctgtgtgatttttgagatcagagaggcataagttacaaggattatattagtctaattgatgccagaaattaagtgattttaatcctttgaaacgcttatttatgtatttatttttttctgtatcgatagtacttatttgcctatcatctataaataatcatggttttgcttcttcctttcccatccttatgccttttatttcttcctcttccgttacaggttgagtatcctttgtccataaagcctgggaccagaagtgttttagatttcagattcttccccatatttctgaatattgacattactagttgagcaaccgaattcattggagcatttcctttgaatgtcatgttaccagacatgggcttctgattcagcccttaagagagggttcttggaactcacttaagaaagaatttggagcaagtccacagagtaaaatgaaagcgaatttattagacaagtagagaaacaaaaaatggccagtccatagacagagcagcatcatgggtttcttgactgagtatactcagtcaagagtatatgctaaacaaggggtggcttattcatgagttttccggaaaagtggtggggagttgtcagaagtgaagatttctcctctttttagaccatatagggtaacatctggatgttgtcttggcatttgtaaactgtcatggcattagtgggggtgtcttaacttgctaatgcattataattagtgtataatgtggagtgaggatgaccagaggtcactttcgtctccatcttggtttggtgggttttggctascttctttactgcattctgttttatcagcagggtctttatgacctgtatcttgtgataccagtcctgccgacctcctgtctcaccctgtgactaagaacgcctaacttcctggaagtactgctcagcaggtctcagccttattttaccaaggccctatttaagatggagtcactctggttcaaatgcctgtgacagtgtcagcactcaaaatgtgttggattttgaagcatttcagatttgggatgctcaacctgcactacattagttaggcctactagattgcatagagaagcggtgggagtaggcatctttgtcttctttccgatcttaaaggaagtgctttcaacatttcactattacatatgatgttttccctaagtatttttacgggtaccctttttcagattagggatgttacctactagttctagtttattgaagctaaagggaattgagattttgttgctactctttatacatctcgtcaattggttatatagtttttcttctttattctatgaatgaggtgaattacagtaaccaatttgtaaatattaaatgatttaactttctgaggataagcccaacttgatcatgatatataatatgttttgtatattgcaggatttggtttgctgtgataatatgctcatgagtgaaattagtttataattttcttttatactgtctttgtctggttttggtgtcaaggtaaatctaaccttataaaataagttaaatattccttttctgtctatcctttttatgagattggaatcctttgtaaaaatagaattatctattccttaaatattttgtagaattcatctgtaaagctaactgactcttgtgtttttcttgtaagattttaagctatggattcaatttatttagtgacttagaattattcctgttctttctttactcttgagtccattttggtaagttttaagtttcttgagtcagttttagcaaggaatttatttcatctaagttttcaaatttgtttgcataaaattatttattttccgtttaatccctgcagtatctaagattatgtccccactttttaaaaaattcttaacatttcttactcttccctctcccattttttttcttaattattcttgtcggacatttatattattgtctcttcatataatacattttggctttgctgtttctcacgaatttgtgttctgttttcactaatttctgttctttatcattttcttctttttagtttttaaggatttattctgctgtttttcttaatttcaagtcttcaagtattttctaatttcaaaacatataaatgataccaatttaaaattgatcttgctctgtcatgcaggctagagtgcagggaagtgatcacagctcactgtagccttgacttcttgggcttgagcgatcctcccacctttgcttcccgagtagttgagattacaggtgcatgccatcatgcccaactaatttaatcagggtttctccatgttgcccaggctggtctagaactcgtgggctctgagattataggcgtgagccaccgtgcctggcctgaagtctgagttttaaagttgagaatacagagaggatttgtgacgtgtgtgtgtgtgtgtgtgtctgtaacagttatctcagagcacaccaagcctgtgaccactttaaacgcattgtcatgcttgaggtgtttgggaccacatagtttccatgaatttgcgttgaggtgattcattctcggaggatttttttaataaaatttttttgaataattttagatttgtagaaaatatgcagagataatacacagagttcctgtatgctctgtatcctgtttcctgtaatattaacatttccatttccatggtgcttttattaaaactaagaaaccatagtactggccgggcgtggtggctcatgcctgtaatcccagcactttgggaggccgaggcaggtggatcacctgaggtcaggagttccagaccagcctggccaacgtggcgaaaccccgtctctactaaaaatacaaaattagccgggcgtggtggcgcatgcctgtagtcccaactacttgggaagctgaggcaggagaatcgcttgaacccgggaggtggaggttgcagtgagccaagatcatgccactgcactctatcctgggcgacaagagcgaaactccctctcaaaagaaaaagaaaagaaaagaaaaagaaaccatagtactaactaaactccagactttattcagatttccactaagtttttcttttccacaatcccatctagaataccacactgcatctagtcatacgtctcctttgtctcctctgtaacagtttcttaggctttctctatttttaatgacctctgtggttttgagtactggtcaaatgttttgtagaacggccctcaatttgagtttctctgattttttttgataattaaactagggttatgggggtttgggggacaatatcacagaggtgaaatggttttctcatcacattaagtcagagtgaacataatatcaacatgattgacctatcactggtgttgttgactctgattgtgtggttaaggtagtacttgtcagtattcactgctgtaaagttactattttttcctttccattcaaggagagattttattttctttcatcccaaactggctagagacagataagtttctttgtagtcttcatctgtgacttaagatttgtatctttcagagcagtctgggtataataagcaaaaaaaaaaaaaaaagatttatgtcttatttactaaagcttttggaagcccaggctttatattgaatctattattagcttccttactttgggtgggtcttgggctttatctcctgtcctcttcaacccagatgaagctcagagttctcagggctctgcagaaatccccagggctaaagctgactttagctccctgtgacctgttatgccttcttgctttttggacaacccggtgaattattttaagaacttttctgttgttgttgttgtttctcagtttgttagttatttctgttagggtatcttaatccggtgtactgtcaacaacagaagttgataacaggtttgttttgacattgatttgaatatattttgaaatgttaaagcttgtgttggggagaatatacaacttagtatagaaagcataatacttacagtccccaggtacccccaacccccagctcttctgagtttctgtgatttaagcatacatactattttttctgctttggttgcccatttctgctttatcaccttaagcaacacctattaattctaaactctactcaaatcttttcttccttgtgccttcccctgcccccttccccacccccacacagttaggtttcttctgggctaccataatacacttttcataataaaatttaccacatggcacataatatcagtgcttagatattgtggtagatatcattactgtacactgttatttagtgtcccttcctgcaagaagattatgctttcctgcctttttgaagactaacttggccatgtgacctgttttgactgatttgttaccatggtatatcctaaattcttcttaattgatacacacgcctattcctcagcttgaggacaaaaactgtatactagtcattgttatgttcttaaagctgtcaaattaattttcctaaaacatcttagattattacatattctgtagaaaagtcacattatgtagtacaaagagcactatggtttggagtcagagacatccagattaaattttctgcttcattgtttacctgggtatggaaatgtccttggtgagtttcagattccatcatttttaaaatgagataccttgtaaaattgttgggaatataatatatgtaaagtatccagcacaatagacattcagagaatattctttcccattcwtgttccttcttcattgactgttgaatcaagcctttaaaatccctttcttctgctttcattaatttatttagtcattagatagatatttattgaactcctgctatatgtcaggaattggacagtgggaagtggtgaacaaggcctagttgcaggctacagtccagtggccaataattctccttccttatctccagctattgtattgatacttcagggtcactacctaccatcaccaccacatccttgaaatttttgcctaagccgctccccatatcaaaacaaggaaagaaaaatccagaaatgatttctcccacctgatttttcagagcatattagtgatatctatttgtattttatatgttttattctaccatagccagttctgtagtatttatttacataatatacatattcaggttacttttttaggttttaagctctgtgagtattggaacctcatttatctttgtatgactcataaatcagtgattgaaattatagaagtaattaacagtatcactccttcaaacacattttagaaattttgtagaggaattttcagttgtcataatgattgattttttttttttttttttttgaggcaagacctcactctgtcgcccaggctggagtacagtgtgcagtggcatgattacagccagctcagtgcagcctcaacctcccaggctcaattgatcctcctgcctyagcccaccccaagtagttaggactacaggcatacgccaccacgccyagctagtttttttgtactttttgtagagatgagatctccctatgttgctcaggctggtctcaaactcctgcgctcaagtgatccacccaccttggcttcccaaaagtgctaggattacaggcatgagcccctgtgtccggccagttgtcacaatgattggaaggtgctagtggaattagtaaggagaagccaagaatggaagatttctttcagtactcagagtaatccctcaaaataaatagttgtctctaggtgccatagtgtgcatgcacgtagtcctgactattcaggaaccgagatgggaggatcacttgagtccaggaatttgaggccagcctgggcaacataacgagaccctgtctctaaagtaaataagtaaataaaatagtttttctgagttacacataaatttcaaatgttcttccagatgtttaatgtaagtgaaaaacttattcataattgtctgaacctagagcctaaatctttatgtataaacagtaggtattttttacacaattttaatatacactgagtttccctggaatgtatttatcacctatataaataaaggaaagattgtactttgcttttttttctgaactttcctgtcttggtcaatatttcagaaaatcacatcaccaaaggcaatatcactcatggtgtatgatgtttgagtcgccagtaacacaactgtgttagtctgttttgtagctgttaaattttaaatgattctgtatgtaggtgtggacactgagttttaattcattgtctccttatatcatgcccacatatttacctctagaagtacatgttacttctttttaaaatattaatgactttcctttaatttctcctatatgtttcaattagagcatgatattaatgctttaaaattgtgtgtatggaaatgttatattatctaggtcttttatttcaggatttaaaagagggcattgcaaaatattagttataaaaagtgatataggtctactggtttatggcttttagagtgtggcaaatgcaaagtttgcttttaaaatatatatttcatctttattgaacattaaactcttatcttcagggaaagtgtgtatcacaaatatccagacaatttaggtaaaattaagttagatgaaagcactaaaaatttgtaacaaaccagaaaaaagagcatatgtaaattttattaaatttacacacacacaaattgttatattttttaaatctctaataaaatataatagactttggttaatgactgagaatctccattttttttctttatgatggtgtatacagaactttagttttttctacatttaactcttgttttatgtggataataaggttattctccttgtagttttagtgattttagtttatattctttgaatcagttctttggggtcagcaatgagttgttcctgtttagatattgtaagtgtagtttttattgctgagtgtgtaagatatattttacaaactagcatacagaaccacatggctttattctggcatggtacatgttcttaatgccttgtgttcagcagcaataggattatgttgtatcttaccattgccttttttggactatttcatagacagaactagaaattctagttatataaagctgttctagcacagactggtaagtaggtcattgtgacggagtatactaaaccgtccactggttgctatagcaatgacctactttaggaaaatatttctgttgattcatgttgaagtcatcttttggaagtggtataaggaagcttactgcatataatttttaaaataacagcaatagatagtgatctctggaggaaaaaaatccttaaaatgtttaaagtgaagaaatatatattttgtcacctaatgcctcttcaatttaaagtggtgtgttcagtattgtaattaaataatatgaggactgtgcttctatgtaggcagtacaattatatgaagggatatagtgagttttactatcatttggcctatttaaaaagcaacctgttgtatgtagttaatagcagtaataacggagccatcaaatgggtgtagttcaagaaaataatatatatgccaaattggagaaggtctgaaagtatgttcctgttaagatgatatcatatgtattttcagtggaatatattaaaaataaatcattcatttcattcaatattgagtgtcccagagcacatgcatttctattacattaaagttgaacttggtgtgttctttggaacacactgaatctgaactctaacagatctaatcctttcccagttaagggtaaaggattgagcattagattttgtatagttttgaagtaacattattcgttcagcattaaagagaaatcacacacatcactgagttgatactttgaacctgggctgttagaggtattatcaaggaaaaattatatgcttagagattagttgagtcttaattgcgttgtaccttgttttataatatttatagtcacattgaccttgctactgggaaaggtttccttcaaatcatagttcaaagtcacattcagatgaagttgtgaattcaaagtaattctgtatacaggtgtaggcatccaactaattcacgttttcttttgtcatgcccaagtatttacatatagaaatgcatggggtgttttctttaaaaaaaaaaaaaaaaaaaaacaggaattattctcaagggaaaataacaacttctgtttgatacatatctaccatgtgctagagactctactaggtgattttatgaggctcctaatcctttcaacagttacacaagacacccctactaggtcatttgatcctgtttctaatcttttcaacaaattatacaaggcacataatgagatttgtttgccaaatatagaaaccaaaatatagattaagaaaactgtagttagggccaggcctgatggctcatgcctgtaatcccagcacttggggaggctgaggcaggtggatcacctgaggtcaggagttcaagaccagcctggccaacatggtgaaaccctatctctactaaaaatacaaaaataattagccagggtggtagcacactcctgtaatcccagctgcttgggaggctgaggcgcaagaattgcctgaacctgggaggtggaggctgcagtgagctgagatcgtgccactgcactccagcctggatgacagaacaagactgtgtctcagaaagagagagatggggagaactgacttaatttgaaatccattaggaggaggttttattttatatatatatgtaatatatatatatatattttatatatatatgtaatatatatgtaattatatataatatatatattttatatatatgttatatatataatatgtataatatgaggtaaaattttttcatcctctgaaggacataatgtacctcagaggttcagaagatgtagaagtgactttaagatggaagatttaaggttagtgtgatatgaacttaaagggataggaattgggaaaggtattccaagccaaggaaaggccctggagcacattccaggagattgaatgtgtgctgaaagasaagtttggtttggtgtgagagaaaggggtatgaggtaggaaatcaacctagaaccctaggttagtagccaagcaaaatgatttgttgtgtattgtatagggaatgagtcgttgaaaacctttgtatgggaaggtgtgcctcatgaagatctggaattgcatataaaatgaattagaatggagagagattgttagtaggcagatctattttaaggcattgcagtaaatacaagcaagagataatatgaactagaattattgtagcaaaaacagaagtggaaaggaaggagaacactaaaaagtaatagataacatataattgtgcttactatgggcaggcactattctaagagcttcgcatatgttaatttatttaatctcacgaacaatgctatgagacaggtccgattactgtcccaattttacagatgaggagactagataggacttttcaggattgatttaaggatagtaatttgttgatagacttgttaaattataggacatctgtgcaatgaagtactatgaaactatgaaaattgatgctgtagaagtacgtccattgccttgaaaagacgttcaccatgtattaaaccagatacatatgtagtgtatctcgtttttcttctactttgaaggaatgtatgctaattatcaattttaaactttttttatgaagttaaaaaaatgtrtttgtttctctgtttctcacccctatctcaaacccccactccctaacggggagatatgattaatagcttggtaagtatttttccaattattttcttgtgcacatataaacaaaagtagatgcatgcaatgtaaattttattttatcagagtaatatatgcaaatagttttaaaagccttataacaaagaatagcatcatagtgtgttctactttagccttctcttttgcttttctttttggatcttttctacttaaaatatttgattacaaaatacctatattattttttaagtgtttctattttttaaatctgtgcagcttttatgtgaaatgagagatgtaagttatatctgtggaagaagaacaccatacttaaatacagcttttagtcttttgtttcatgaagtaccaaaacaaaattaattcttaggtttcaaaacttttcctattgtaacacattactttagtccatatcattctgtgcatttgtttggttcatataatgtttattaaggccaggcctgtgatggttcatgcctataatcccagcacttcgggaggctgaggtgggaggatgacttgaggccaggagttcgagaccagcctgggcaacgtggggagaccccacctctacaaaaactacaaaaattagctgggcatgatggcatatgcctgtggtcccagtcactctagaggcttaggtgggagaagtcaaggctgcagtgaaccatgattccagccttagcaacagagcacaatcctgtctccaaaaaaaaaaaaagaatgtttattaaaagcattcggaatgcttattcagcctattaagaaagggaaagattattaattaatccatacttaattcttcattttatgaattaatcatgtccttttggtttgtttcttatcccatcttactgtcattgaactcttgcaccacatagaattgttttgaccaaaaagttgaatatggagaactcttgctgttctcagttcttactcacttctggtggggaagattttgaaactaatggtacaacagagattaggggattattattgccttagattaccccctccaggacatttaagttttgtactgtttcaatttaagaaaacttaaaattgctagttctttcaacttcttaatttttgatctgtgtaaaaacccttcgatctttgttctgtctagtaactcttcttgccaagcaaatacataaaattagatgcttcccaataaacatttgtcaccagacatgataaattattcatagttggagataattttattaaactccaatgcttttatatcactatccatctaacaacaacagtcttctcccctgaaatatttgtacattggtagtggtgggttaggatggggatcaggtgttagggaggtgactccaaaccaaggcagaaaagggatgtgataaaatataaatgtggggatagaaaggtttgcttcctacttggaaacccatgagacttcctaaggtgaaatggtgggatgtctttaacatcctcataaaaatatagcaccttgactcttcaagctgtacagatggtgctcctaaagaggaagaagtgtcagacctgactagtgyacttatgtcactaataactacagttgtaaaaaatcaacaagacttatttggtgaaatgatggtatcggaatgtgtaaagcgaacaaaatgatctagaccaagcagctttttagaacaatctgtccagtagaactttctgcaatgatggaaatgttctgtagctatactgttcagtatggtagcyagccaccagctatacatgtggctgttgaggacttgaaatgtggcaagtgtgactaaggaactgatttttaaatttaactaacttaaatttaaatggctacatgtgccttttggttaccatattagatagtgcacttctagaatttgcatttccctgcttcttaatcactcctcttcacaagtaagagataattgctattctgaaagaccatgtggcctgtgaaaaaggcagacaaatacttaaccttgagatcaraaacataaaagaagcaaaataggaaataagatacgtccagctgaaaagaacagaatctaaatgaaacttaacatgagtcaaataataagattggaccttccatgggtgacatctcttttaaatttgttcttgggaatgttccatttcttcgcaacagaagatgcacagtaagcagtcttctggtactgccccagaattttcctagatatctgtcatgtgtaagccttgttactacttatttcattgaaaaagtctataatctccaccccaactccatgaaaccttttctttttttttttttttagaagttaatctggcattttctacactcagggaattaataaccacataatttggcatctacttattagtttctttttttaataaattagaaacttgaaaatgggcattatgatttcaatctcttaaatgattacaatattacaaaaaagtactcataatcttttttttttgtcccctcagattcctttttaccatgatattcttaaattattcacttgcttattcattacataggatgtttctggttttttccccccagcagaagatattctagatttttcaagttttcctttctatatgaaaagccattttcatacagaaaatatttcatcaagtttaaacaatgaaaccaatttaattgctttgatacttctttgtatgtttttatgttcacaaattaaatttttgctaatagtcacttttatttaatgaaaattagtgattttattcagtattttattaaaatactaggtaatttgtgctataattaaaaaatatatattagtatggtttttggaaaaagtatatatcaataggaggtaataagatgataggttggcatttcaacttttagaataacatgactttgtaataatttatgtcttctaaatatgtattttttaataatttaaataatactttcttctctctagatttttgcttcagtgtcttgaggatcttgatgccaatctacgaaaattaaactcccgtctgtttgtgattcgtggacaaccagcagatgtgtttcccaggcttttcaaggtaatttgaaaaatatttgcataaaacaatcttttctcagataatattacatatttggtaaataaagttttttgactaattgaaaatgtagcgaatataagtattttcaagtaaaaattttgtgggttttttttctttatttaatgaaaaagctatacatggtaaaaatcagacagtgagaaaatagtttacaatgaaaagttcaatctttcttctaccttaaactgctcgttgccctcccagaagcaacagctactaccagtttcttatgtatccaattccagtttcttgtttatccaattagaaatattctttgcataaacaagaattttttktgtgtgtrtatatatatatttttgtgtgtgtgtgtgtatatatatatgtgtatacacacacacacatccatgtgtttgtgtctgtgttactrtcccctttgttaaaagttaaaatgacacactatacacaccattctctgccatgctttgttcacataaccatatcttttggaagttgttccatatcatttcctcggtctttcagatgacttcatagtattccattttgtagatggctataattttttaaactagctttctactgaacgtttaattattttctctgtaggccttttgctagtataaatgccagtgaacttacttgtccacatttatgaatctttgctcacatgggccagtacmtttgtgkgataattcttagaagactttctgggtcaaaggattgtaacaatggacattttaccaataatacagaatttgtagtgcttttttytttctttttttgagatggagtcttgctcttgtcrcccaggctagagtgcaatggcgcaatctcagcgcactacaacctctgcctcctgggttcaggtgattcttctgcctcagcttcctgagtagctgggattactggcgcacgccaccatgcctggctaattttgtacttttagtagagacagggtttcaccatgttggtcaggctggtctcgaactcctgaccttaggtgatccaccggcctcgacctcccaaagtgctggaattaaaggtgtgagccactgcgcccagcactgtagtgctttttaaaaaacttagtaggatcttaaaaatctttaaaaatgtttaagatacctaatcttatctcttcccttttttccaaatgaaaaaattaggcctagagaataattgagttgcccaagatcatacaactagctcatggaaatgcccagaccagaaactgagtttcctcattgccctttttgtattcatcccttcctatttattactgtattagtccattttcacattgctgcaaagaaatatctgagactgtataatttataaagaaaagagatttaattggctcacagttctgcaggctgtacaggaagcatagtggcttctgggaaggcctcaggaaacttacaatcatggtggaaggggaagggaaaggggaagtaagaacttcacatggccagagcaggaggaagagagaaggagcggggaggtgccacactttaaaaaaaacaaaaaacaaaaaaaaaaacagatcttgcaagcactcactcactatcagagcaccaaggggaaatctgccaccatgatccaatcacctcccaccaggctccacttccaacattggcgattataattcaacttgagatttgggtgaggacatagatcccaaaccatgtcaactactattaaactttataaatgtatatctgctttttcttgaatcatttgattcatcaaatttttgaaatagcaatgtttctatttgtatttcttaatgtagaagagaacagctctttatgtgaatgagaagatcaatccccagtgctgggaatcaaataagcattacttagccttttttttttttttttgcttgtatgaaagacacatttaatgtttgtgaaaatttacattcaataaagagggttcacaactgtaatagatcaagttagaatttaacctaggtatttgggagagttctaacaagaaagcatatcagaagcaatgataataatctatcagcaactcatgaatataagagtgtgtgtcgataattgtttcaaccctatctctaaatctgtttgatataaataaaatgaatcctaagtggagttgcctttttttttgtttggtgctggggagacagggtttcgctctgttgccctgactgtagtgcagtggtgccattgtagctcattgcagcctcaaactcctaggctcaagtgatcctaggactacaggatcgagtagctaagactgcagctgtataccaccatacttggctaattttttttttgtttggtagtcttgctatgttgctcaggctagtctcaatcttctagcctcaggcaatcctccttcaacctcccaaagcactgggattacaggcataagctgtagcacctagccctagttgctttaaaataacaaaattcttatttacttgtttttgaaacaacatttttcaaaccagcaagtgttttgtgttctttgttttgagatttcttctgcctaaaatagcacattattgggccaaactatcttctgtatttaaatgatgtcctatcttatcaatttggcagagaggaatgggtttccacatgggccctaatatacaaatacatgaacacatacatatacatatagtacttattattttattctgattttttctttagctacatatagtagtctgtataaaattccatttataaaaacttccttttagatttatttaccatatctagagccatagagggaattaattcctttttattgaattaatgttttgatttttactttttgcttataggttcaacgtgcatatgtttaaaaaaaaaaggctaaaaggatatacaattaaaagcatgttgtcccccaccttcaccctaaccatcacaaccacagtttctctgagggagaagattcttctgtcattaactagctgagttacttaattagtgtctcaggtcttttggttctagtacagcaagtagtgaggatttttaataggtaattaatctggttttccacattggaggtaaggctagtttagacctggtaacagtacccttagttaattgggatagttgtgtcagtggctccagtactgatatctcccctagtatgtatctttcttctgtgtcattcactcaatttattctgtttataaggagtagattcaggaatgggtcagaacatttttatacacacttaggtaaacacatatatatctaataaactattgtcattttttctggcgttttttacttagtttcttttctaagttaaactctgacttaatataggctaacaagatggctctttctaggccctgcagaaacttttaataaggagtttaaattattggttttagagactaggtgcataattaatatctagattttttaaaaacattctcattatatctatttctttttttaattatttctatttttatttttattttttgagagagagtcttgctctgttgcccaggctggagtgcagtagtgctgtcttggctcacygcaacatttgccttccaggctcaagccattcttgtgcctcagccacccacgtagctgagattataggcatgcaccaccacaccttgctaatttttgtatttttagcagagaaagggtttcgccaattggccagactggtcttaaactcctggcttcaggatccaggagtctccaccaccttggcctcccaaagtgctgggataacaggcatgagccactgtgcccagcctcattatatctaagaaacagtgacacatggctaaagtctatagatggccacactgaagcattataaaatgttttgttcaaaatcacagaataaaagaacatataaagccaccatttttcaacagtaaaatttatattatgcttttttaagttactttggatcttgctttgttaattcatgacacatgcttgatagaatgtattcaacagatactgattgagtgcctgctatatacaaggctgtgtctgaggtactggagatacagtagtgaaacaaaaaatttctrtcttcatggtgcttacactgtagtggaaggagacagatagtaaacaaataagtaaacatgcaatgtcaggtggtgatatgtgctgtagagaagagtaaaatgtgggatagtaaatgtcaaggtgagggaaagttactttatatggaatcaaagaaggcctcactgataaggtgacatttgagcaarcatatgaagagtgagccatgcatctgggttgtggtatatcatatccacaatattttgcagctctttccgtcaaaaggtagagtttatttccttaccccattgaatctgacttgcccttacaacttgtttttaaccaagtgtcaaagaagacattgtgaattccaaatcctaggccttaagcgacctttcagcttctacttttcccctcttaggatgctccttctatcatgtaagaaagcctggggtagaatatctaactttgggaggccacatatagagagtggaccaaacaacagccaacaccaaagtctgagatgtgtgagtttgactatcttaggcactccagccccagccaagctgccagcgaattgcagcctcatgagcagatccgagtgaaaccaataaaagaaccatccagatacctgacagaattttgagaattaacaattccactaagctaactgcaacatggggaaggagcatggaaggcagaggaaacagtgcttaacaaaggccttgaagtagacatgtgcatgatttgtttagggaacaacaacaaggccagtgtgctagagcacagtgagtgaaaagaagaaatggcgtcggagaggtggctggaagccagatcatagggctttatagatcatgttaggagcttcagcctttactcggagtgaaatagatgccattggagagttttgagtagaagagtgacatgatttaactcatgatttacaagaatttctctggctgtttgtggagaatacacaggggattggaagtgttgtagaggcagaagcagaaagatcagttaggaggcaatggcagttatttaggaataagatgatgatgaccaggaccagggtagctgtagaggtgttgagaagtggtagggttttggatatatattttaaatagaggctgtaaggtttgcctatatgtgatatatgagagtcaaggatgactctaggtttttagcctggacgcatggcagaatggattcccatttaatggaataacagactatggaggaacaagtttaaggaaaaaataagaagttcattttataaatttttagtttgggatgccttttaggcatgttaatgtacatgttgagaaggcattcaagtctagtgctcagggagaagtctggactaaatttaggactcttcagtatataaatagtagtttagaccctaagactagagttatgaaacagaaggaaaggatgatggatggatggatggaaatttttagagttttaccttctttgtatttggattattttgtgaggtagctttacatttttatgcaattatactgtttaatttactgtcaatttaaaaaataaatgctttctcctaggacatatgtgatttacaacttttagttttactatcaaattttacattgcttattttcacagtatattaattatgacttaagaacttttttttaaaattgtttgggagtgctatttctttcttttgttttgttttattttatttttgttttttgagaccaagtctcactttgtcacccaggctagagtgcagtggcacgatctcagctcactgcagcctccacctcctgggttcaagtgattctcgtgcctcagcctactgagtagctgggactacaggagtgcgccaccatgcccagctaatttttgtatttttagtagagatgaggtttcaccatgttggccagcctggtctcgaagtcctgaccttaagtggtctacctgcctttgcctcccaaagtgctgggattacaggcgtgagccaccacgtccagccaagaactttatattcatttagttgttcatgttatcctttctgattaacaagtaattgtgatacacaaaaatagatacaaatcttattgcttaaaattgccaagtgcttgagcccaggagtttgagaccagcctgggcaacatagtgagactctgtctctacagaaaattttaaaaattagctgggcatggtagcatacacctgtagtcccagctactccagtggctgaggtaggaggatcactttagcctggaaagttggaggctgcagtgagccaagatcatgccactctactccagcctggacaacagagcaagaccctcgctcaaaaaaaattgcaaagtgaatattcacttactcaaatgaaaatatgttggtgctatttgcagtcttactgttaaatctaggtattgaaattcaaaggtaactacgtgttgcttaaaataaaaacctgctctaacgagtagataagcctggacaacatgctgagacygcatctctacaaaaatttttaaaaattagytgggtatggtggcgcatgcctgtggtcctagctactcaggaggctgaggtgggagggatgatcacttgaacccaggaggttaatgctgcagtgagctatattcatgccactgcactccagcctgggcaacagagtgagaccttgtctcaaaaaaaaaaaagagtagatagggacttccatctctggttaagatgtaaaaactcacaatagatcattgtttcccatattaacaaggagatgaaagtgaatgtgacacaaaattatagaggtcttttttcctcttattttgtttgaacccgttagagaattgagaaaataaagtctttaaaggctgggcgtggtggctcacgcctgtaatcccagcactttgggaggctgaggccggcggatcacaaggtcgggagtgcaagaccagcctgaccaacatggtgaaaccccgtctctactaaaactacaaatattagctgggagtggtgatgcacacctgtaatcccagctacttaggaggctgaggcaggagaaacacttgaacccaggaggcggaggttgcagtgagctgagattgcactactgtgctctagcctgcgcaacagagtgtgactctgtctaaaaaaaaagaaacaaaaacacacaaaatatatatatatagatacacccaggttatatcctaatgctacaccattctacataagggacttgagcatttgtgaattttggtatccacagggggtcctggaaccaatttcctgcagataccaagggaggactgtatatcaaaatttacagaatgcagctaaagcagtgcttagaggaaacttaatattatagctttcaatattgtattagaaaaggaaaaatcaagaactaagtttctaccttaaagatagaaaaagaacacattaaactaatagttagtagaaagaaaacaaaaaataaagaggaacgggaatcaatgaaatagaaaacaataaagaaaatcagtatgcattaattagtttattatttcttagtgccaaacccacccttcttgccctactgtgtgatactgtgtcacagcaggagagaagaagcttttcttcttgatatacttgtgctttttttccctgggctagcagatgagtatgcgggaggatcagtagcattcacctcagcagccctcctgaaccagccacagcctacatacaccctctggtgaatttctgtgtaagcctatttataccctctgataagtttctatgccacctggtggacagcttctacagatmacctggttagcccatacctaccaggaagtttctcagccaaccagcaggttattggtatgaaacacctttggtcattgccctccggtaaatttctttacagggaaggttgtgtgttcctgtggcagcacgctccatccaatgagccatgaatctcagtggcttggtggagggagcttttgttaagttttttattcattccttgtttattttccgtccacatagaggtggcagctgctttctgcaattggtacttttgaacaccttagagcagtaccatccaatagaagtcatgttaaatttaaaattttctaatagccacattaaaaaagtaaaaacaaacaggtgaaattaattttaatgatttattcaacacagtatatctaaaatattctatataaaagtattaataagctattttatcttttaaaatagcttattttaaacggagttttaaaaaaatatgaagttcttgaaatcttgtatgtattttatacttccagctgatctcagtgccagctagtcacatttcagtgctcagaagccacacgtggcctagtggctactacctaccatactgaagtgtagccttatctcctgttttattccttgtcattgttgaccacctttagtagctaacaattacaatttttgatacaggcatacctgggagatgttacaagtttggttcgagaccaccacaataaagtaaatattgcaataaagcaaacatcacaataaagcaagtcacaatttttttgttttccaatgcatatgtataaaagttgtctttatactattctgtagtcttttctgtgtgcagtagcattatgactaaaaaaaatacacaccttaattaaagatattttgttgctaaaaaaatgctagtgatcatctaagccttcagcaagtcataatcttttttgctggtggaggttcttgcctcaatgctgatggctactggctcatcagggtagtggttgctgatggttgtggtggctatggcaatttcttaagacagtaatgaagtttgccacatcaattgactcttcctttcaccaaagatttctctatagcatgcaatgctgtttgatagcattttacccacagtacaactttaaaaattggagtcagtcctctcaaaccctgccactgcttcatcaactaaatttgtgttataacctaaatccttttttatcattttgatgatgttcacagcatcttcaccagcagtagattccatttcaggaaaccactttcttgctcatccatagaaagcggctcctcatccattcaagttttatcataagattgcagtaattcagtcacatcctcaggctgcacttctagttttaattctattgctatttctaccacatttgtagttccttcctccactgaagtcttgaacccctcagagtcatccatgaggactggaatcagcttcttccaaattgctgttaatgttgatattttaacctcctcccatgaatcacaagtgttcttattggcatctagaatggtgaatcctttccaaagattttcaatttactttgctcagacccatcaaaagaatcactgtctgtggcagctatagccttacaaaatgtgtttcttaataaaacttgaaagtcagaattattccttgatccatgggctgcagaattgatgttacattggtaggaatgaaaacaatgttaatctccctaataaatctccattggaacttttggatgacaaagtacgtttgtctgtgagcagtgatatttttaaaggagtctttctttctgagtagtaggtctcaacagagagcttaaaatatgtataaaccatgttgtaaacacatgtgctgtcatccaggctttgttgttcctgttctgcacaggcagagtagatttagcatagttctcaagggacctaggagttttagaatgggcaatgagaattggcttcaacttaaagtcaccagctatgttagcccctcacaagaaagtcagcctgtcctttgaagctttgaagctaggcattgactttttcttctttttttatttttgagacggagtcttcctctgtcacccacgctgcagtgcagtggcacgatcttggctcactgcagccttcgcctcctgggctcaattgattctcctgcctcagcctcctgagtagcttggactgcaggcgtgcaccaccatgcccggctaaattttgtatttttagtagagacagggtttcaccatgttggccagactggtctcgaactcctgacctcaagcatctgcctgcctcagcttcccaaagtgctgggattacaggcatgagccacagtgcctggcctggcattgactttttctgtctagctatgaaagtcctagatgacatcttcttccaatagaaggctgcttcatcaacactgaaaatctgtagtttagcgtagccaccttaattcattatcttagatagatctggataacttgctacttctccacccagcacttgttgcttcactttgtacttttaggttatggagacagcttctttgcttaaaccttatgaaccaacctctgctagcttccaactttccttctgcagcttcctcacctctctcagccttcacagaatcgaagagtgttagggcctctctctggattaggactatgctttaagggagtattgtatctggtttgatcttctatccagacccctaaagttttctccatatcgccattaaggctgctttgtttttttttatgattcatgtgttcattggagtagcacttttaatttccttcaagaacttttcctttgtttagacatcttggctaactggtgcaaatggcctagcttttggcctgcctcagctttcttttttgtttttttttttgtttgttttttgagacagagtcttgccctgttgcccaggctggagtgcaatggctcgatctcagctcactgcaaactccgctttccgggttcaaacgattctcctgcctcagcctcccgagtagctgggattacaggcacatgccaccatgcccagtttttgtttgtttgtttgtttttagtagagacagggttttaccatgttgccaggctggtctggaactcctgacctcgtgatccgcccgccttggcctcccaaagtgctgggattacatgcgtgagccactgcgcccagcctggcctgtctcacctttcaacatgccttcctcactaagcttatttctagcttttggttgaaagtgagagatgtgtgactcctcgtttcacttgaacacttagagaccattgtagggttactaactggcctaatttcaatattgttgtctcagggaataaggaggcctgaggagagggagagagggtgaaagagatgggggaaaggctgggtagggcagacagaccacactacatttatcagttaagttcaccctcttttatgggtgcaattcatggcaccccaaaacaattacaatagtagcatcagagatctctgataaaagctgggtgtagtgactggtacctgtagtgccagctactcaggaggctgaaatgggaggatcacttgaggccaggagttcaagaccagcctgggtgatacagtgaaaccacgtctcttaaaaaaaaagagaagagatcacaggtcatcataacagatataataatgaaaaagtttgaaatactgtgagaattgataaaatgtgacacagagacacgaggtgagcacatgcttttgggaaaatggcaccaatagaattgcttagtgcagggttgccgttagcctttgatttataaaatgcacaatatctgagaagtgcaataaatagcaaagcacaataaaatgagttgcccttgtaaatttttcatgttcaaattgctgatgtgatttttgtctcctgttagtcaacaaagccaaaaacgggttctttgaaaacattaataaaattgataaactcttaatactgattcggacaaaaaagaaagaaaatacaagttacctatatcaggaataagaaagaggacatcactagagattctccagactttaaaagcatagtaaagaatatcgtaaacactatactgtcaataaattatatatctgagatgaaatgaaaaaatttcttgaaaggtataatttactagaactctcataagaagaaaaagaaaacctgaatagccctatatctcttaaataaattgaatttgtaattaaaaaccttcccataaacaaacttcaagcccttagatggctttattttgagttatatcacacatttaagaaggaagtatttccttcttaaattaaactctttcagaaaacaagattgagattacttcccaactcattttatgaggacagcataaccctgataccacaacctgacaaggaaagtttgagaaaaaattaaaagtatagccaagtgtcccccataaacaaagactcagaaatcactaaattgaatctagcaatattttttatttaaaaaaagttttttttgtaaagacactatgtggtctcattatatttacctaggctgagctcgaactcctgtgctcaagccatcctcccatgttgacttcccaaagtgctggaattacaggtatgagccaccgtaccggaccgtgaacctggagatatagagattttatatatatatatatatatatatatatatatatatatatgtttttttgtttttttgttttttctgagatggagtcttgctctgtcgcccaggctggagtgcagtggtacaaccttggctcactgcaacgtctacctcccgggttcaagcaattctcctgcctcagcctcctgagtagctggaattacaggcacccaccaccacgtctggctaattgttgtatctttattggagacggggtttcaccatgttgcccagagtggtctcaaactcctgagctcaggctatccgcctgcctcagcctcccaaagagctcactggtgtgagccaccgtgcccagcctgcaatattttaaaatactgctacttcaggatcaagtggggtttatctcatgaatacaaagttggttgagcattaaaaaaatcaattaatataacctactgggttaataggataaaggaaaagagaaattatcttaacaaatgaagagaacgcatctgacataattcaacacccgtgtatactttttaaaaaggtcttttagctaactagaaattctttaaagtgctatattagtttgttctcacactgcaaataaagacatacctgagactgggtaatttataaaggaaagagatgtaattgactcacagtttcacgtgactggggaggcctcacaatcctagtggaagatggaggagcaaaggcacatgttacatggcagctggcaagagagcatgggtaggggaactgccctttaaaaaaaccatcagaccttgtgagacttattcactatcatgagaacagcacgggcgaaacccacccccatgattcagttacctcccactgggtccctcccatgacatgtggggattatgggagctgcaattcaaaatgagatttgggtggggacacagccaaaccatatcaagtgctaaatagcaatttgataaaggaagtctacaaaaaaacataaaatcttacttaaaggtgaaacactgaatgctttctacccaagataggaaaaaacaaggatatttgcttttacaaattacttgaagtctagccagtgcagtcatggaagacagagtgtggattattagcttaccacctcataccccatccccgtattctttatcatagcatttttttccctaatagttacgtattcagtaatttacctctgtattgccactctttctcaataagctccaggagaggggcatctagcataatatctgtcatataattagaattataataaatacttagtgtattactgaatgcatttaattttgggaaactttctcttccctagattttcatttttcttttggagagatgttcactaatttatccccagggaaggaaaagtgaatgatctcattggtgagtttaggagaaggagctgggctagtttagctgagacggttccttttcttttagttgtagagagcacacgttatattctcctcttctatgtgatacgttttatagggaaagcccacactgcgggaggtgctgcttatgattgagtaggtaaatctgtttgattcaacagtgaaatagtattagcaagtttacctgccctgaaacctggtatgttttctacaattcagctttgctaataatatggctgatatttttatctttagccccctggcttacgtgactgaactcaagaaggaaaaggggcaggaagtgttatttattgactcacttcagtatttactaagatttaaaataatgtttttcaaaaaacagtgctaaattgcactaggcacattggctctcgtctgtaatcccagcacgttgggaggctgaggaaggaggatctcttgagggcaggattttgagactagcttgggcaatacagtgagaccctgtctttacgaaaaaaaattaagttagctggttatggtggtgcatgcctgtagtcctagctactcgggaggttgaggtgggagaattgctcaagtcctggagtctgaggttgcaatgagctatgattgcaccattgcactccagcttgggcaacagagtgggagcctaactcttaaaaaaaaaaaaaaagaagaaaaagagttcctgtcattcattgagggcttgctatgcattgtgctctgtcctaaacactctatatgcattatgttatttaattctttagcaacccaataatatggttaattttttcacatcactgtagcaaatacttacatagggtttattacgtgctaggcactctctctgcaccttacttactctacccattttatagactaggaaacaggcatggagagtttagcagtttgcctaagtagttgagccagtctttgaacttaggaagtctaacttgttagatcctgtgtttttaaactattctatactacctcactataaaacaaagaaatagaatgcttttctattctcatcttagttttatttttaaatttcaaaaatagcaagttcgtactaacaaatctgagcaatgcagcagaatgtaaaagttatcttatttacatgctcaaattctattcctcaaagtcaacagcccttaatttcttgatgtgcacttttcaggacttttaagaaaggaaaaaatttttaatgagatactatttttttcctaatagtttagcagacatttaaaaacaattactggctgggcatggtggctcacgcctgtaatcccagcactttgggaggccgaggtagatggaggtcaggaatttgagaccagcctggccaaaatggcaaaatgccttctctactgaaaatacaaaaattagctagttgtggtggtatgtgcctttaatcccagctactcgggaggctgaggcaggagaatcgcttgaacctgggaggtggaggttgcagtgagccaagatcatgccactgcacttcagccactgcacttcagcctgggtgacaaagtgagatgtcatctaaaaaaaaaaaaaaaaaagattactaatacatattattggcaagtgtgtggagatcaagccttaggtgcactgctgatgggaatataaatttgtacagtctttctggtacataatttgacagcctatcagaattttgaatgtgcttatctttgatccatcagttgtttttcaagggattatttctaggaaaaaattggataaataccctataatttgtaagatgtgtgcataaaggtaaagatatatactgtaaagtttataatagcaattttttttttttgagatggagcctcgctcctgtcgctcagtctggagtgcagtggcacactgcaacctccacctcccgggttcaagtgattctacttcctcagcctcccgagtagctggaattacaagcatgtgccaccatacccagctaatgattttatttttagtagagacggggtttcaccatgctggccaggctggtcttgaactcctgacctcaggtgatccacccaccccagcctcccagagtgctaggattacaggcatgagccaccgcacgcagcctagaatagcaatttttttaaacccaccattggaatagcccttgtctaatctggaggtgtttggtgaattatagtatgttaccatataggcagttaaataatggtagaattttttctttatgagataaatcagaatagacttagaataaaaaaaaaactttctccttaagaaaaatcaattcctttaagtcacagtttcctcatttaaaatcagtataaggagatgtacagaacttattaacatagctcctgataataagtaactgctattattattaccatctccaaatttttcagttaacgttttttagtaatcagaaagaaaatatttacatacacacacacacacgacctcagccaggcagcttataccatatcaatatcaaaggttagttaaagaccagttcttagactcaacagacataaattcaggtggtctggctttctgtkaactctggcaggtccctaagttttaaaaataaacttatctccaaaatggaaatactaaccaaagtgccaaactctgagtgttgttttgaggctcaaatgaaataatgtaagtatgagtaatttgaaaaagtaaagtgctctacaaacacatttagtataagagctggttttaagcatattgctttgctagattgttgcctagcataatgcctagaatctaatgggttatgcattcattacttatgtattttttaattgataaattgtttactttttcctgcatattcaaagtttgatttatgtataatcctttgatatgtagattttcagctttttcacttttcgttataatagaaaaaataactattacaattggtgtacattgttcccctttctcttactttaggaatggaacattactaaactttcaattgagtatgattctgagccctttggaaaggaacgrgacgcagctattaagaaactggcaactgaagctggagtagaagtcattgtaagaatttcacatacattatatgacctagacaagtgagtcctttttttttttttactgtgggaaaatgcgtataacataatatttaccatcttaaccatttttaagtatatagttcggtggtattaactacatagataagtttttaactgaggtttataaagtagaaataacatgtacttcacagagttatgggagaattaagtgaacatatgtcaaatccttagcattttatttagctgctattgacccaatgacaggtatcagcatttcagtttcaaaactattatggattaagactattacagaattttccttgactactcttaactcagcctcctgtggtcttgcctttctgggctcttagcattatcaattttatagttatatatagttataaattgccttgacatattttgtatgcttgtttaatgttatcttatttcatgtatatctattatgtctgtctggattttaaatccagatgcaaattggatgtaatataacattgcatagctgtagtcctctgaacaatggcataatagaatatttcccaaagtgtatttcttccagcaccagtccttggtgatgctttgtcccacagaaattctgtggtcaaacttaaatttagggagtgttatatgctatgagtcttagaggtctgtaaaacttaactttttaaaacttttggcataccattgtccttttaagtactgaaatcttataatttatttaccttttaaatcattttacttttttagtaatttatgtattttatcaagttagtaaaacaaattctgtaacatgacaaactagttgatttgatttcacattttaaatgtatcaaaaaatcatgatttgattcagacaaaggtcttgatactaagctagaattcatatatcttttaataataatcttgccttcgagctcaccaatttgcttaactttaaggagctcatagcaaggagggggcaacacaggataaaagcagttgcttctaagtgggagactcagtgttatgcataaaattgtttaggctaggcgcgatggctcacacctgtaatcccagcactttgggaggccgaggcagatggatcacgaggtcaggagttcaagaccagcctggccaaaatggtgaaaccctcatctctactaaaaatacaaaaattagccaggcatagtggcgggtgcctgtaatccagctacttgggaggctgagggaggagaatcacttgaacccgggaggcagacgttgcagtgagccaagatagcaccactgcattccagcctgggcaatagagcaagactctgtctcaaaaaaaaaaaaaaaaatcaagtgtttattggattgaatgtgaatatttactatatgtaatctatcatattaaaatgtaacatatagaaaatgttttgtcctaagattctcattttgctactgttgtgtaattaacaatgtcctcagtagtattattgtagcatcattacattcagcaaaattcattgcaaccctatgaataaattcaaaatacaccaaaacaaaatttacttaaacaggatatcttttatggtgattgctttctgtattactttctgtatgtatctgtagttgatacatcactacgtattgtataatgaaaaatacactaaaatacactaagaaaaccttgatttgccgtttatcagttatatgaccttgactagtttacttaactctcctggtaggcctgttttcacatctataaaatgatggagttggatttcacctgtcattttttattaaggccaaatgctaagcaaatggccatagtgaaaaagagtagttattccaaaagagtgtctaaacttaatctttaactaccattggcaaagctagttatttttttaattaataattgattgagttaattaatgatcagaagtaaaaagatacttaaatttaaataacttgaaatttgggggcttatgtgttctaagtatgtgacatagatacatatgctgacatctctcatgccttcattagcacaatagaaaataggaagtaattgtcaccacagtaatatagaatcaaaatttataaaatttgctgaaggaaatagggtaattgttttagtctgttttcatgatgctgataaagacatacccgagactgggcaatttacaaaagaaagatttaatggacttacaattccacacggctcagaaggcctcacaatcatggtggaaggcaaggaggagcaagtcatgtcttacatggatgacagcaggcaaggagggatcttgtgcagggtaactcccccttttaaaaaccatcagatcttgtgagacttactcactatcatgagaacagcacgggaaagacctgcccccatgattcagttacctcccacagggtccctcccatgatgtgggaattgtgggagttacaactcaagatgagattttggtgggggcacagccaaaccatatcaggaatgtaggtccaaggatacaaagtagaagttatgtaagatgaacaacactagaggtctagtgtacagagtaaggattttagttaataaaattgtmttttatttggaattttaatcaaataagtagattttagctgcttttgtcacacacatacaaaaaagtaactgagattataaatatgttaatctgcttcactatagtaaccattttactatctacatgtatcccataatgtgttgtaaactcaaatatatacaataaaatttatttttcctaaatgagacctgctgattactctttcatataattatcaacctggtttagtttttattgatgattgagattctttgagctgggccataacatgtttttcatatgtctgtgtgtattaactttttgtaattgcctttagactaatttcccctcttacttgttttttcctctcataagtttttaatattctttgtcttaaaggtttaatatttgtgtagtatatttgtgtagtatatttgatacccagaggatgtctagaagctcaggagaatgatttttggactcattaatcattttggacacatttcttggtcattataacaagctaacaccctcaaagacttcagtgattaattttattttctgctttttaagccttttgggagcttattagccaaaatgtattgtcttttttaatactaactacattttactaactcttgttataggatcatagaactcaatggtggacaaccgcctctaacttataaaagattccagactctcatcagcaaaatggaaccactagagataccagtagagacaattacttcagaagtgatagaaaagtgcacaactcctctgtctgatgaccatgatgagaaatatggagtcccttcactggaagagctaggtgagtgtaaactgtagtcagtgtgaggyttgcaagttaataaatcataaattactcagaaaattccccttttaattttgccatgtaaagtattttgcattaggagagaaagaaagggcagggggrgaagaaaaagaaccctttaagaagtgatatgtttgttcatcatttatgtgttttataaatatgtgatctattgttaccaccttaagatgtacatcctgaaaaattgaaaccatgtcatatcctctgtaggtgagggcttatttaggccttcagttcatttttatggtactctcttaatttttctgcaaagtaatttgttctcccagttattggggttaaataaaaattagtttcggaagaatgatgtttttttcttttctttcttgtaggttttgatacagatggcttatcctctgcagtgtggccaggcggagaaactgaagcacttactcgtttggaaaggcatttggaaagaaaagtatgataatgtagattatatagctatgcttgtatttccaaactgccatttaaaaaataatttttctctcttttaaaaataacaaatagattgttgaaaggggaggattaacagaaatggttaaaatagcacaaacctaattgtttgaaagttaactaccatctcctcatttaaatgctctttctccttctcttctaattatttcccctttagctactaccgcactacctcttctgttctttctacctaagctagtatctagtggccacaatttcgaaactagaatagaattatatttcacctttacctttgtgttaaagagaggttgaaagccaggcatggtggcttacgcctgtaatcccagcactttgggaggctgacgcaggtggatcacttgaggtcaggagttcaagaccagcctggccaacatggcaaaacccccatctttactaaaaatacaaaagttagccagggtggtggtgtgtgcctttaattccagctacttgggatgctgaggcatgagaattgtttgaacccaggaggcagaagtcgcagtaagccaagatcgtaccactgtactccagcctgggtgatggagtgagactccatctcaaaataaataaataaattttccaggcctggtggctcatacctgtaatcccaacactttgggaggctgaggtgggcagatcatttggggtcaggagtttgagaccagcctggccaacatggtgaaatcccatccctactaaaaatacaaaaattagccgggcgtggtggcgcatgcctgtagtcgcagctactcaggaggctgaggcaagagaatcctccacccgggagctggaggttgcagtgagccgagattgagccactgcactccagcctgggtgacagagcgagaccctgtctcaggaaaaaaaaaaaagagagagagattgaaggtgctctcagctttctgttggaaatttgaaggaaatttatttcacatgagtatgtgctgcacaaggacgactgaaacaaaagaatgctcacttttttatcctgtcttattttttattaaaacatgtaatttgtggctaggataagattttattccccaagaactatgtaactttaaaaaaaaaaatctccattctgagtgttcttttaaaatgaaaaagacaattagttaatataattttctctgtgtgttttcaggcttgggtggcaaattttgaaagacctcgaatgaatgcgaattctctgcttgcaagccctactggacttagtccttatctccgatttggttgtttgtcatgtcgactgttttacttcaaactaacagatctctacaaaaaggtattctctaaaattagagcttattgtttaatactttaaaaaaaaattctgataatacttctttgctttttaaccataggtaaagaagaacagttcccctcccctttccctttatgggcaactgttatggcgtgaatttttctatacagcagcaacaaataatccacgctttgataaaatggaaggaaaccctatctgtgttcagattccttgggataaaaatcctgaggctttagcmaaatgggcggaaggccggacaggctttccatggattgatgccatcatgacrcagcttcgtcaggagggttggattcatcatctagccaggcatgcagttgcttgcttcctgacacgaggggacctgtggattagttgggaagaaggaatgaaggtaagtgttctaactgatatagcatgccttattttgaaggaatccttaccttaataaaacaaatcctagaagttgtctgtttatagattcatttatggtgtagtttttcagtggataaaacatttaattccccaaatacggggacactttcagagaaaaatggtataatcagacaagcaaaaaggtgaaaactggttaaattgattaacctaaagtcattttaatggttaaaccagcctagccactaagagaactgtaaaatttaacactgaatttgttgatagatatatttataggtgatatttctatcacgaaaagaattcactaaagagttcctagagatagtgaattcatattataaattttaaaatataaatcatttcacctcacttctcagctttttagtaatacttctattatgtaaagagaagcatactacattttgtgacgacatcttgtggattacacgtaataagacttaggtactttttttttttttttttttttgagacggagtctctcactctgtagcccaggccggggtgcaatgacgtgatctcagctcactgcaacctacgccttccaggttcaagtgattctcctgcctcaacctcccgagtagctgggattacaggtgcccaccactgtgcccagctaattttgcatttttagtagagagagggytttaccatattgcccaggctggtcttgaactcctgacctcaaatgatccccctgcctcagcctcccaaagtgctgggattacacgcatgagccaccgtgcccggccattacgtacattttttacctttctggcaataccatacatttgccccatccaaggaccatttctgagcttgtgtgtgtgtgtgtgtgtgtgtgtgtgtgtgtgtgttaatctcttatatttcctagtacaccgttgtatacaaagacaatatataacatacttaatgaatatatataaaaatcatttattttaattctattttctttctgatcaaggaattcgaaattaaactatgtaatgctagtatatatttttaagtgaatttatatttgagtatgcttcctttatttaggctagaatatgaagctaagtttttgttggtgttttatgtaatagcatttttgctttcttgaaagtggttgactgcttttcctgtgtctactaataatatccttttaaatccacatccttttaaatcagtgatttgaatattttttttaccttccattctcccagtaacactgcagaggttggaaaagtaaattctcttcagaagcatactatattaccactatgtttctttctctggaagagctcattatrgaacagaacatagggaagctaactttggaatgtttaattttacaattctgtgctagattttctttgccttgactttggctctactgtgaccttgaaaatgcttgctttgcgaattatgtgtgtgcaaactaattggttactgttacttctgaaggtatttgaagaattattgcttgatgcagattggagcataaatgctggaagttggatgtggctgtcttgtagttccttttttcaacagttttttcactgctattgccctgttggttttggtaggagaacagatcccaatggagactatatcaggtaaatcaagggtgattactactcrgtttggaatagttaattcaagaagagcttttcatgtttaatcaatgcttaaagtattccccactcatgatgggcagcagagatgagaagggtaaacagatcatttaaatggtcttgatttgattttggtctgtcatagctagtagttatagtttgcttagagtgcattttattagtaatctttcttttttctcccaaaggcgttatttgcctgtcctaagaggcttccctgcaaaatatatctatgatccctggaatgcaccagaaggtatccaaaaggtagccaaatgtttgataggagttaattatcctaaaccaatggtgaaccatgctgaggcaagccgtttgaatatcgaaaggatgaaacagatctatcagcagctttcacgatatagaggactaggtatgttaagaactgtctttgtttctttggcagctgtttatgtacttatctttgaattttatcttgatcataatttaaaagaaaatttttttgtcctttaggtcttctggcatcagtaccttctaatcctaatgggaatggaggcttcatgggatattctgcagaaaatatcccaggttgtagcagcagtggaagtaagtgaaaaggaaatttctgcacttagtaacatgaagaggttattaaacaaatatatttgttattgatcctcactaacatattttataaaaatctgtctttgaaattagcttaatagattctttgtatgcatgcatacatgtgcacccagacacatctcttcactccattgatgacattttagagatggaaaatatcattacrtataatagatactgggtcaagttaaagctcttgcaaactgaggagagcaattttaaggataaaatgaaactcaaatgtcatattttcagaatgcttattattttttactccttaggtgtatggcaactataaggtaattagttaagaaagtcagtggccctgtgaacatggccaaaagatttattgtacacatgcatagagccctctagtctttttgcacataagtttttcttataaagtctggtctgtagtagttttctgtatgatacaaatttagtgaccatgtaaattcttatgtgtgatattaataatttcaggaactcagtatgtgttagaaatttgaaccatcatattagtttttggctttgaccaaaaatagcatgaagctcagtaatttgattaaaaaataggacagcatcagtgagaatggtgattattaaaaagtcaagaaacaacagatgctggtgaggatgcagagaaaaaggaaggcttttacattgttgatgggattgtaaattagttcaaccattgtggaagagagtgtggtgattcctcaaagatctagaagcaggaataccatttgactgagcaatcccattactgggtatatacccaaaggaatataaatcattctgttataaagatacatgcacacgtatgttcattgcagcactattcacattagcaaagacgtggaatcaacctaaatgccagtcgatgatagactagataaagaaaatgtggtacatatgtaccatgaaatactatgcagccataaaaaggaacgagatcatgttctttgcagggacatgatggagcttgtagccattatcctcagcaaactaaggcaggaacagaaaaccaaacacctcatgttcttgcttgtaagtggaagtagaatgatgagaacacatggatacatgcggagaacaacacatactggggccaggtgcagtagctcacacttgtaatcccagcactttgggaggccgaggtgggtggatcacctgaggttgggagtttgagaccagcccctgaccaacatggagaaacccccgtctctactaaaaagacaaaattggccgggcgtggtagcgcatgcctgtaatcccagctacttgggaggctgaggcaggagaatcacttgaacccaggaggcagaggttgtggtgagctgagatcgcgccattgcactccagcctggataacaagagcaaaactccatctcaaaaacaaaaaacaacaaaacacacatgctggggtctgttgggggggcaggggcagggagagcattaggaagaatagctaatgcatgctggtcttaatacctaggtgatgggttgatctgtgcagcaaacccccatggcacatgtttgcctatgtaacaaacctgcacatcctgcacatgtaccccagaacttaaaataaaaattgaagggaaaaaaaagaaaaaagaaatctatacatgtgataaaagagcataaaatcatacaaacactttgtatcaatgtcaatacctggttatattgttgtactgtagtttcataagatgtcactaagaagatagggaaacaggacctctttgtactaactttacaactgtttgtgaatctatatttttcaaaataaaaaaaacaggataaaaacagggtagcatttgaggaatgcttttttaagtcagatgttctaagttgatattaagaataaaaccttttaaaaactgaacctttttgaattcagaaatgtcctgcatcctcatgaaaacagcatgtattttatcctccaagaattagttttgggagaaggggacaaaagcactcacattttgactgcctacctttgcccagtagatagtaagggatttttgcatactttctcacagtaacctggggaggaggtagtgggatcctcattttatatttggggaaataatcctagaaagattaggtaacttaaccaagatcccacagttagtaagtagttgagctaagattcagatccaagtctgactagctccaaagcttgtacttcttcctgcatcattgggcctcctctgcaaatggaatgccataagtgtttacaagagaaaatattttattcctggaatgtgatccacccagcagtcgacagttgccagtgatggcagtatacttgagaaatgttccttctcagtatctcctacaatttgaataaacttccacaagataatcatttcaaaagttctttcagatctcttgttcagttcacagcctgccttgtcagcccacacatgagtgagggacagaagctctgtgaagcactaagataacaggcaggtakcaatgggctaggaaccaagggttgggctaatacacaatgatggcacagactgcttcttagaccactcaaacctgtgtcgtttatttggaattatcttcaaaagctaatcatagtagcaggttaaattgggacaattttgcttcacaaatgtatatagggtagtttattatataatagaagaattaataaatcttgaaattattttaatcatgtaaatatttgcctgtaacatagtttgtagccagcttcttggaggctttcaaaagacatgagacatgaaaagctaagtagaacttaagtataaatgggggtgtggagggaaaacaaaaacaaatgaaaaagtgataaattataagatgctgcctccatgtgcaatatgagaaaagggagagattattgagagctgaagggactagagaaactttcttgaaaggtggcaggattgagtagcatttgggtagtcagatgaaggaaaaaaacattttagacctggaaatgggaaattgtgaaaagacacggcttgggctatgctattaatattaaacatttctcctctcaggtttctgccccatttgaaaggacttaaatgcttctaaagcatatccttttatgccttacacttatcctgtctgtaggcttttatagtaccttacaaggcatgtcaaagggcaaaattcttttacttgtcttagttttttgtttgtttgtttttgtttgtttttttaatgactgtggaacattcttaatctctgcaacacaaattgcatttttctctgctcatctttgtatttgtgtgtgtgtgcacatgtgctcaggaaaggaataaactatacatagaagtcttacttttgttcttataataaaacagactgtaatatgtttactactgtagcaatatgttttagtttttatttaacttttaggtttttttattgtaaaatatcagttcatcggcattattagtcattagggaaatgcaaattaaaacaactatgggatagtacttcatactcacttagggtgagcaactgccactgattgcctgggattgaagttaattaaaaygaaagtaagtgcacagtcttgttcaggccataaggtgttgacctatccacctgctcrtggataggtccagaatgctcatatttttccataaactggacacactgacagaaatgtttccctaaaacatacttctctgttctagccaacctattctcctataatagtgtttgtttttagaagggttgataggattgcttaggctaggtaactgccacatagtctgtgtcttctgcttgtcgtatgatttgaattgtttaactcatcgggcaggcccttattcccttatcctcaaggaaatatgtttggaggagctctgaagsaaaagcgtgggaaaagggacaagagtgagggaggaatgtctatctcactcttgcccctatgttttaccttcatggtsaagtttcaaattgtcatctagtaaggaaatrttttttagaaaatgatcatcaatgattttkcctttgagctgtcaacacttctgtgagcctaaatttaagttttcctggtttgagcatgtgatttttggttcataggaagattgagatttagtcttaaaagcatataaatgaccttaagtacaagcgctaaaagttggatttgtagacttaataatacatacatcttggatttgaytttaagtaattttactgtgttttaaatactaacaggttgctctcaagggagtggtattttacactatgctcatggcgacagtcagcaaactcacctgttgaagcaaggtaagaatgaagcattggagcatactgttctttttccttttcctatcttaaacatacattttttaaatgtgcaggaagaagctccatgggcactggtctcagtggtgggaaacgtcctagtcaggaagaggacacacagagtattggtcctaaagtccagagacagagcactaattaggtaaatattttagagctgtatttcttgctttrgaagagtatataattaacataaattaagataatttcaaaaatggagcaaatctctattttcaaaccagaaaatcttgaggcattaatttttaagcaatttttacaaactcagttaatttttggtcaagagacatgcatctgtactggagaaattgttgcaccagttttatattcatctgaaccaatgctctttaaattagagatgtttatgattttgtggtcaagttttttcttagaaaaagacaacttttttatttccttactatgtaactatgagtctaaaacaattaaagtggcctgtttattttagtgacattaatataatctttttatgaactttcccctaaatctttgcctcttaaatgttgataaatttcttttatctgttatgatgcttctaaaatctaaattatttccaatttgggaatagttcaaaattttttaaaatgctggcccttattagaagtatcagaaagccttgcctgcattcaatttaattggatttgggatgtcattttgtgatttaaattaatatgaaaaatatttatacgttggatttgccagtttttaaaaattttctgtttcttcagtttctaacactgtttacattttttattgcttagtttttttatgtcaacctaattagactataagtatcttgaagataaggtcaataaacactcatcacatttttgtcattgaattatttgcaatcaagctttacctagtttttttttcccccttaaatcacagaaaacattcaggaggaatactgttgcagctgaaattggtggggagttcaatacttttcaattaagttatttaaaaatattcttcattgatggaaagcagttacatattgaaatatgttgtttctaatgacatttctgtggtttttaactttttaatgaatttcacagagkacaattggtaatttgtatataaagaacttggcaagagaatttgcttaatgtaaatataaacagtcacaattagtatagacccatcgatatatttttgataatttttcatgtatggtaaagttaaaatgacaaattgatattctgatataaaactcaaagttttgaagtcagtgggaaaaaaggaggtttttagactttcttaaaagacgttaaaattttaggacagaattttcttgatgttgtttgatctaactttgcactctttgataataatgttttagataatgtgcgtaatccaaattggtattgtagcctctgttaacacagacagtatatgttttaaactttgatgtaaacctttttagacccaaacttgtggaagtatcatgtgttaagttctctgtctctgtttctttgttcatttattactaaaatgaacttgttattaaagtatatgcaaatatgaaatcttgtgtacgtgtttttttttcttttttggtaagggagagagtattgctgtatgatatatgattacaaattacaaagagattctataaaccacatcatcattttgaaggaacagctaccatatgtttagttaaacagtgtttttcaaaattatatgcaagaaagaggtaaaactaaagggacttttttcaagtaatggcatttgtaaccataaatcaggcagtatgggctagcaatcaatagagtgagctctcgagtcaaatgcccatttctgccattcattagctttgaggtcttgagcaagtttaaccttctatgtcttctttcttcttatctataaaatagggatgagggtagtatctgctttatagttcagttccatgtaaaatacttatgagctggcatgtgatagggtactcagtgttagccacagggctgccatgctgtgtcaccccctgtcgtgtacagtgcacagtctgcatagctgtatgccacagctctggttagctgccattatttttattactattgttattatccctttaatgttctctagtaggttagttcttgccattctgaattataaccagtggcttttcattttcccatcattaatcatgatagatatttagtatgataatttaaagataactgaagataaaagttgagtaaaaatacagaaacgataacattttagatgatatgcatttttaaaaatatcctggatagtgaattaacaatgatcaataaattccattactgaggctaggtgtggtggctcacgcctataatcccagcacttttggaggctgaggtgggaggatcactgaagcccaggaggtcaaggctgcagtgagctatgattgtgccactgtactccagcctgggtggacagatcaagacctcatctgagctgggtgtggtggctcattgcctgtaatcccagcactttgtggggttgaggcrggaggatcacttaaagccaggagtttgagaccagccctggagacttagcaagaccccatctctatttttaaaaaatcaatataaaaataaaaaaaaagtaaagaagaccaggcagggtggctcatgcctataattctagcactttgggaaactgaagtgaagcaggagaatcacttgaggcatgaacccaggaggcagagtttgcagtgagccgagatcacatcactgcactccagcctgggcgacagagtgagactcttgtctcaaaaaaaaaaaaatgattagcctgaacaacatcttgggaccccatctctacaaaaggaaacaacaaaaatattagccaggtgtggtggtgtgcactatggtcccagctacttgggaggctgaggtgggaggatggcttgatctaggggatttgaggctgcagtgagctatgattgcaccactgcactccaacctggatgacagggtgagaccttgtctcggggatggggcggcaggtgggaaatccattaccgagaaaaagaataagaaaaaatcctgtgctttatcgttcttttttcaccactgttaaagtgaagtaatattttaattgttttttatggtaagtgtacctcacatcctactctttggacctggttgtacagtgcagagttgagaaattcatagacctgagatttaccatcaccgtacaagaggtcatagatttcagttttcttgttgttattttgagacagagtctcactctgtcgcccaggctggagtgcagtggcacgatctcggctcactgcggcatctgcctcctgggttcaagcgattctcctgcctcagcctcccgagtagttgggactacaggcgcgtgccatcacgcccggctaattttttgtattttttagtagagacagggtttcaccgttagccagaatggtcgcgatctcctgacctcatgatccgctggcctcggcctcccaaagtgctgggattacaggcatgagccaccgcgcacggccaaagattcagttttaatgtgaataaataaacagtaaaagaacactatctcagcataagcactggtatgctatttataaatgtaagaggattttttttttattagggagttttttggaaagctttttcagtttggtgtaaatagtggtcaaaatgaatcactgaaagggaaagaaaaggcatcagtcatcatgctctacttgagcagatacatgatgttcgaatcagtgttctccccttaactagaaatcctacttgtggttaagggatttaagacattttactcattcagcaaatacttcttcaattcttattgccaaaaactgtactgacaacttgggaaaattatattgagagaaccagggttttgaatgaactgtacaaagtccttatgtttttcatatttgcttaaaataaataagtaaatttgagatataaaagtctatcagtatttttaatgcatctcttacatactagaaatttcaggatcttctcacaattcaaatgtgtttgtaattttcttgtacataatatgcataattgtaagttcttttccccttttcttcattcaaggttttttttctgattatatggtcctagaaatgcactgtttaaatatttgggctggaaaaaactttgagtagcatttatttaatacagttggcatagctgatttgtcagtttcaagttttgattacaatgcacggggtcatatgtattgtaattccttgcacaattacgtggagccctaatacaagcttccagcaccctggtgcacatttctgctccctccctcctgaccagtgatggcagcttgcagttctaagtcctgagtttacattccttaacttccttttctgtatcctaatttccttttcctaagtgcaaatgacacactttggttagtctggaccccaaatcattttatttcaggaaaaagtgtgcaataaatctatgcataatagagtttttatattcggataactcaggagttgctggacaaacaccccccagctgtacacatgagttgctcagatcattctagaatatcctagagatcagaggtgggtgatcttgaggagccaggattcttgctgctactcagtggagttaaatgcacgtgtgagctcctctcaatatagcctgttgagcctaaactgcatagtgagactagactcaaagatttagttaacatttcctgagttcctactgtgtgcccagcattgttgacagaaaaaataatcagtagcctcaaggaattcactccacagggtgcgagggcagtctgtatgccagtgccaccgacggcagaactgtgcacagtgtgctacgaacacctgacagcagacacctccagctgggaaaaccagttttcctgactccaactccacacaaacagaatcaccaggcccagctcagggcaccctgtcctcgataacacttaactaggtgtgattagtcacgttattagttgttgatatctctgccctccactagaatgtaagctccataaggacagggaatgtgttttattccccctctattttctcattgctgtttcaatatgcttggcacttagcaggcctgccataaatacttgttttttggatggataaatgtgaaaataaatgagagagacattcagcctggctttaaggagaaattaacgtgtttagtgtatgaggttgggcatcaccggtaataattagaatggaaaccacttggcagtttatcagaaaaggggagtatttaggtgaaggtggcaaggagggagagaaaggagaatggcttttaaagacagtcgctaactgctggggtagggtgggggcggggaagagttcagatgtgtttcaaagaactttgggggttttttaaacatttcttttgtaagttggttctttacctaactgaattattttgggaacagtgattggctctatcttaaagatatagcggtttctgttacttctttttttcttatattttctaagcgtcaaagctactggaactccgcttcctaaaatgctgggaaggaaagggtgtgaaaatgccagatgcccccgccagcacaggctgggctgcctggaaagccgattcccactccgactcgccctcgtggtgcggggagggacgcgtagttgtgtcccgcgctctgactggctgcgttgggacgcgggggcgtgtcttgggggggcgggggttggcggtcatctcccgagccctgattggccatgggcgaagggactgatggcctggttggcgstgctgagaactgtcgggagcttcttgagaccgaggaccgaaatcccggctccaggcctcggggactgcggactgtggggaggctggccggagagagagggaaggacggggcctggcccccgggactccctgtgccttgcttggagctgacgccgacgggtgagtcgcccccttcctctgctcctgggcgtgttcctcaccagcggcgccgcagcggtcagggcccgcaaaaccccacgcctcgccagacgctcagctcagcctgccgggtttctctggaaaagcggaggccccacagtgaatgtgcggccttttgatcggtcctggagatcttccgtggaccctcgtttttccttgcttataaacgttggtcaatttgaaactggcagcagggcatatgtgttacgaaagaagaactttattgaaaccagtggtggtgtagagaagaccatactaaccataactgtgtattacagaagtgaatttcactccccaaaaatgcttaagaaacaagcatcctagaacagcccacattgtgatttaacaaacatttaccaaaagcattgctatatgtgggggcacagggctaagagcaggcaggactctggagccaacctgtggggtttgagtccaaattctgccggttttttgttttttgtttttttttttagctgagtaaccttgggcaagttcctttacctgcgtctgtttcctcattttaaaatgagttgttgtgatgatttaatgatttagtatatgtgaagagttttctgcatattctaagtgatttatggtattaactcgtttgatctttgcagtcacccaggagatagtatcaccattttcctgatgccaaactgaggctcagagaggtgaagtaacttcttcaagtcacaacacaactgttgtccaggaatcaggcagtctggctctgctaacccagttttacccactgcattaatgtaccgcatccacttgttcactcagtttcacctgacaaatactaattttgtctctctgtggaacaagttctttgctgggtgcagggaataaagcagaacaccgttcagttcctgccttcccaacgcttgtaaatctagtgcaggtcattcatggccgggctgcagggtgtccatgaatcctgctaaaatcatttgcgaaatgttgtgagcgtgggtcttttcttctggaaagagagtctgtgactctcaggttctgagttgatctgtgatccaaacagaggtgtgaagaagtgttgttttagcagatctgtgcctagtatgcctgatacacagcttgaacttcaaacaaacagcaacaaaattcctactggttggaagaatgaagaacttgtaagagcataataagtgctgcagtagcgtccggagcagggtgctgtggaagagcacacagaaggccacctgcccaggaatgcctcctagaggcagtgaaggcagctgggtgaaggatagggaagcagttcattggaacactgtggtgaccagtctgtccatgtagtgttgagacagaaacaacacgtgaacagctgcagctgttgtaccacttgtgcgcaagtgtaaaagtccatggtgccatgaaatcatgtaatggggacaggaggcttcatgtattcgtgaaggttagaaaagtttccttgagaaagtgacacttaggcctaaaagttggagcattttgggcatggaatctggcccacagtcttcaaagaccacatggtagaaaccagtagagcaccagggact

SEQ ID NO: 94108 - DNA, 66072 bp, Homo sapiens
atatgtgggggcggccatgttgccaggcacatgtgggggcaagggcaagagggcaaaggtgggaattgccatgtttgggtggacctggtttctaatggcttgcatttgcatatcaaagtttgccggcctggctctaagagctggggctttccttttctggagctgctttaaaagagacaaaaactttccaaggaccccttttcctctctatctgcctaaaataatttcttaataactcctataacattattacaggtttcctaaaatgccaacatgaaattagacatgcaagggatttattagtggaaaacagcggtgaggggaagtgaggaggctgggaggggaggttgggagaactatcaggccacagtgcaggtctgaccttttgtgaaggaaagcaggctaaagaagaggtttagactgctatgaaagtcaaagaaagttcaacaggccagtgaggagtcaccctgtcagaagtgatctgcgtcttccccgaaatgacctaccatagcatttctgccactcccagtcactgcttggcagcacccatgagaagcatagactcaatgtgtatgcagagctggatgcaaggagcacagcagctgaagccatcagttttcaccccacagctgaagatctgtcagtgaatatgctcaaggttgccactataattttgggtcacagggtagtgcttatactgatgcaaacaagatccaaagggatgcctggttcaaaaggtgggaggctttctgcaagtgaaagatgaggaaaaactttaaaaagtttattttaggctcttgatcctcattgttatgatgcatccttgtaaatttgtcccaagaaaactttattaaaattcatttatttaatgagattaaccacaggaaaaaaaggaaatgaatattaaagtgacaattacagaagtaaaagacctaattatttaccaggggcaaattccatacagtatttatattacataatatatttgtatcaagtttaattcacttaattcatcattaaaattgtttaccagaattcagttcttcctgttacacattgctgggctggtgctctcaagtgtttgtttttatcataaaattatttttgcttaaacaataattaagcattaataattgttttaattaaaaattgtttaatacaaggtcaagagtgcttaaaaaaagtgagatttaggccagactcagtggcttacacctgtaatcccaacactttgagaggccgaggcgggaggatggtttgagcccaggagttcaagaccagcctgggcaacatagtgagaccttgttgctggagtgcagttgcgctgtctcggctcatcacaacttccgtctcctgggttcaagtgattctcctgcctcagcctcctgagtagatgggattacaggcatgtaccaccacacctggctaattttgtatttttattagagacggggtttctccatgttggtcaggctggtctcaaactcgtgacctcaggtgttcctcttacctcggccttccaaagtgctgggattacaggtgtgagccaccgcacccagcctcaaattttttaaaaaaaattacgtgtgatggtgcatacctgtggtcccagctactcaggaggttgaggcagaaggatcacttgagcccatgagattgaggccacagtgagccttgtttgtgccactgtatgccagtctggatgacagagcaagaccctgtctcaaagagagagagagagaaatttataaagaaaacatctctttttttttttttttttttaaagtcagggtctctgctctgtcactcggctggagtgcagtggtgcaatcataactcactgtgccctcaaactcttgggcccaagtgatcttcctacttcagcctcccaagtagctcggactacaggtgcatgccaccatgcccggctaattgttgttgttgttgttgttgttgttgttttagcgatgcgggtctccttacattgcccaggctggtcttgaactcttggcctcaagcgatcctcctgcctgagcttcccaagtcactgggattacagtcgtgagtcactagcctagctcacatcactcttatatatggtaaaacagagtattcagcagagcaaaatttaaaaatatagagagaaacagcaatgtttccaaatagtcaatatggctacatgttaatttcagtcaaaaagcaaccaaacaagaagagggcatggaaacccatagaattttgttctaaaatccttgaagttgactgtggaagtaaaaatgttctacacacatttttagaagtttataaattatatgacttgcaatttcataaaattctgagtgaacgttgtgtctaggacaaaacagatccctgatcaacgtattatatttgcacaaggcccctaatgtcacagatattagtcactaaacaaaacatttatctatggcagaatgagtagattccaatttagggccaagtgcagtggctcacgcctgtaatactagcactttgggaggtggaggtgggcagatcacttgaggccagaaattcgagaccaggctgggcaacatggcaaaaccccttctctacaaaaaaatacaaaaaaaattagccgagcatggtggtgtgtgcctggaattccagctacccaggaggctgatgtagaaggaccacctgagccagggaaggtcaaggctgcagtgagctgtgatcccaccactgcattccagggacaccaattccaaaaaataaaaaataaaaaagattccaatttagtattctgtaaacccaagaccctagccactcctactatgcaagctttacatagaactctaactttcatagagttttgtgtgggaattcttgggtttcaacttggcacatcatctatgtactttctaaagcgtgaaattaatccagacacttacaaaaagttattcaaatgattgtatttacaaaaatggcacaaagtgaattaaatagtctatgcacatgcatatatatatttgaactccataaaacattattattattgttctatacaattaatattaacttaaatttgccctcatattaatcctttacattactattcattctttcatctgtgagtttccatctgggattattttctttcctacaaacttatccaacaattttctattgttgtttggatatttgtgtattttcatgtatacatatataaacataatactttattatattaattataataatttattattgttcatgtggtcaatgttcacttttttttttcttgagacagggtctcaccctgtcacccagctggagtgcagtggcacaaccacagctcactgaaacctcaatctgccagctcaagcgatcctccttactcagccttccgagaagctgggactagaggcacgtgaccatgcctggctaatttttgtataatttttgtatttttttgtagaaacagtgtttcaccatgttgcccaggctggtctcgaactctgcccacctcatcttcccaaagtgctgggaatacaagcgtgagccaccacgtccagtccaatgttcactttaaatttgctcacgtctttgccttttttgttgggcttcttgcatttctaggtttccatgtgggtaaatttttttttcctgctggaaggatactctttcatatttcctttattgtctgtctgccgatgacaaattctctcaagtttttgtttctaaaaatggctttgtcttatctctatttttaaggagtatttttgctgggtatagaaatagattggcaggggttggtctctttgtcaaactctaattgcatctgatctaatttccagttatcaaggaaactatacttttgattcttccagggaaaaagtaaacacaatgaatatttcattatatttgagtgaacataaattctacatttcctaaacttgggaatagtaatatataactatggaacctcattcaggaaaaaaaaaaaaaaaaaaaaaaaaaacactccttatgcacccttctagtatacacagatcagaataaataaagtgaatatcaatatttggaagtttaaaaaagcaagaagtcacaaaatgcagtcaggaaagtgggttgaattggcaagatgtagtgctcaaagcaaaaccttggatgtttgttgcaattctccaagttttttttttttttgagacagagtctccctctgtcgcccaggctggagtgcagtggcgcgatctcggctcactgcaagctctgcctcctgggttgacgccattctcctgcctcagcctcccaagtagctgggactacaggcgcccgccacacgcccggctaattttttgtatttttagtagagacagggtttcaccgtgttagctaggatggtctcgatctcctgacctcgtgatccgcccacctcggcctcccaaagtgctgggattacaggcgtgagccaccgcgcccaaccgcaattctccaagttttaatgatggttcttttttgtctccttactctcttaaacacattcatccgtttcaacaagtttttttttaacaagttattttttattttattattatttttttaaagctctggttagtgctagatactgtaaatcatgattaatcagacatggacttagcttgcaaggagcttccaacagagacgttaataggtatacaaataccagtagcagattgagacagccataacagatgcatagacaaagattatttcctgttaagaggagtgaacaattatttatggggaataaggagactaagagagaaaagaatcagaaaaaagcgcctccaggaggcagcatgtaagcggtacctttcagaaaagaaacggtcgtgccaagataattacaagtgacagatgacaagcttttctgggaaacattgtccaagaaggaataggcaagaactgcagtcaagcagaattacatatgcaaaagagcagtgagaaataagagaaaatggcaaattgcagacggccctgaatgctgggctaagaagtctggcttgagataaacgtccagctaaagcaggtctgagcgttttttccagagaggtgagggagaagggcacgtatctattaggttgatgcaaaagtaattgcgggtttgccattattttcagtggcaaaaaccacaattacttttgcaccaatttatttatttatttttaagacagagtctcgctctgttgtccaggctgaagtgcagtggcatgatctcagctccactgcaacctccgcctccccggctcaagtgatcctcgtgcttcagcctcccgagtagctgggactgcaggcatgcgacatcacgcccggctaattattttattattttattattttttatttttagtagagacggggtttcaccatggtggccaggctggtctcgaactcctgagctcaggccatcttccctcctcggcctcccaaagtgctgggattacaggcgggagccaccgcgcccggcctaccgtcctacgaggtaggcatcaggaaccctccacagcgaaggcgcccccactacctatctgtctacaggcgtgccttttacgggctgtgctatggacagcacttgggatgtcagattgaccactaataaggtagatccgtatacactgctgcggggctgagtaactggtagagggtcccacagttagaaagcacctggaccttggctggaattggcggaaagtccaggcagcggagaggcgcggtccctgggactgggtgcgctcttggcaccagggtcagggcccacaggctccaggaagcccacgcgctccgccgggtcgcaccaggttggctgtccgaacgcagccagctggcggggcggggccttccagctgggggcggggtcttgacagctagggggcggggccttgcagctggtagggtggggcgggccgcgggctgtgggctttgggaggggtgcggactagcagaggccgagagcggcgagccgcgaaccaggcagtccggggcatccagactgcaggccgcgcccaggccgcgcccaggctgcgccgcccgcctgcctcccgcgctgccgcgtcgccagtgctagcgctcctctccagcatgctgcggcggggcagccaggcgctccggcgcttctccactggccgggtgagtccggcccgggcgagcgtcccggctgtcaccctgtcctggtttccagactccggggcgggagggccggggcggtggggctggggatgagcagcgatgcttagactttgctaaacaccaagacagcgtttaaaacaaacaaacaaacaaacaaaaacagagagacctcagaggagggcttggggagggtcccggatgggaactggcacgcargccattgtcttctgccgggagggggctgaggatgcagtttttggacgtgtcaagtctggctgggatggcaaggtgggaacagtcacttggtaaggaggacagagtctgcttcctttcctttttcacttcaatcatgagmtccctggtcaagagctggagccatatggraccgagactgtctcctggaggaggggagtatcaagtcaatagggtcctcgttggcggcctgggaggtgtaagcgctcgagactggcacgcagggccggttcagataatggcactcaaagctgatggctgcaagctcagtattcctgagctgagctgcagatggcaaaatttytagaattgccaggcgctgcagaggcagccacgctggaacactattctactgtagcacaagaaccgagctctggcccagccccgcgccttggaattgcatcagctcctccagaaatggaaccgagagaggacacgttgcactgcggtgctgccttcagcacccagggggcctcgggactgtttagggaagagagagagagaraaaaaaaaaataaaaactgtcttatgtatcgtatcttttataggaagtacataaaagaatttgcttatcgattctttttctcggccatgccaaagccatatgtacatatgtatatattcagatgtaaaaaacttggaggcagagagaagtcttgagtagcaccaaaaactggcccaaacttgcatcaaaggaaaagctttctgtatcccagacaaccccaaataataagaattcgttttactctttgcaaccagttctagttactttgaggtatagtcaccttttataaaacgaggggtgggggtggggaagacctgctctgctaggactttggcctgctctcctggacccctcattagcttcccccaccacgtggcacatgggatcccagatggatagcacagaaagcaacgggctgtgcccaatgcctgagcctgttttgttggcctcctctgtcaacacctttcactgacttgtcttttttggtgaccagaaggaagtcttgcagaatgaaaagattttgatagtgcggtttgcataagatttcagtaataaaaggtaaacatctcaggtggcaaatggcataaacaaaactatggatgtggggaagaactggcgtgatcagggtctaactgtacgcaggggtgcatatggaaaagcagtgatactcatggctgggaagaagacagtttcctcagtggtcgaaaggaagctactgagtggtgaatgaaaaatgtgggatgttttatcctgtagaaaatgttctggactgtgttttataagaattattcaaaatcaaacagatacatggctggtggaaatataaaatggtacagccactttggaaaactgtttggcagttttatatgtagttaaacataaacctatcatatgaccccggaatcacactcctaggtatttactcaaaagaaatgaaaccttattygcccgcatagaaacctgtttattgatgtttctagaggttttattcataattgccaaaaactggaaataaattgtcctcagctggtgacaggataaacaagctgtggtatatccatccatacaatggaattctactcagttgggggaaaaaggaatgaactactgatgcayacaacatggatggaactcaaatatgtatgctaagtgtaagaatcagactcataatgctacatattttatgatttcatttatctgacattttggaagagtaaaactatagggacagaaaaaagatcagtgatgtctggagctggagataggaggaaggattgattayaaataggcataaaggaatttgggcggtaatggaactgttctacatcttgattatggtagtggttacgtgactgtgtgtttgttaaaactcacagcacagtacactgaagagggtgcattttacccatgcaaattatcttttaatttttattgttttgagacagagtctcactttgtcactcaggctggaacgcagtggcacaatcttgactcactgctacctctgcctccggggttcaagcaattctcctgcctcagccttttgagtagctgggattacagacatgcaccaccatgcccagctaatttttgtatttttagtagagacgaggttttgccatgttggccaggctggtcttgaactcctggcctcaagtgatcctcctgcctcggcctcctaaagtgttgggattacaggcatgagccactgtgcccggcctaattatccctttatctttaaaatttaaaaatcaaacaatgcttttaagtttagtattaaagcagaatgaaggatgaataaaaataaagctttcagaacctagcaaaatccaaggggaaaattagtttataacacttcttgatagaattcatttctccatcctctgtcttaaataaaaggacttagaaatacttaatgatttcagcttagtgatggctggatctttttaactaaaacaatggtttgctttaaaaccctttgtcaattagatattattgcccacctctgatatcctgcctggctcactgcttcttctccctgtggtaggagttatttagccctctattcattgacattcctttgtttagctttctctgccagtgtctgggtcaggtctgtctggtagctctgggtttatagcctggctccaggtaacttgaggttaccttatgatccagtccaaagaggtgggacccttccttgctctttggaaccaagtacctgctttatttctcagttctaggaaccaggttcttgtttcatcattgcccgacctctgctctggtgtcttatctgttcataggatctccaaattcagctttaaactgtatttaattgtctgttatacactgaggactctaaatcctgaggatataatattaatagatgcattaataaatgctttacatatacaattgtcccttgttgtcccttgtattcataggggattggtttcaggacctcccgtggatatcaaaatctgaagatgttcaagtcccttatataaaacgggtaatatttgtatataacctgtgcatattctcctgtatactttaaatcatccgtagataacttataataatgaatacaaagtagatgctatgtaaataattgtcccactgtattgtttatggaataatgacaagaaaaattatacatgtctagtacagatgcaattttttccaaatgttttcgattcatggttggttgaatccayggatacagaacccacaaatacagagggcgactgtgtactcctttaatcctcatgatatctcaatgaagtaggtactaggttaagcatcccaaatctgaacatttgaaatctgaaatgctttaaaatctgaacatttttgagcactgacatgacactcaaaggtaatgatcattacagcattttggatttcagattttcagatttgggatgctccaatggtaagtataatgcaaacattccaaagtctgaaaatatccgaaatctgaaacacttctggttccaagcattttggataagggattctcaacctagattattatgaccattttgctgataagaaaactgagacccagaagtgaactaactttttcagactctcataacccaaaagataaaacaataaacaagaaagaaatagtcccattttcaaggagttcatagattagtgggacagactattaaatctatgtttttaggaaaagaataataatacataatacactaactaaaatgatataccaaaaatgaaatataaatgagcaataaaatatgaaaatacactcaaccaaactagtaatcaggcaaatgcaacttagaacaagataccatttttcactcatcagggtggcaaaaatcataaatttgacgatattgtgtgtttagcaggggtgagaaaacagttcatccactactctagaggtcaatttgatgctacatatttaaattaaatttatgtttaaaaatgatcctgcagtttcacttgtaggtatctgagaaaaatacttctacatgggcacaggaagcatgtaccatgatattcattgccatggtatttgtaataatgacatattgaaagccaaaatgtttctcaatagggacatgaacaaataaactgagatatagctacactaaggaatactgtgcaagaatttcaaagaatgaattatatgtacgaacaaggaaagttgtggaacattacgcataatattatttcatttgaattatttttggaaatacaaaacaatactttttgtatatatttccatgtttttaaatgcctaggaaaggtctgtagaattcacaccaaacaatagtagtttcctctggggagtgagaaggggatgcagattgggagtgatggtcaaaagggactgtagtcttatctgtgatcttttcttttcgtaaggagcttgtgtgtatatgtaatatgtataattaaaaattaattttaaaaattttatacaattaaaatattatagtaaattctgtgcatggaaatcctgcctctctagtactggagtccgtttctggactcgagccctttggactgtctctccctttactcaaagtctttgaagtgttctgtggtcaccagcctcggcccaggagctctctccagcctctgagtcctgggcatccccctctggcatcacctgctcataggcccctgtactgacatcyctccttttaaaatattttatcctttttatgatgaaaaaacaaaagttggccagacatccaagaaagccctcactgatatcttctttatataatgaggcaataggaacatcaagttgcrcaagcttgccatttaggatggtatcctgaatcttgcagatctacctctatgtaaagtgtacttgttgcttctgttagtatgagagtttgttacaattggttgcaagagctttcacactattccagactatatcctgtgactatgctacaggtggattgctaggtcagctttgattttcacgctctgctccattctcaacacaagaggtgtgtctacccggagctagttcatgcctccagagttacctaagcagtctattagcatagaaactagactctcctggtttcaattaactctcctgcttaaagcggctcagtgaatctcattgtcttcacaataaggtcccaattatttgacacaaagcgctccataatgtctcttgctacggtgtcgcttgtcaccactccttaactcccagtattggacacgctgtgcacatgcatttgtttctttgtaaataccgcaccctctgcctggaacttcccaagcctctcccttttctctgccaactcccaagatggattctctaagattcagctaagtaactcccttctggagaaggcttctcgtctcttaaccaaactgtgctctcttattctagcactgttactatgtcttagcttgtgtgccctccctactagttggtggattcccgagtacagggactgcttctttttatctttagtgtaagggtcgcaaagagaaattcccacagaggccaaacaggtaaagcaaatgagagatttgagctgcatagagggcaagaccatgtctagggtaaaggggccaccactgctcagcgctagctgactgttgctatayggcgccacagaccagggttgacaaacctcctgagtttttytgatttttgttttttgagacagagtcttgctctgtcrcccaggctggagtgcaatggcgcgatctcagctcacagcaacttctgcctcccgggttcaagcgatcctcctgcctcagcctcctgagtagctgggaatacaggcacgcgccaccatgcccagctaatttttttgtacttttcataaagatgggatttcaccatgttggccaggctggtcttgaactcctgacctcaggtgatcggcacccagccaaacctcctgagttttaaagacaagttagaagttgtgccttctgaggtgcaacctcctaaaaatcttaacagagtcctcttaaaaatgctttgtgggccaaataaaacacccctgccaggccagtaatgtgccacctctaccatgcactacgcccagagtgtggcaaagcctgaaaacatgcttgttggatgagtcttgcacagagtcaggcacagtttggggcactstgtgccggatgctccatgaagtgttaggcacctcagggtctcaggaaaatgtactttgttttattcttttgtgtgaaggtcctctgtgtgaaactgccaattcttacttggatagctttggccttactttacaccctgcccagatggttctattagcatctggccaaagggcttcagatcagggcagactcttcrcactgtgccttgaagttttctttggaaagctatgtgtacctttttttttttttttttttaattcttggagcatagtcagggtctgtattaacttgcttcctgaagaattccaccagagggtggacagcctgggaatgcattatttgacaatttggaaagcaaaggctctgctccctgcaaaagtctcctctagtgaagaatgttctctctaaagaaacaaggtcgggcgtggtggctcacgcctgtaatcctagcactttgggatgccaaggcgggtggagtgcctgagctcgggaatttgagaccagcctgggcaacacgatgaaaccccatctctactaaaattaaaaaaaaaaaaaaattagctgggcatgacggcgtgcgcctgtaatcccagttacttgggaggctgaggcaggagaattgcttgaacccggaaggcggaggttgcagtgagccgagatggcgccattgcactcaagcctaggtgacacagtgagactctgtctcaaaaaaaaaaaaaagaaaaaagaaacaagattagattatagaacttatcatccagatttggaaatgactgtgtgtcattttatgccctttckcactaatgcgacagacacctatagtgagagccggttaaagaatggtgctgtctcccacgtcacttccactgtggcatttccttaaacaggctgatggaactattcccaattgacctgtcaaactgttgctatgtttttctttttctaaagtaggaggggaactttcagcataggaaagccttagaaacacatctgctaaagtaagacagatccaggtttgaatcctgccctggacccttattagctctgcccttgggcaggttacttaactttctgacccctttgttttctcatttgcaaaatgggtcactggggggattaaagatgtataataagcatttgataaatactttttgaattaatgaaaagggctcaacatagtgtttggctcatggtatatttccaataggaaatatctattatcattatttgtaggtacctaggtattgcttatggtatgataataataataggtaacatttactgagcatttactattgccatgcactgtgctaatgcattacacactttatcccattgaatccttataacaaccttatgagataggtactattactattctgattttaattgatgatggaaaataaagcccagttcaagactgcacagctggtgtatgaaaaaacaataggcactaggataataaacagagttggaatctcagggctgcctcttagcagctatttgactcctggctacttaacctctctgtctttaatttctttatccctaaagtgggttaataatgcctgtctccaggagtcattgtgcaatcaaatgagataataatgtgaaatacttggcccaaactagggtctcattaaaatgtttgctcttatttccaccatttcttcctgaccgaaactccccagggcagaatcttgttcttgtgggcagacataccactctccacagagcagagattctcagacttccatgtacttctgagtcactgaagagtttgttaaaatgcagcttcctgggcttaagattctgagtcagtagatctgaagtagggcccaggaatccacattttaaacatgttctcccagttacttctgccaatacaggcaggcaccacacctggagaaataagactgaagtaaaatagcctgtaatcctggcactttgggaggccaaggcaggtagatcacctgaggtcaggagtttgagaccagcctggccaacatggtgaaaccctgtctctactaaaaatacaaaaattagctgggcatggtggtgtgtgcctgtaatcccagctactagggaggttgaagcacaagattcacttgaacccgggaggcggaggctgcastgagccgagattgcaccacttcactccagcctgggtgaccatggagtgaaaccctgtctcaaaataaataaataaagtaaaatatatcagtccaattttctggaatcttgctaactcattataaacatatttatagtcatgaaatctgaaaacttctcagtgttagaaactcacctttatagcttcagcttcagtgtaaagctcagaaagtgtttcaatgaatgtagtgtttccaaagatactgacatggtttctttttttgcgggggcggggtgtggacagagtttcactcttgttgcccaggctggagtgcaatggtgcgatctcagctcactgcaacctctatctcccgggttcaagcaattttcctacctcagcctcccgagtagctgggattacagatgcctgccaccatacccggctaatttttgtatttttagtagagacagggtttctccatgttggtcaggctggtcttgaactcccgacctcaggtgattcacccgcctcagcctcccaaagtgctgggattacaggcgtgagccaccgcgcccggccaacatggcttctttaaatactgtctttctcagagaggactgaatctggaattgaactccaaataaccagacgacagccgagcggcacattacatttgagtcatctcagtctcttggctcttgggtgtttgaaaagtagtattttagatgtcttgaatatctggcattggtaatggtaagtggtaaagccaaaatttttgtaaggtggcaaacatgtagattctatttcaagcaacagcattagttataggatttgaagatagcatataggacatttgatttttttgagaagaggaaattaaatggtcagccatgcattatctgcaggtgaatwtgctgttgttacagagttaatctgtttgtttgcaagtatttgttgaagcttacttaggttctttggggatagaaagtttggctgaccctaggatgtttttttaattagttaaattagttaaaactttgttttattatctgctcaattacagggaagttgtgatctggtatccttttaagtccattcctaaaaacaggatgttatgtatgcctctaataaagtgggaaataagggaaaattaaatttcttcaaaaacasagtttctcagtgaggctttactaatttagaattacttgccagaacattagcgaatcccatttagattggagggggataaacatcctaagttcagatccccgtggagccacatgctaacatggaagaatgtaaagtagagagagttctgcggaggcactgccaagagaggaagctcataggaagtcatgaccctctgattaccctctttctttctttctttttcttttctttttttttttttttttttttttttgagacagagtcttgctctgtcactcagactggagtgctgtggtgtgatctcggctcactgcaacctctgcctcccgggttcaagagattctcctgcctcagcctcctgagtagctgggattacaggtgtgtgccagcacgtctggctaatttttgtatttttagtagagacagggtttcgccatgttggctaggctggtttcaaactcctgacctcaggtgatccgcccacctcggcctcccaaagtgctgggattataagcgtgagccaccgtgcccggccaagggtaggtttcttacatgcatatattgagtagtggtgaagtctgggcttttggtgtacctgatacccaaagagtgaacatcgtacccaatagctatcttttttaaccctcaccctcatccagtgtcttctatccatgcttatgtcttcgtcattgaattgtttcacaggtttatttcaaaaacaagctgaagttggcactaattggccagagcctctttggacaagaagtctatagccacctccgcaaagagggccaccgagtagtaggggtgttcacagttccagacaaggatggaaaagctgaccctctgggtgagtgcatcttgggatgactgggtcaagaattctcaggtccttaccaatgctggacttccatctcatggtccaaggtagctgcctcagcccctactatcacagckccattccagcaagcaggaaggaaaagagtgggaatcagggaaaagctttttattaagggcataatccatattactcccacttgtatcccattggccagaacttagtcacaggccaaatctatttgcaagagtgactgagaaatatagatttgatttggggtggctatgcattcagctaaactagggaatccattgctaaaggatgaagggggacaactagcagtctctgccatatacgtggacttcagaaggattgcaagcatatgacttttagacctcctttcagaatgaatcctgggaaatgaactcttccttagtgcctggtcccagggtcaggaccccctttccatttgtcatggccatttgggctcatggcataactcagaaaaagaaaaactaccaacctcacttatagagtaactatatgaggaagtgggtacagcatgtgggtaacagcgtgtgttctggaatcaaggagtgaattctgattctgccacttactagctgtatgaccttgggcaagttacttaatcttactaagcctcagttcagcggtagctacctcacgtggctgctatgaggattaaattagattaatgtacacaaagtgctcacactatgcctggttcataataaggaagcattgacagtagttgagtattcttgttagaatattcaatgaggacagtcaaagatagctctggggcagccaaaaactgaaacggaagctcaacacctggatgtctcagcctgtctcagcagagtacttttttcttttttgagacagagtctaactctgttgcccaggctggagtgcagtggcacgacctcggctcactgcaacctccacctcccgggttcaagcaattctcctgcctcagcctcccgagtagctgggattacaggcacccaccatcatacccggctaatttttgtatttttagtagagacatggtttcaccatgttggccaggctggtcttgaactcctgctctcaggtgatccgcccaccttggcctcccaaagtgctgggattacaggcatgagccaccacgccctgcctggagtacatttttttacaatgaagacttctaagtttcctccaccccatttttctttgccatatgatctttcacaattttctctcatgatcacattttttttaaccaccgtttatccactttcctgtcatctgacatatgagttaagttttttgaacatcttatgaacactcacattttgtgaacactattgtgctggtctctcagattcttccaaacggattgatcaggggctaatcgtgatggctggggtccttcaggacttcctcaggcttcagaatttaggtttcatggtggaggcatcatctcatcctaagtcaatgaattttgttgttcagatctaggaaaaaggaaagggacacaaaaatgcagatagaaagctttagttaagacttctggaaattgcctaaaattaacatatatgctattatatattaaatatatatactattatattatacaagtaatatataataatatattataaaatgtatatatcatataggatattaatagatatcataatttctataatttattaatatatacaattatatattaataatagtatgtatatatattttatacacttaaacacatttttttagagaaagggtctcacttcgttgcccaggctggagcgtagtggcacgataatagcttactgcaacctggaacacctgggctcaagtgatcctcctaagtagctaggattataggtatgtgccaccacatccagctaatttaaaaataatttttgtttttttggtagagatggaggtctcattatgttgtccacgctggtctcaaactcctgagtttaagcagtcctcctgccttggtctctcaaagtgctgggattacaggtgtgagccactgtgcctgaccgattttttaaatatatactactcgggaggctgaggctggagaatggcatgaacccgggaggcggggcttgcagtgagctgagatagcaccactgcagtccggcctgggcgaaagagcgagactccgtctcaaaaaaaaaaaaaaaaaaaaaaaaaaaaawatawawatatatatatatatatatatatmctacttatatataaaactgtgtacttaaatatatatataaatacttaagatataaggcacacagtaaaaatgacatttcattatgaaaaaaataggcgtgtgctgtttgcactttggtgggccattccattttcayatggcattaggatggagccatttgtttgggaggggacagcgctcttctcaggaaggagaccctggtctgcttagtgaggccaarccccttagcaggagctgagcatgtattctccttggcctctcacctttgttaatttatttgtttggtgaatttgggagaaggaagtagaaaagctcagctcagcacttacgctcttcatcttttgggatctgcctgtttggcagggagaatgtgttctggtctacgatgtgttcagtatagggagggaagagtttcatggctttctagctgtgccagaggtgagtatgttaaattggtgggtgaagtattggcacatgcctccaaatctaaagctatgttcttaaaatgttgtatcagtaataaaggtaccatttttgatctaaaaaagaaaaagctttcattaaaatcttaaaatatcatctagccaaaaacttttcagttctaatttattatgccttaagtatatagatatgtatcaccttagtgtgatccaattacaacaggtgaaattctagtcacaatctaaattgttcttcaccatgttttatttgtaaatatttcatgaaactgkaaaattacaacatatgaattcatagtgatgtaaaattatggctaacttctaaaaaaaaaatcttcttttttatgctcagctttggctgcagagaaagatgggacccctgtgttcaagcttcctaaatggagggtcaagggcaagaccatcaaagaagtggcagaagcctacagatccgtgggtgcagagctaaatgtgctccctttctgcactcagttcattcccatggatataattgatagtccaaagcacggctctatcatttatcacccatccatcctgcccaggcacagaggagcctctgctatcaattggtgagattttttctttttactttttttttttgagatggggtcttgctatgttgcccagtctgggttcaaactcctgggctcaaatgatccttctgcctcagcctcccaagtagctgagatttcaggattgtgccagaacacccagtgagacttttttaattacacagagggtgagtgtatttcaattgcctatattctttctgttttttacctaggtgatcaagacaagaaactaggcatgcttgaacagttgtgaggtcctgattggttactactgttgcatgaactcccctgagatctagacatacagcrtgaaccaggacagcatttaccaagaatagcctatggagtactagctccattgactgttactaggtattgagcaaacaaaggttttatggtcagtaagtttggtttatgccggatttttaattgcaggattcatttgagctattaatacgggctttaatgtcagtatcataatcccctagagggagtctgaatacacaatgttcccaaacttatttgaccacagaactttttttttgcatagagcatctcaagtacatttcaggaaatgctgaattacttgaaataatcatcaagtaattacttgaaatgatgaaatgatcatcttcactgtccatcttccccattcaactctaagcttcttaaggaaagggactttgcacaacattygtattgctattttccagtgtcagaaacagtggctggtacattgtaggtacctaataccatagggayacaatactgtgggttgaggtgggccttcctaccctttctgccttctctcctttacctgcacattttcctaatattcctcagtgtcaagtcattggaataagctggaagcctacacttggtttaaatgtgatgaaaaatattaattgtatttaaactttgatgacatggattgatttctttttggctcttataaataacacactattatttagtagacatatttgcacttagacttgtactttttctcaatttacactgtttccacatgcagaatcattggatcaaagcacatgaatattttcaaggatcttgatagcaatgccagtcaatttcttagtatttctgaagagttagtgattgatggattgatttaggtcttgatttgtagctcaaaagtaaaaaatatttacattattacatggctgacctaccatcatactccctctgtattagcttgaattaataatcagctctgtccttcacattagtttcacattctgtccttcacagagtatcctattttatcttctgttcttattccgcctaatacagggtcaaatacgatgtaggaattggacccaggtgggcaaattacttgatcttgmagtagaaaactgatccctgggagtcaatgagtggtagtaacgatagactctaatgcctttttaaattcactgcaagtcattactgtacattaacaagaaagacaagatatgaggatgtattatataaaatagcagtaccattaggcactgctttttatgagccctgacgtctcccagttctactgttaatttctcatggtagcttcattcattgtctacttttccattataactatcttatactttaatatcactaattcatcactttatgatacagttaaccaacattttaaattgaaattcttcttttcacaggactctaattatgggagataagaaagctgggttttctgttttctgggctgatgatggcttggatacaggacccatccttcttcagagatcatgtgatgttgaacccaatgatacagtggatgcactttataatcggtttctttttcctgaaggaatcaaggccatggttagtatattttgccacccagaatttagtaaacctttaaagttttgaaaatattttttcttttatgaagaaattatccatatgaattttcaccaaaaatataaagtttaaaaacaaaattagattttttttaactaatgggatggtatatttaggatggaaatctgaatttttcaatttcttagtctatgaaactgacttatttttctgagagcagtgatccaatggatgcagtagcatttaaactgctccattcttttgccaaatgcttgaatcttcaaccctgcctataatgattaattgtaaagaagtagattgaatcttaagaaattttgctacgtaatttgttatggaaatttaaaagtactttaaattagcctctgtaacagggtgaaatttggtgttgctgtatttatccagaggtattctggggtaaaaaaaaaaaaatcccaaaacatgtataccatcaaataaaaatattgcaatattagcctacacaaatagtgaaagctccagctgataattttgatgtcatttaattttttttcagagctagtatgaaagaagtagcaagattatatacagtagtagccattgatttaggagagaggaaagcagtgctttgcttgtatcattcaatgattaagagagtagggcttcgatgtcagaaagacctaagctcaagtttccattctacctcttctttgttgcatgaccacaggcaagtcgcttagcctctgtagctttggtttcttcatctatacagcatggataataccacctgacttgtagggtggttgtggaaattaagtgacactatttgtgcaaagcatctggcccatggtaggtgctcataaaatgatcattacaatcaacrtagcattttgtgtgttcagtgatatttgctgaagcccagattctagacctagttatagcctagatggaggtgggtggaatgagctgtaaacttggctctgttcccctgtggctccctccgtgtgctcttgggtgggttggtcagcagctgtgagtccttagagagaaatctgagaacttgaactcacgtgggcctcrcagtgaaaatgggaggctctcgactcaaggcaaacgtaaatataacagagaagaaaatgcaggacacctcccaaaggcaatcaagctcatggatagattttaactttttttattccaggtctcctaaactagaaagcaagttgaattcattaaatacagtaaggtatcattttttagaatcatcatgatgagtaaaataactcataaagacttattttatcattatattcctatcatttccagtgaatcactaagggaggtggcagtttgtttaaacaagggagtcatttttgagagtgcagacttcgattggcaatagatagacctggatacaaatcctgtttctgacacctacaagctctctctgtgatcttcagccaattgcttagctctttttctttttcttttcttttttttttttttttttttgagacagagtctcgctctgtcgcccaggctggagtgcagtggtgtgatctcggctcactgcaagctctgcctcccgggttcacgccattctcctgcctcagcctcctgagtagctgggactacaggcgcccaccaccacgcccggctgattttttgtatttttagtagagacggggtttcaccgtggcctcgatctcctgacttcgtgatccgcctgccttggcctcccaaagtgctgggattacaggcgtgagccactgcgcccggccttgcttagctctttttctgtcagtttcctcaggtgtaaaacaggaataacaatatacaccttgcaggatttgtgttatgttttcaagggatattttacataaagtagctaccacactgcttgtcaggatggacctgaagaaatggtagttatcatcatactcttgactctctgaacaggtttataggtagtaattctgttatgcagaaactttagtcaaatagaccatgccattgttgatcattgggctgtaacacaggtgatgtctttggccttaggtagaagctgtccaactcatagctgatggaaaagctcctcgtataccccagccagaagaaggggcaacatatgaaggtatccagaaaaaggaaaatgctgaggtatttatatatcaactcaataacacgtctcagagttcatggccctctacccttcagtagttccccacatactatgatcttgccaaaaggtaagccagcttgccctagccctacctgttagagtagacaggtagccagacatacgcaggagaggggagtcccctaaagaaaataaagtctrggaagactcgtgtctggaagaccactcaaaatttgcatattaatagtatctctaatgctggagtgggtgggcacttagtcaaatgtgcatagaaaggagaggagatactatgcaaacaaacaaacaaacaagcaaataaaaaatgcccagaaacgcctmttcagtctgcccaacaatccttcgctctgcagttaaaatgtcaaaatatcactagctacatgctaatgaaaagggcaaaggggatattccttaaaaaatctggcatgctaggtgcgctgggcacagtggctcatgcctgtaatcccagcactttgggaggctgagggaggaggatcacttgagaccaggcattcgagaccagcctggccaacacagtgagacccctgtctcaaaaaacaaaaaacaaaaacctggagccataagttcagcttagggcagagaaggaaattccaaaaaaacacacagatgcagtaggtatagatttggccactatacaacctccctgcagtgacaatagtaaacaacacaggcatcaggtaatattcatatccaacaccaatccacacatacacaccaactaataatatggagggtcccataaacctgagacaaaatctaggtgcrgacaaagcagagagctaagacagacacaaacaaactagacaaaaaaaaaaagaggcagagacttaacagaggtgggaacttcaaaaaaaagttcaacctaataaaaacccaacataaaactctccaacagctactggcctactcccctcaacagcccgctctacttcatctttacaaagcatactgtccctttaaataaccctctgctttttattttcctttaataaagtctcttgtttactaaatcagccacctgacaaaatacttactccaaataaaactaagaagcaaaaattcctttatttcccaataacaagtgtttctgcctctgatgacgagaagcgtttttattgcctttgaggttcacagccataggaggctcagcctgtattttgtgccttcctagatttcttgggaccagtctgccgaagttttacataactggattcgaggtcatgataaagtccctggagcttggacagagataaatggacaggtatgttttagggaccactccccccacccccctccccgattattacctttgtaagagatattacagataaatctgggcttcccatggttcttccttggtcatgaggcaggtctgtgattcactctcccctttactcarcatgtattaagcatttattgtgcagcagacactaaatccagcgcctgatctaaggagcctgcagttttatggggagtgcagagaagtgaataaacattctcagtgcagtaagataaacgctatcatggaggctgagactcaggcatgttaggaaaggcttcctagaaaagctcactgctttgctcgagaagagttaaccaggttgagagcaagacaagtaggtgaagccccagagataagagactccagcacctggtcaaggacttgcaaaaggagttcagtgaagccagggtctgaactgtgaggacaggcatggggagagctgaggygggagaggcgggcagggcctgaagggtcttctatccatgggtaattgactcagcccaggctctcaggtttcacctcttcggggaggtttcctgatctcacatgcccagactggcagggtctgatggcccatctctgggttccagcaacactctgcctacctctggcatcgcacatcatatattgtgagggtctctttattccccccaacactagactgtgaactccttaggggcaagggcttcatgtgattgtcttgataatctcagcagttaagcaggagtctgggtacatactaagtgccaataaaaatccatgggctcgatgggtgaccaagggagggagtttagtgtaatggttaagagtgcaggatctgaagccagaatgcttctatgaaaatttactgtgtaacctcgggcaggtttcttaaccactgggtgccttggtttcctcaatgtaaaatgggactaataatactgcctcccttaggttatgggtaattgtgaagattaaatgagttggccagccatggtggctcacacctgtaatcccagcactttgggaggccgaggtgggaggattacccaggtcaggagttcgagatcagcctggccaacatggcaaaaccctgtctctactaaaaatacaaaaaaaaaaaaaaaaaaaaaaaaaaaaaaaaaaaaaaaagctcggtgtggtggcatgtgcctgtaatcccagctacttgggaggctaaggcaggagaatcatttgaacccgggaggcagaggttgcagcgagattgcaccagcctgggtgacagagcaagactctgtctcaaaaaaaaaaaaaaaagaattaatacatgttaactcatttaagtacttagccctgggcctagagtaagtattcaacaaaccattatagcataatcataatagtgctccataaatgatagctgatcatcctagaagtgcaataataatgcagtcagcgtcagtgtctcttggttactctctggatccaatcctttttccatgaactgactcacaaagcaccctgtgcttctcatcacttaccaccctgcactgtaatagtctggtgaccactgtgcattgcccatcattgacgcccacccccaacacctccccacccacccaaaccctaccttcaggctataaaggctgagagctttttatctcattcacctttgtatcaatgcraatatgtgataaatgcatactcatgtcacctggatgtggggcattttggactctccagtgacatattcacagactatttcttgccttgtgtcatttctttctttctttctttttttttttctttgagacagagtctggctctgtcgcccaggctggagtgcaatggcacaatctcggctcactgcaagctccgcctcccgggttcacgccattctcctgcctcagcctcccgagtagctgggactacaggtgcccgccactatgcccagctaattttttgtatttttagtagagacggggtttcaccgtgttagccaagatggtctcgatctcctgacctcgtgatctgcctgcctctgcctcccaaagtgctgggattacaggcgtgagccactgtgcccggccaccttgtgtcatttctatggatgtttgagacagtttctcccattgtggtgtctcaattttattacagatgataatatgaacttcagcgtttttgcagagaatgatgcttatacataccgctatgaacagcttttctcctgattttacaatctgtgtttgatctctttactagatggtcactttctatggctcgacattactgaatagctctgtgcctcctggagaaccactggaaattaaaggtgccaagaagcctggtctcgttaccaaaaatggacttgttctttttggtaacgatggaaaagcagtgagtgttaaatatggctgcctatgaaataaccttttgattttcttctataacccaagctattaagggaatagctttcactccattgctggctggggaggagctggctctgagtgccctgatggagatgaggtgtctcaagatgggccccacagatctgcataggctgccttgtgtaaagtggaaagaggctggaattcagtggggagataaggatgtgaatccctgcttcccactcgctgrtcttgggcaggatgattcttccctttgagtctgttttgccatctttataacagagaggagaatcttgtctgtctgccttcccaatgccagattctgggaggatcaagtgaaatagatgtggccctcctcagatgccccttgccactgatccaccagacaggcaccacctaaactgcctatgctcaggagggttggccctgggcctcagtgtgcccttgcgaagcttcccaatgaagcgtgcaaagggaatttgtagcttacagatattttccagttgctgcaggataaatcgttaagactgtaggccgctagttccaggttctactcccagctcttttacttactgtctgtgtggcactgagcaaattactgaacctcattgagcctccctttctgcatcagtaaaatgggaataataatggcatccgcctccactggcttttatgaaattaggtaagatccttcagcacatgcatgcattcttttttttagtatatgtgctgctgaagcaagcacttatgcatgcattcttgagcatggtrcagggcaagtgctcagaggcagcagctgcagagttgcagcagcactggtggtgtctgttattttcataatagattctaattcaaatacctacgtccaagtgtcaaattttccaggacttattttccattttgagatgtacctatccctggacctcactttttcctttctgctgccattattcaagtgccatttcagcccttttacacataatggtgaatgcttttaatcygtatttttccaaataaacttgcccttatatgcatataatctataggactcctcccaccagcctcacttttgtattgtctcaatcctcaatttttatgcttgttttgttgctattttgtagctgacggtgagaaatctgcagtttgaagatggaaaaatgatccctgcctctcagtacttttcaacgggtgagacgtcagtggtagaactgacagctgaagaggtgaaagtggcagagaccatcaaggtgaacacatgatgacttaaatcttactgttaccttggaaaactgaagcatgttcgtaactggtaccatcagtcctcaaagtagtgggatcagaactttatttcctctttttttgtattagctgcaagaggaaatcaacctccaaattcatatgcttaaacacagtatatacaaactgatttttcacrtaagtcatccaaggcagttccaggttggcacgggggttaggggtgaagtcattcaggaacccagtttctgttattttcaaggtctccctggggggcgtctctattccagacagccagaagggcaaaggagcatgtagaatggcgtggaggaggtttacatgggctaggactggggtggtgcaggtcacttccactcctgttcattggttgcatctaacttggagaggcgctgagaaatgtgatccagctgtatgtacagctgagtgtacaagatgaagagggaattggtttggtgaagagctagcccagtctctgccacattgttctacgtggcacttccctcataagagtttyctttttgtgtaggtcatctgggctggaattttaagcaatgtccccattattgaagactcaacagacttctttaaatctggagcaagctcaatggatgttgccaggtaaaaccacgcccttattgactcactagggattccctcactagagattttgactttggctttgacagtgaaatccacacacatcctttgttctggatgtgattaccttatcatacctatctatgactcatctttttttttttttttttttttcctgagatggagtttcactcttgttgcccaggctggagtgcaatggtgcgatctcggctcaccgcaacctccgcctcccaggttcaagtgattctcctgcctcggcctcccgagtagctgggattacaggcatgcgccaccacgcccagctaattttgtatttttagtagagatggggtttctccatgttggttaggctggtctcgaactcctggcctcagctgatccgcttgcctcggcctcccaaagtgctgggattataggtgtgagccaccacgctcggccaacacatctttattcttcatctttttttgctattgtttccatggtcaagcagatatatccgtttatttctctttgttgctaaccagaagttgttttcatatcttccgtatacctaaaaaagcaacccttagaattgtttgcatcttttaaaaatttgtccttccagtttcttagctaattttcctccaatatgacatcagaattgagaagctctgggtgagaatgctaacagtgaatttcctaygcagcctgatccagaatattatctgaataatatctgacacctgatattaataatattaccagaataatatctgatacctgatattaattatgctttcccccaaatcttttttctcctaccctcgccccccccataaattacctagtaagacagatctagaatgagggttatcaggctacttgcaaggacaagtgtaatcacccaatatcagaatttctccacagaggtttagagcaagttgaaagggctggagtcccagaaagcctctatcgcaaggaaactggaccaggatcctactggtgcagcatctttcagaggtgtttttcttcgagtaactgggataacaagacagctggagctcaccagggactgtgcagtcccttgatggtgggtacagagaatagaagctaagaggatttgatcctaggccacattgtggccatacactaattaaacaaggcaaaaatgttcctcctcttgataaaatccttcatattgacaaagcaacgttcctgatgaatattctatctactcactcatttacttaacaacactgactgaacacttactacatgtcaggaacagttttagcactggggatacagtgtaaactagacaacgtcccctttattcatggaggttttattccagaaatcaaaaacaatcatttcaagagcacatagtgttttcaaaagtcaagagtttcggctcctcaaattatagatttctcagctgtgattcatgagttcccagaaacttctaattggcttaactaaatatttcaatactacattatgatgattattaktacagatagggcctcactctgtcgcctaggctggagtgcagtggtgtgatcacagctcacttgcactagcagccttgcactcctgggatagccatcctttcatctcatcctccctactagttgggattacaggcatgagtcatcacacctggtacatcacacacagtactgtattattattattattattattattattattattattattattttgagacagagtctcgctctgtcgccaggctggagtgcagtggcgcaatcttggctcactgcaacctccgtctcccaggttcaagcgattctcctgcctcagcttcccaagtagctgggattataagcaaatgccaccacgcccagctaatttttgtatttttaggagagacggggtttcaccatgttggccagggtggtctcgatctcctgacctygtgatccacccgcctcggcctcccaaagtgttgggattacaggtgtgagccaccgcacccrgccagtactgtattattaatacttttttttttgctagcaagatactcctgcaggaattactcattttctgtttgagtgtctggcttaccataatcatctgatattattatcttgattacaaaggtatcatctcttttagagaataaatgattgaaccacaaccatggtggactttctacactgtacctcgtacaccactgctattcaagaaatgtcagataacagctgtaatttgacaaactaacagtggaaatcaaaggattggaaaggacttcaaaagttatactgacctactgcatatggttctagctagtacctatgttaactacgtaatacaaacaaatgtccatcttatacttgtaatttagagaaaatagtctacaatatgacattcatctctcataatctttacagttaggaaagtgtctttgtttcttattccctgagtatatatgaaaggaaaggagttgactttatatgatccttgctaccttgcttataagtaattaaaatatttttgccttgattgcttttatttttagtcatggataaagttttaaaaaactgccactgtccttcaagatatatttttaatttcttgcccctagtcttatcaatttctctgatgagtatcacagaagatctcataggatataaataggcatgtgatgtaagtcttacctcaaaacaacttgacaagtgcaaataacacaatcttcctaaccccttttaaaaatctaagtaacgcgaagctggtttttactttaaggctggttgaagagatcagacagaaatgtggtgggcttcagttgcagaatgaagatgtctatatggccaccaagtttgaaggctttatcyaaaaggtcgtgaggaaactgagaggagaagatcaagaggtggagctggttgtagattatgtaagcttttccttgatgttgcaaccctaaatcagtgagatccatacactataaaagactgctgtgcctgttgcccatttgtttttatatttatgacctttaaaaaacaacagctttactgagatctaattcagatggcataaaattcccctttaaaatgtgcattttgggtagtttttaatatattcacagggttgtgcaattattatgccatccaattttggaacattttcatcatcccaaaaagaagccctgtacccattggcagtcattctttactcttccaggactacctcatacaaaaaatgttccaaaattggatagcatgatagttcctagaaaatgctaacctcttttctgtctatggatttgcctattttagagatttcatataaatagaatcatacaacatgtggctttttgtttctggcttctttctcttagcataatgtgtccaacgttcatccatgttgtatcatcatttcatccctttttttggccaagtaatattctattgtataagtataccacagtttgtttacccattcatcagttgatgtacatttgggttgtttctaccttttggctattatgaataatgctatgaaaattcatatataagtttttgcatgaacatatgttttcaagtctcttgggtatgtacctaagagtggaattgatgagtcatatggtaactctatgtttaacttttttgagtaactgccaaactgttttccgaagtggytacaccattatgtaatcccaccaatgtatgagggtttcaacttctccatatcctcgccaatatttgctctcatctgtcttttctcttttagttgtcctagtgggtgtaaagtgggatctcattgtggttttcatttgtattccctaatgactactgatgttgagcatcttctcatatacttattgggcatttgtatttcttctttggagaaatgtctgttctttcaaatccttagctcattttaaaactggcttgtctttttattgctgagtcttaagcgtccttcgtatattttcgatactagatccttatcagatgtaagatttgcaaatrttttctctcattctgtagatttgctgaaaactttgagtgtcctttgacacacaacaggttttaattttgatgaagtctaatttatctatgttcttttrccacttgtgctttcttgtgtcttgtctgacacctttttattcctcaatttctccctcactgctttcttttatgttaaatatrtctagtatgcctttttaatcccttatttttaatttaactgtatttttaagctattttcttagtggttgccttgaggattataattaacatttttgcttaaaatgatctagttcagatgaacaccaacttaatagtataggaaagctttgctgtaacatagttgttgcatactcccctaatttgtgccattattgtcatatgaattatgtctttatacatcatgagcccaccaacagttttataattattgctttatgaagttgtatttttaatgagatagagttaaaaaatatatttataccaatgtttatatttacctgtgtagttacctttaccagtactctttatttcttcatgtgttttcaagttaattgtctggtgttctttcatttcaacttgaaggattcttctcagtactttttgtaggccaggtatgctagcaatcaattttctgtttttgttcacttgggaatgttttaatttctccttcatttctgaaggatatttttgttgggtatagaatttttggacggtatttttcttttatcattttaagtatttcatcgtattgccttctggcctycayggtttctgataagtcaactggtaattttattaaggactcttttgtatgatgagttccttctctcttgctgcttttgagatttyctctttgtcttttgataatttgttatgatgtgtctaggtgtggagcctttgaattttyccattagaatttgttgagcttcttggattgtgcattcttgaaatgtgcaaattaatgtttttcatcaaatttaggaaattttcagctattctttcttcaaatatttttcctttcccttctcattctcctctccttctgggattccttttatgcatatgttggtatagttgatggtatcccataagtctctgaggctctgttcatttttctttattcttattccttcctgttgttcaggcttttttcaccttcttgaatttgctattgggtccctccagtgattttttwatttcagttattgcacttttcaacttaagcatttttatttggttctttttaaaataatttttatctcttcattgatattctctgtttggcaagacattattctctttcctttaattctttagacatggtttcctttagttcattgaacatatttacaaaagcttattgaaaatctttctttagcaaatccaatgtctaggcttctctagggatggtttctattagctgcttttttttcacctgtttataggccatactttcctgtttctctgcacgtcttgtaatcttttgttgaaaggtggtcatttaaaataatagaatgtggtaactccagaaagcagaccttctccccatctcccttcacaacatttgttgctgttgctgctgctgctttttgttgttgttgttcaatgacttccttgacaattctgtaaagtctttattttttattgtttgccactactgaagtctctgttcagttactttaatggtcatctaatgattgggcatagattttcttagacaccttgagccaataagtctcccagcatttgtgagggggctctgtgtgtgtgctgggatataccttcagtgctccagcaggcagtttacaattctgccttaccttcacacttcctgcctgcacagagcctcaaagtcatccagagttaagagataagggccttctgaggtcttttctgggcacatgcacaagccctgcttgtatattggtcttctggattcccaggaatatgtcagagcttttcaatgcctcttatggatatctcattcccagttattcctcttgktttttggtcagccattttttagtggctgtgggcagctgcaatattaaataattgccactgattatttttgacaaatgtcccaggaatagggctgtttgtgcataacaagctctgagtcagatctagtaaagacaagcccaagccaggcatggtagcatgtgcctgtagtcccagctactcaggaggctgaggcaggaggatcactttgagtccaggagtttgaggctgtgatgcacttgatcagacctgtgaatagccactacactccagcctggataacatagtgagaccctgcctctaaaaccagaaaatctctgagagtagagctttccagggagctgccaggcaggccaaatagtaacagttctttgggatgaggcttgtgaagagctccagacccatttcatccccaccagaggctactaggctgctggttttcacagctaccatacttgcaatgawgttggcttttcaaggctaytgcagagcttttgagaaagatgggaataaggcagttaatacaccataaagctcacttttcttactgtgattcagctattcttcttgaaatggattattgcaagcctttggctaatttccagagttctgagagaagtgattttttaacaatattttctagtgttctcattgcttttatgaaggagtggattttcagaggtccttactttcctgtcccagaagtacttctcacccatttgtttttaataagaattaggcaaatctgaaaagcagtttagcattatctggttaagaacatgaattttggagtcagaccaacctaagtttgaatccaagtagcatggcttactagctgtgtgaccttgggcgagttacttaacttccctaagccacagtttgctcctattattaccctccattattattacctccattattattatttcctccattatttttaccctatttatagagtatataatttgattctcctaacaactctctgtggtggatgttattatgtaatattattattaccctatagattgggtaattattacctgcaaaacattctagtatgcacataatatgaaatacgtcttctgttacttgactcatatcacccaatttatagggtaataatattatataataataatatataataatgatatctacctcagagaattgttaggaaaatcaaattaggtgttatacattcagcatattccaagaatgataatttcagaaaagtggactgtttgcagacactgaacacatcaattcccatgaaatttccttcattataacccacataaacacaatggaaatagctcatagatcatgagcactcagtgtgggaaaaggcaagagaccttcttgctattttttgtttctttttaaagcactgacaattcctctctgtgaaataattttttaaataattacatttcctttttaataccttgcattgatatattacctcagtttttcctcacagtaactgcatgaaggcagtatcattatccccattgcattgttgaaaaaaactgakcctcatcaaagttcattgactaacctcaatttgcttgccagccactggcagagagtacaatttacgcaacacatgtgtaacagacaaaaagtgaaaacagagaggaacttaaggaaagcaaacttaaaatggcaccagtgtaaaaggaaacctattgacaaaggcattttcaatgatttcaatgaaggcaacagctgcgctccacyaatgctgccactagatggtggtgtttccattatctagaggtcttgtgagttaccttttatctgttaagaaagaaaatctgaaatctgtataaagcctggcctagagcacttctgtcttcacagcttctaccctcctgccccagtggccaaggcaagcatcttgaggcccaaatctcacatatgcatgtcttctgtacagtcggaactagaatgtcattgacttctccctctgcattcgtgaatatgcttctttattgctgtttgacatcaaattggtaaacacggaaatccattgaatctattaatatamttctctcagatttcaaaggaggtcaatgaaatcatggtaaaaatgccataccagtgtttcataaatggacagttcacagatgcagacgatggaaagacttacgacactatcaacccaacagatggatctgtgagtaattctttagtgtgagtrgtgatcactggtcrtggatttttagttaatacaccattgtaaaagaggcagtcttaagaagcccttttattctctcactctgcctctaagtacttcacacaaatgtacttcatgcttttctttcaatgactcaattctggtaccagctgctattaactgtagtaacctattttatagaacatttatgataaatttagacaggtagctttacctatacacaccagaggcactcatctgcatagagatatatgtgaaaaaactttccagactttgaagactcatggcaagaaattcagctttcctaaagcactggaagaactacagtcttccaatcttcctaaatgtgttcttccataaagtagtatgatatgagaagtactaaatttctggttcacaattttcatattaaaattgttctttttctttactgtagtactagatatactcatttcttatcataactttttttaaaatcagtaatactctattttttctattaatacaatattaattccaagaaccatattttcatatctctcatggggcctatttttacttaccttgaaatagacaatatgcaaagtatcctacgcttctttggcggatgttgataaagcagtagcagcagcaaaagatgcttttgaaaacggtgaatggggaagaatgaatgcaagagaaagaggaagattgatgtataggtatttctattttttatttttttattttttagaaaagtaactctggtagagacaggggttcactacgttggccaggctggtctcaaattcctgacctcaggtgattcacctgcctcagcctcccaaagtgctgggattacaggcgtgagtggtggcacgtgcctgtagtcccagcaactcaggaagctgaggcagaagaattgcttgaacctaggaggtggagggtgtagtgagccgagagtgcaccactgcactccagcctgtgctagaaagcaagactctgtctcaaaaaaaaaaaggaaaaaaaaraagcaaaacaaagtgagtctactacctttggatattggctaacattgccaagattttaaaaattcctgcaaaacattctagtattcacctaatatgaaatatgtcttctgttacttgactcatattaaatcctatatatgttgattatgttagtattgcttgcatcaggcaggtcccagctggaaaagaagtttaataaagaactgttcacaaagacgtggccraggtcaaagaaatccaataaagratactgaaacatccaggcagggctagcagcagggggaagctgctatgtyaaggtctgaagggacaggggaaggagctgttactggaatctggcaagatctgtagctatacgagaaaaccacactgcagtggagggacatggcagcttctgaaccacagcctatcagcgagggagccagggaatccaactccccagccactttttccttcagttcaccaatattctgcgggtgcctcccagtggtctctcactggccaagcccaatgggagagcaagggagccaggtgatgtaatctataaaggtcattcaccagggtcaaggtcacagagcagggtggagaatggatacagagagcggcaagtggagaatatccagtaccctgttgttttaaaaaaacattttatatccacttgatgtgtaaggaataggaacaaggaagaaaaataataaggactgggaagaatattataaatcagtaatgaaggatgccaggagtgattagattcaatcataarttccatttgctgtttacctaaaatccaatatcggacctagatcaatagatctcctagagcaatgatatgatttggctgtgtccccacccaaatctcatcttgaattgtagctcccataattcccatgtgtcatgggagggacccagtgggaggtcactgaatcatgggggcaagtctttcctgtgctgttctcatgaaagtatataagtctcatgagatttgatggttttataaagggcagttcccctgcacatgctcttgcctctttcctttataaattacccagtctcaggtatgtctttattagcagcatgagaatgaactaatacaagcaagatctggaacaaagattgtcggagggggatttcaagctggactctagagtggccccaaaggaacagctcagagaaccactacaaatacagaagaaaaataaatagagaagttgaacacaaaagatgagtcttaccgtatcayagtcattatacagtcctgcacttaccttcccataaaacttgtgaacaccaaacagaaatctgttgcagtgtttgtaattcattgtgtacgttgctatcttgtctcttcagttagttttggaaatatttttgtgccaactggaaatcctcaaatgttcatgggttctcagaagtgtgggttctgggaatgtggttccaatgactggtactggctcagtcattgttctacttcttacacatagatgaggcaagttatatatgcttycaataccctctgcttctcctttgtaattcttgaaacaaatgatttatgaaaatatttgtttaatgtctttcttgcctactggaccatgrtctctataagggcagagatctgatcyatatgtgtttacctctgaattctccrtccttaggatactgcattatatgtgacaggagctcaatcaatacttgttgaatttatttctttcactgaccacacagacttgcagacctactggaagagaaccaagaagagctggcaactattgaagcccttgattcaggggctgtctataccttggccctgaagacacacattggaatgtctgtgcaaacattcagatattttgctggctggtgcgacaaaattcaggtaagcacaaatattatttgttctgaaagaaaaagggactaacattgattagtttgtaccaggcactgtgtcagatcctctttttatgtagatttttttacaccaacataacagggttgtctcaatccattttatgctgctgtaacagaatacctgagactaggtaatttataaagaacagaaatttattctcttacagttctggaggccgggaagtctaagataaaggtgtcagcaggtttggcctctagttttaagatggtgccttgtagtgcatcctctggagcagaggaacggtgtgtcctcacctggcagaagagtagaagagagtgaatccactcctgcaagccctttttatagcggcattgatccattcattaaggtggagccctcacgacctaaacacctcctattaggccctaccccccaacaccgtggcattaggggttaagtttccagcacatgcattttaggagacactttcagaccctcgcaatggttataacaactacgggaagtaaatggatagctcttatccccttattacatgtgagcaaacaaaggcttgaggacatggatgcctttcctataatttgtagcaagtaacccatacgaccagatttgaagtcaagattttccgaatctaaagtctaatgatcttctttgcattttactataatatctcctgagggtgttgaatagttttctagacactttggagaagcctagtatcatgtagggtttacaaattcaaatacctacagaggccagagagctaccgtagatggtggaagcagactgagtataagaaaaactttgtctttgaatatgtgtcctaggagaaataaattaaaaaaaaaaatttttttttctttcttttgagatggagtcttgctctgtcgcccaggctggagtgcagtggcgccatctcagctcactacaacctcgcctcctgggttcaagcaattctcctgcctcagcctccctagtagctgggattacaggtgtgcaccaccacgcctggctaatttttgtatttttagcagagacggggtttcaccawgttggccaggctggtctcgaactcctgacctcaagtaattcacctgccttggcctcccaaagtgctgggattacaggcatgagccactgcgcctggccamaaaaaaatttttttaaagaaaaactttgataaagatacaggaataataaataaatatttcattttactgtatgataataaatagcaaacacagggtgatcaacggcaacaacactagctccagcactggggatacaaaagggagatgtagggcttgtagcaaactgcagtatgcatgttcctcatagactcataataaccactgcagtaccagtcattgcaaccacattcccagcagcaaaaagaaggaagtgagaaagggggagtggtaagaggaatttaacaaagcattcttaccttcccagtaccttttgctcatatccctccttggccatctctrtctgctaaggagactgggaaacatcatatttcatctgcatacattgctgccaccaatgttaatgtacagtcagacagacctgagtcaagtctcagctctggcccttatcagccgatgttgttaaagttattttctctctcagaaccttactttcctcctctataaaatggtcacagtaatacatactttgcaagttatgttttgaggattggaaacgagtatttgtacactacaggattagacaagtctgcaacatagcaggtttgcacaaaaatgaaatttttattgtggttcagccacaaagtcatgcatatattgatatttactaatggtagttcaggtccatctgttatccccaattatgaaacccaaatagttctgaaacctgaaaattgtttgattggttcaaactcgtttgatgccaaaccctgacctaaatgaacataatctattaataatatttatttacatcacttagagtgaatattcaaatgtttcagtgaataaatactagcatgtttgattatgggaggcttacccaaatcctgctggggtagtagataatataaggtatatgcactatattacacttctaaagtccaaaamattctgaattccaaaacataactggctacaagtgttttaagaaattgtacaccctattagtagtagcaataatattttrtgtggcaaagcaaatgaatagctttcattaaaggctactattgtgattccgttaggattaagttggctgcatataacagccaacttattcctgtttttttaatcctattatttttctctcactttcaaggagtccagagacaggcagttaggactagtatgtgagatgcaaactctttttctgtctttgccaggccatgtgacctccaccctgaaggttgactcatggtctcaagaaaaccactgcagtgccagccatttcagcaacagtctaaacaggaagaaggaggaagcagacatggagggaagaataaaagagtagagttagcctagtttaagtagcattccccttccaatgccttgtgcttgtatcttccactgaccatccctaatctggagaatgggaaccatagtatttgatctgggcatattcctgtccccattattaatatagggattctgttactaaggacagaggggagagtggataataggcaggcagttcacattctctgccaggccaagcaattaggaatggactaaattagaattatgtttattcttctgtgtttcatggttctcttgagaaacaaatagctgttccttctttggcatgaatatagttcttatcaacaaacrctcttttcatatcagctaacaaaaagtaagagaggaagacagaaaatggatcctttgagatgaaatttacttatttaaattagtaaaataagtatcaacttttctcattctttagggttctactattccaatcaaccaggcccgtccaaatcgcaatctgaccttcaccaagaaagagccactcgggtaagataaggagagtgcctctgagtgaatcatgagttgtgttatttgaaacaactaagcatgtcgaatttcttcccctgcagtgtctgtgccattattattccctggaactacccgctgatgatgctggcatggaagagtgctgcgtgtttggcagcaggcaataccttagtgctcaagccagcacaggtaaggccacaaagggccaggtgcagaattgcctcctctcttatatccagtacttcaaaaaagtgaaatatatttataaatagcaaacaaaaatgagatggtatggcatttttctcatatatcatggacaacttttcatgtcagtaaatattcatttttaatagctacctaatacattgtatggagattccacaatttaaaattttcataataatagaagcaagcatggtgcacatcagtgaagtccaatgactttctacgaaccaattcaattcttgcaaaatgccaagtgcccaacaattagggaattatttagagtaattatcagacatcaaaaaaagtattatgcaggtattcaaacttaattgtcaaaaatattgtaaaggcggaggttgcaatgagccgagatcgtgccactgcattccagcctgggcaacaaagcaaagactctgtctcacaaaaaaaaaaaaaaaaaaaaaaaaaaaaaatatatatatatatatatataaaaagagagagagagagagagagagagagagagagagagagagagagaagatgtagaagatgagggaaaagcatgtaaaagaatgtctgtaattataaaaatatatccagatggataacaagaaaatacttttaagaaatagttcaagtagttttcaaaaaaatctcttaatgctacaatagctttttaagaaaaaaatatggcagccaagttaacactggctgagcttttactatataaagtgcactatgtaaaattagaagaaaaataaacttcttatttgggtttctgttatctgcaggtaactttactaggtagtaggcattctgaggtgcataagtcgtggagtaaacttggtctttattctagaagagtttataatttgttacctctcaactcttttatttcttctttcagagtttaaaaaaatacagtttcatttggcatagctacatggtcatgtggccacggccattttgttttaatcattaaaaacgattttatttgaaaaagtaggtatacgttcaaagttttcaaaattcaaaagatacaaagaggtagatagtgaaatgtctcccttctatcattattccccagccaascagtttacctcccagagacaaccaatgtgattgttatctattagtggcttagatatcccagagatagtctctacatatatatgtgtatatttatgaatatgtagtttcattatgtatatgtagagagatatatattattatatgtagatatatatagtattatatatgtgtatatgtatatattgctaattaatgggcataaagtttcaattactggccaggcaaggtggctcacacctataatcccagcactttgggaggccaaggcgggtggatcacytgaggtcaggagttcaagaccagcctggccaacatggtgaaaccccatctctactaaaaatacaaaaaattagctgggcatggtggcggatgcctgtaatcccagctactccagaggctgaggcaggagaatcgtttgaacccaggaggcagaggttgcagtgagcggaggttgcaccattgcactccagcctgggcaacaagagtgaaactctgtctcaaaaaacaaacaaacaaacaaacttcaatcatgtaagatgaataagttctagaggtcctctgtgcartattgtacctatagttaattaatactatattttayacttcaaaatttgttaagagagtagagctcacgttaaatgttcttaccacaataaaatttttaaaaacacacacaaaaagtagcattctatatacttagcaaaaaaaaaaattctamctttttttagcagtttccattgtatagataaaacatattttacttaatcaatccataattatggatattcagattttttctccttttgctgtataaaccatgctacagttaataaccttataaaccttgtaagtataatgcacatgtgcaagtatatttatagtatatgtttctaatagcagaatccctcagttaaaagatacatgtatttgtgtgatagatattgacaaatccatccatgggggtcatattagctcaccagcattatacaagagtactgtytcccactcttgtttaataggtgcacaacccattaaacagcaagaagctagttgagtgaagtgaggagacaggtaatctagcccagtagagctccacactggctgtacattagaatcacctaaagttctccttttaaaatgctgatattgggccccactggcagagatggggccccatatcagcattgtaaaaggagggatctgatttaattggtctgagttggagaccacgcattggtattgcttaaaagcktcacgtttttccaaggcacagccaggatagagaaccactaaatgaaatccaatgagtgctaatcactgaggaatggcaatgagtatatataatgtccaaaaattacaaacattctttgagtgcataccagttgccagataggtagtagtgatgaagatacacaaagtttctgtctccatggaaattacaggctggctctatctgcagtttaaaactggcagttttatagttgaagataatttaaatcctgagaatgaaagacccaaaggtgccattgttatgctggacttttwaattttattggataatattatgcagtgatgcatttataatattagggctctgtgtgaaagtcaagaggactgaattgagatgactcctcttaaacctgttgtctgctttgttatatgtgtgaaagattctctcctggcttcatacaaaagaaagcacagattttcatggcctagtgtggtctggtccaggtgtgacaagttctgactttattaacctcatttttagcaatgacctacacttgcccagaaccatactagaggctttcccatgtattatgcaaacctataatcctgcagggacactggatagccaaatggaagaaaaccaataaaaatgaaaagagttgtgatggagatgaaaccatttattttatttataaatcacattttaaaacctttatattcttactttaaaagaattataattaattcaggatagttagtttttaaacatctttctaattatgatggtttcataccaaggcataatcagatatacttgggctaggatcatcttcaactacactagatgtaaatccactatttcaacagtgttgataacttcaaatattttgggccaacttctcatcgagttaagtctacattgacgatttacaaacctcacaatgtgactgtcgtggatctgttactagaaggaggaaaagtggtggccctgcctctttcttgtttgtttgctaccattattatttattgtgcagtttctatgcacattttttggccacttgtacattttacaaagacaagcttaattaaaataacaacatagcctgtgaacccatgtaatcaggcctgtaaacttcatcagagggcaatcttctgaaggcaaatgagcaagggaaggaaccactgccaccctcttggtcttgtgagctcctattctttcctgggacactgcctgtacctttgtgacccatgaccatatgaccttcattcagactgtgtgagagcagcgttatccagccatacaataaatgttagttatggttcatttatttcatatctttgtcagctaaaatatataaataaaagttccactattttcttttcccacctcaatggatcctcttgcacaccccatttttagagtccaagctaaccaaatactgacttaagactgaatggacgttggtttttaagagtgtgaaggtattgctttcattttgctttggagatttgcattgctataatagatgtttaaggtgagatccatattatgccactttttatgtgagaaagaagggaaaataagaaaatatgtatttgctgatttgaataaaaggaaacaggaaagataaactagagactaatgaaattatctatagaacatrggatgaatggggtggaaaggagggtgggagaacracattctctgaatggatgttttgaatagtcctgacttttggaagcatagtccccatatttaatgacagcaaagaaaagaaatataatcaacaaagatggggccaaaaccctaaaattaaatataaacaaaacaaattaagccatatttcaaatgaataacatgaccccattgaagagaatgaggaagcatgaacccaagtcacttttgactaactttggactrtatgtcctcaggataaaggcaacgcaaaacaacaacaacaacaaaaaaacccaaatacatattraactctaattaataggcttctttttcatagggacatggcttaacaattctcaaattactttctctatgttttaggattaagcaaataagtaaatrtattgtggataatgggagscatgtctctctttcttggagaagagaatgacaaatgtaaaaagggcagaaggatagaatcgaccctaagatatcggataaaggtatcagtgtaaactcaygggttttaatgtatttagatagctaaataaagaaatggatataggtatatgagggatagatacacacatacatgtagaygtgtgtgtgtgtkttgtgtatacatacatctctttcccagctctgtctgctaagagggcctagaagcgatgacccctcaataatgtccagatatcttggtttctaaaataccattcttcactcaaagaaacttgggctccttggagaagtagctggagtagggaagaatcaagatgaatctgaaatatcttgttgggcctgaaagcaatgtaatgctcaaagagtaataggggcacgtcagaatgataaggggccgtactgaagggactgcctcagccaaatctagaacaattgaacatcaaaatcartaacaatagtaaacgatgataacctgctgattacagtaagaatctttgtgttcacactgatattaattaattgaacrgaatggaaaacacttagagtagagagccaactactacacgtaaaaggaatgakggaattggaaaatcaccatttggcaaccatcatgatactttaggattattatccagaaattatccatggacactaaaactagtggataaaaatttgaggagtatctccccacaaaatatttgttaactacaatgtataaaatagtaayttacagtgatgaaagttggcagaccacatttgccaaataatcaaaactaactttccagtattggaactattctacagcacgtgcctcctgatgtcctgagaaaagctcagcatcgctccggtggcattgttcccaaaagtgcataacttgaatctaaccatgcaaaaacatcagacaaatccagacaaagagacattgtatgaaataactggcctgtactcttcaaaaatgtcagtgtaatgaaatagaaaagagaactgagaaattctcctagattactggagactacagatagaactaaatgtaatgcagatgttggattttcttttgctgtaagacattattgggataattggtgaaatctgaatatggtctgcaaatcatgtattctatcaattgttaatctcctgattttgatgattgtactatggttatgtaaaagaatttcttgttttatagaaaatgcacacagaagtatttagaagtatggggtatgtctttaccgtattcttaaacagttcagaaacagatattccttaaatttatctttaaaaaatagtttagaaaaatatatacagaaagataaagcaaatgcagtaaaatgttaacatttgaggaatctgaatggaaatgtatataaggaatacttgtactatttttgcatctttttgtaagtctgaaattatggcaaaaaaataagacaatgtacaataaaaataaaatgagatctagtgcagctatcaagggaaaactggkttctgggctaaaggtcaggttagggcctgaagaaggtaattgctgtttgcttctcctcaggtcacrcccttgactgctttgaagtttgcagaactgtctgtgaaagcaggctttccaaagggggtcatcaacatcattccaggctcaggtaagccactaaatgaccgactgtgctataactaatgaatggtactggggtagctgagtggctcttttacctctagagacttgtyctgaattataactgtattaaaactaaatacaattcaccaaacagttaaggatgaatatacttaccatgtgctaaaatcttaaaatggaaatacagtggtgggtgagtggcagtggggaggggggttgtacagtcatgtaaaattaccctaagatgttccattttgattttcaaaaactactctggaagataaaaatcaaggcttacccatcattattttgggagtctgataatttcataaagggtattattttagacttttatcagtttgtaattaatacagaaaatgtaaaactaaggtgtcaaggagagcttagaaatctacttcaatgaatttaaagccatcttcactataagaatttgagtaaggttttttttttttttttttttttttttgagacggagtctcactctgttgccccggctggagtgcaaaggcgcgatcttggcccactgcaacctccgcctcctgggttcaagtgattctctctcagcctcctgagtagctgggattacaggcgtgtgccaccatgcctggctaatttttatatttttagtagtgacagggtttcaccatggtggtcaggcgggtctcgatctcctgaccttgtgatctgcttgcctcagcctcccaaagtgcggggattacaggcgtaagccaccgcgcccggccttgagtatgttttaattccygttttattccctaattctacaggtggcatagcaggacaacgtctgtctgaacatcctgacatccgcaaacttggtttcactggwtccactcctattggcaaacagatcatgaagaggtattggttttaaaatgttgattcactrcagatcctgttaaactaggtttcaatttttgtttaaacagggtactttttgagtgagaaaaactacatcaactttggaagggaaatctacttatcactgctgagtattgaaatatttgaatacaataaaatactttccaaagcattaaagcccagagtcaataaaaccaaagctatgttgaaattctgtgccctactggtagttttaacaattcagcacaaaagacttcctgtattaaagctgtggcccaaattgttctcagagtatgggtaaaaaaccaaaaagatacataaatgtgaaatttatatattttatatgacaaacctggattatttataaatggagtccgccaaagcaatttttttttaagctgtaagcaatctaartgtccaaaataaagcagttgttaaaatatgtcaatgtaatggaacactgtgcagtcaygttcatagagaattttaataacattgaaaagtgttgttaaaataataaatggaaataaaaataaagtataacattgtatacactggatgatctcaactatgttaaacaacgcaaaagctatggtaggacagatcacaaataggtagtatatcaaaatggtaaaaacaatggtcactgaggcatggaatggaattttgtgatttttttcttctgtttgcattttggggtaggtattttcaaaatgctttaaataaaaatacttttgtaagaaaggaaaaataagcagcgtacttttaaaaattgatattttttctcccaatgcttcggtagtctggttagaggtttaattcttttgccaggcttttatgtaaccaaaatttctaaagaatttgaattaacttttgaccacaacatttttgaaatttttttattatggaaaatgtctaatacatagaaagcagaaaagcaaaatgaattttatgtactcatcactcagcttcaatggtaatcaccattctaccatctgttttatctatgaataactttttcctttttctttctttttttcttttttaagagacacggtctaacactgtcacccaggctggagtgcagtggtgatcacagctcactgcagctttgaattcctgggctcaaacgatcctcctgyctcagcctcccaagtagctgacactacagtcayacaccaccatacctacctaattttcttattttttatagagatgaggtcttgccatgttgctcaggctggtctcacacttccggccttaaaggatcccttctaccttggtctcccagacagttgtgagtcactgtgcctggccttgaataagtttcttaatattactgaggctcaatatgttttccatgccaggtggtaacttatagcttaaaaagtgtgtgtgtgtgtgtgtgtgtgtgtgtgtgtgtgtgtgtgtgtttgtgtgtgtgtgtgtgtgagagagagagagagagagatgttaactaaatgctcatttctcatttgttttcctctagctgtgctgttagcaacttgaagaaagtttcccttgagcttggtggcaagtctccacttataatatttaatgactgtgaacttgacaaggctgtgcgaatggtaagagagggtcaaatttaagtaaataggtgcctgggccaggtgcggtggctcacgcctgtaatcctagcactttgggaggccaagacgggtggatcacttgagatcaggagttcaagacgagcctgaccaacatggtgaaaccccgtctctagtaaaaatgcaaaaacattagccgtgcgtggtggtgggcacctgtagtcccagctacccgggaggctgaggcaggagaatctcttgaacccaggaggcggaggttgcagtgagctgagatcacgccactgcactccagcctgggcgacagagtgagacyccgtctcaaaaaaaaaaaagaaaaaaaaataggtgcttgcttctaaaacacatttcacctccttttttatcagagatcttaaatgagatttgggttttgtctagtcataaattaaaaccattgtttttatgcttagatttgggaatactcagagcacttagtttttaaaaataatgtctttataattcctctactaaggtgtttttaaaacaggatatgagtcatagcaggcatgtaaaaaagttcaaaagatattctattagggcttctagcttctccctcctttccctacaacatctcatcccatcaacctgaacagtcctacttttacctgttttgcacattgagcttctggtaagygttttagacacaacaaagggtttcatatttaacaagtaattagcaacatcaatttcctggttttaacaatgtactatggttttataagatgttatcatgggggaagttaggtaaagggcacaaaggaactctcacattatttttgcaacaccttgtgagccttaaactatttcaaagtataaaggcttattttaaataaaatgtaaaggttaaaaaaaattggcctagttctcattcttcacatctgagatataggcataaaatgagtcaatgctcggcaggggttgtgctaagctttcttgtaattgtgggggaaacttatggtcttctcagttctgtacaactgtccagcctatgcactaagcagactctgttcaccattggccctaaatgtaattataatgaacactcacagccaaacttcatcatgtaagcatcccaaagagaatggagtggtctgggagtgaagaagaaccaagtacccctgcggccagggcctttgaatggaccatctggaggtttcagtgacagacaatggctgggggtactcaaactgatatcaggggtcaggactcccctggatgtctgggttaggaatatataaccttaaagagtctgttttaaccatttaagaaccccaaacccaagacagtcaacatatttttgtaatgtttaaagataaaatgtatgcacaggaaaagcatggtatttcaaagcattcattatactttgttttygagatgggatctcactatgttgcccaggcaggtcttaaactcctgggctaaagtgatcctcctgccttggcctcctaaatgggtggaataacaggtgtgagccactgcacccagccacatccattttatatatatatatatatatatatatatatatatatatatatataaaatatatatatacatatataaatatacgtatatatgtgtgtgtatatacacacacacatatatatggatatatataatatatacacatatataaatatacgtatatatataatatatatacacatatataaatatacgtatatatataatatatatacacatatataaatatacgtatatatataatatatatacacatataaatatatgtatatatataatatatatacacatataaatatacgtatatatatgtgtgtgtgtatacacacacacacacacacacacacacacacatatatatatagacacactatatatagtccagggaggtttcctgcaggtgaattagaaactgaatttctaaaaagggaaaatgcacaaaattcatcagtcttccaaatccgtcatttttgagtgccttcatttcaaagatttctcaaacttcttgttgaaaaacaggtatttcttttcatgagggggttagagaggctttctaaatatttatgatttatggctgcacgtggtggcttacgcctataatctcagcactttgggaggtcgaggtagaaggatcgcttgagccttggggttcatgaccagcctgggcaacatggcaagaccctgtctctacaaaaaaataaaattagcccagggtggtgttcacctgtggccccagctactagggagactgagatggaggatcacttcagcccaggaagttgaggctgcagtgagccatgatcacgccactgcactccagcctgggygacagagagaaacactgtcttaaataaataaataaatacaaataaaaaattttaaaaattgtgattatacaatctaatgtagakatttttaaaagcaaaacttggtatacaagttattacatttaaatgtatagaataatctagattttctaggccaaggcaggaggattgcttaagcccaggtgttgagtccagcctgggcaacatagtgagaccctgtctctacaataaataaaaatagaaaaaawtagctgggtaaggtggtgcacacctgtagtgccagctacttgggaggctagagagagtgggactctatctctaaaaaataaatttaagaagagaataatctagattttcttttatttatttatttatttatgagatggaatctagctctgtcgcccaggctggagtgcagtggtgtgatctcagctcactgcaacctccgcctcctgggttcaattgattctcctgcctcagccccctgagtagctgggattacaggcacctgccaccatgcccagctaatttttgtatttttagtggagatggggtttcactgtgttggccacactggtcttgaactcctgascttgtgatctgcccgcctcagcctcccaaagttctgggattacaagcgtgakccaccacgcccagcctagattttcttttaacacaaaatttgtttctaatggtacatctttattgttacacatacatttttttaaaaaaatgctcagggaccaaaagggggaaaggataaacaaaatctctcamatcatgctaaatcaaaacagagtatctccaagaagctctcatcactaacaaggccaagaggattgtctgtgacttatctatattgcctgctgtcttccaaaaacaactaactccctctgtgtacaactttatgagaatcttgacttctcaaatgatgttagcaatattttctcttctcccactgaagggcatgggagcagtatttttcaacaaaggagagaactgtattgctgctgggcggttgttcgtggaagaatccatccacgacgaatttgtgacaagagtggtgaggcaccttcacatttactctgagttgtttagagattttgcttttacttgaaaaatcctacttctaggattgttcatgaattttcaggtgtgataacagtattgtggttatgttttaaaaaaaatcagtccctagtttttttatagctacatactggcatacttacagattaaattatatgatgtctgaaatttgcttcaaaataaccccgcaggacaggaaatgagtaggggaataaattggccaggagttggtagttgttgaagctgggtgatgagtacatggggtttcactgtattatgtgtctactttcacatgtgcttatgatttttttatagtaaaaaagttagaggtttatataaaaacctgataaagtatattgaagagctatgataccttactctacatttgtaatatattagatccttgacattgtgagagttacgctcctagatttttataaatctctaaataaactatgagagatacaccatgaatccccaattgcggttgacatgatagcatataattccttccactaaaataactagctaaataaataaacatccccaggacattgatcatgactccataaatatgggactaaaagtcatctataggagtgttaagatgaattatgtggctaaaataaactctaacttatactatgtcattatgaaggtagtattaatcaagaatttgcttatatttgcaaaaccagcatccagctatattttccccagagccaattctccacaccccaacccaccaaaaaaaccaaaggtattctttcttcatgagaatgagtaacaaggaagtcatatagacaggcagatggagggcagtcaggtaggcagtggctgcctcctgaacatcacagtgtaatttaattttgtgtctcactgaaagacagtctgcagtgctatatatcatgggctttcacaatcagctaaaagttgttgaaatttcaaacactgagaccagaaatgtcaaggatttgctatatcagtacatcaacaagcatgttttacaaacatgctgttcatattcattcatcagcagcatttctcaagcacctacttagtaccaaacactgcatgctgggaatataaatgtgaacaaggcagacatggtccctggccactcagaacttctcatccagtgcagaaccctggggaacgcactaagagattacggccaggcctaaattcaaagtcatggacctgctgggttataactcccattcttcttaccagaattggacttaacattagaagatgcagaagtaggttaagataactgaggagtggaagagataattacaaatacatgtcagtgatgaacatcgtgcagtaaagattatttttcgtcagagcattctagtgggtcatctggcatggctacaccaggagaattttacaaaggcagtctgccacatttgaggaggaaaaaaaaagataacaatgtgaccattttagaaattctcttgccatgaacagtgtaagtatgtgatattaataaacatttcagaacattagtttgctattcttaatggattaacatttaggataattttcatatagtgtatgtagcttatattgtgctagtagatagtggttaaggacttgggatttcaagtggaaaaaagtctacagtatttagtggttgggtgcacttacttaacccctctaggcctcagtttcttcttctgagaagctgaggcgggaggatcacttgagcttagaagttcgaggttgcagctgggcgcggtggctcacgcctgtaatcccagcactttgggaggctgatgcgggtggattgcctgaggtcaggagttcgagaccaacctgaccaacatggagaaaccccatctctactaaaaatacaaaaattagccgagcgtggtggcagacacctgtaatcccagctacttgggaggctaagacatgagaatagccggaygcagtggcaggcgcctgtaatcccagctactcaggaggctgagacatgagaacagcttgaacccrggaggcagaggttgcagtgagccaagatcacaccattgtactccagcctgggcaacaaaataagactccacctcaaaaaaaaaaaaaaaaaaaaagaagttcgaggttgcagtgagccatgccatgccactgtgatccagcatggacgacagagtgactaagaccctgtctccaaaaaggaaaaaaaaaaaaaaaccaaccacctacctccggtgctattgtaaagactaaatgacaatacatctataaacaccttagtataacacctaccacttggtagaaactccattattattaacagtgaattgtgtttttatggactgggtaacatacaggtagaagaaattaaaaagatgaaaattggtgatccacttgacagatccactgatcatgggccccaaaatcataaggctcatctggaaaagctgctgcaatactgtgaaactggagtgaaagaaggggccactttggtgtacgggggaagacaagtccaaaggccaggtaagatcacctctgtgggggtttaccgggtgcccgccttcttcagttggaatggacagcgacagtttaagaccagcctggccaacatggtgaaacttcatctctaccaaaaattagcccagtgtggtggcrcrcacctgctactggggaggctgaggcacaagaatcactttaacctaggaggcaggttaacgtgagcggaggaggctgcagtgagctgagatcaagccactgcactccaacttgggcaacagactgagactctgtctcaaacaaaacaaaacaaaayaaaacaaagaaggggagacaactggataatatgtgtctcctgatggaataaaacgtgtaatacacagtatcacctatgaagtgttcctgccaaaaaagcttaagctgaatctaattatacctttaagccaagctttctattcataagaactgcagtagggagggaggaaggaacaggaagttattttttagtgggtatagagtttcagttttataagctgaaaatagttaatgaaaatggatggtggtgaaggttgcatattatgaatctcataacactgagctgtacacttaaagatggttgtgatggtaaatttcagttatgtgtattttaccacaataaaagtcactgggaaaaagaagaaatacaagagatagagaaacaaatatcatccaaaggaagcaatgattaaccagaaagaaagataatgtataaacaactgacccagtctctttaacatgacgatagcataaaaaataaggggaagacaaaatggggaaatgttttagagtaaaagatccttaagaaatctaaacaccaaatacaatgtgtagaagaatttgaatcctaaatcaaacaaaccaactgygaaaaagctaatttctagacattaaggaaattaaaatataaactctgaataaagaatacttactaattttgttaagcatgacactgtatagtggttatataagaaaatatccttattttttacagatgtgtactgaaatactgaggtgttaaaattatgatatctggaatttgctttaaaatatttcaatgaggaaaagataaatacagcaaaatatggatatttattttaccattcattatactgttttctctacctttacataggtttgacattttcataataaagacattaaaaaataagaacctgggcatgccaacaccaaatagagaaatgcaactcttcttggttttactgggccagagggaaagaaaarattataatgtaattaagtgagaggactattaattgaaaatgacttaacctacagttgacattttttctttgttttttccaaaaaggctttttcatggagccgaccgtgttcacagatgtggaagactacatgtacctcgccaaagaggaatcctttgggcctattatggtcatttctaaattccaaaatgggtaggttcttcagacacaatgtaacttaggttttgactagataagtcatttttcccctttgccactgtgctatatacacagcataagattaatgaacatgtaattttctaccataagaataattaacttaaataattagaagttacgcttttgctaaccatcgtagatcatagtatatttttgcttttcagcttcaattaatggccaacataatgggcttttagctgaataaattttagtttttctgcacttgacatttgagatgtctgtggaacaaagtaaataactgagaaataacaaaactggttttcacatttaaattcctagggtatgcatctgtgaaatcttatttccctagagaaagagtgctgttattataggggatattgccccccaaagcttgatactcaacttttcatggaaatgttcataatcatcatataatcaactgtaaatgacatgctggcttgtgatactacatgaaactttgcaaagagttcagcttatcgaagaggtccaagtgctaactgagctcataaaacaatacttaatagaatggggtctcatggtatactgcacaaaattcttcagaatggctttagatttatttcagccaatgagaacttgaaaaaaaaataaagaatagactttctcggtctttaatagatatagtataaaagacttcaggggactataaggtgtagtgagtaacctttgatatatccattcaaggatgcatgctatgccatttctcattatacattctcccatggtggtggtgttaaatgtgcagacattagaagtcaggtttgagggaatctactgtaacatgggtaagtcacagcccctgaccttaaggagtttattatctaacaggggagacagacagagatgacagttagtccacagagggtcagaggcaggatggtgcagtgggtcagaggaccaactctgcctcctctcccctcactaaccctctgagcttgggccagttacttaaccactctgcacctcatgcctgtaatcccaacactttgcaaggccaaggtcgggggacagcttgaggccaggagtttgagatcagcctgggcaacaaagaccctgtctctacaaaaattttttttaaaaattagctgggcatggtggcatgtgcctgtagtcccagctacttcggaggctaaggtgggaggatcacttgagcccaaggagatggaggctgcagtgagctatgattgtgccactgcactgcagcctaggcgacagagcaatgcctggcctctaaaaaaaaaaaaaaaaaaatttaagcagatggcagtaatgttttcccgtttctagcatagacgggaaaattttcagaacataaaatgaatcttttgctttacatttaatgaagttttatgtcttcctaaaaacatagggacatcaatagagcattgcagtgagcaaataatagagtatggtttggtaacaatgtgtacctccttaggtcattctgagtattactaagtcaagtatttgctgttgctgctgccatcaatatatgcttgtcattgctgtagacataaacaatgtgctatggagctatggtgatatcttgatagtcctcaacgagaaatggcataaaaccatctttctccctctagtccattctataaatatttgggtccctaccatatgcaatgcatcaagaagtgtgagagttttagcagagtccaagttcactccaggttagattccagatttcttgtgcaagtttaaaattttggatagtcaagatgcctttgaaaattccttcataaggcactacactgaaacctgtactgtctcaataaattcagcactcgaatttttcctccagttttggaacagatcctgtgtctttgctggagcaccagatgaaatacctggcttggccaggcgcaatggctcatgcctgtaatcccagcactttggaaggccaaggcaggcggatcacttgaggtcaggagttcaagaccagcctggccaacatggtgaaatacaaaatctctactaaaaatacaaaaattatctgggtgtggtggcatgtacctgtaatctcagctactcaggaggctgaggcaggagaattgcttgaacctgggaggcgaaggttgcagtgagccgagatcgcaccactgccctccagcctgggcgacagagtgagactccatctcaaaaagaaaaacaacaacaacaacctggcttgtatttgctggccatgtggtagaaaatgtgtgcgtttttaagcattaggatcacactagaagaaggtacatacactatgacaggcacattagaactcgactcaactgagaaaagagtaggttcatgtcttcacctgcttggatgtgtatacaaactaagtcaaaaggcagggaaatcacgggacctattttgttgaataagcacatgtaatcccattcactcgcatttgacgatgcaacaccatagcataaagaggtatatgagacataaagttatccctgccctcggggaacttttatcttccaatttatggagggtgaaccattacctacaggaagagttaagtcagcactatatagttggttctaccaaaatattaagtttggaaaaatatgtgctacctgatgatagctggcttttattgaacatttattgtgttccaggcatgatttgttcatttcatcctcatgacaactagacaggtccttttattattatttccatggttcgcaataataaatgaaggcgaggggagatggagtcatttacccaaggtcaccaggcagtctggctgcagagccctctcacagaaccaccctactctcccacctcgacaatggcactggtgggatctgaaacggcttcaggcactgaaggaggcttgaaccttatgtgcaaaatcggaagagatggaaggaaatagggaggacactctgaaaatccatctagaagtgggagtcatgggagaggggagggagtgggagatcatgaatgagaaccattgaagaagattgaatatatgactttgggtcagattttgaaaggtgttgcatgatatatatgaaaaatgtaatactagtaatatttttttgggactttcttttggtgtgagcctgatattttcatttataaaaatttaatcaggctgggcgcagtggctcacacctgtaatcccaacactttgcaagggcaaggttgggggatagtttgaggccaggagtttgagatcagcctgggcaacacagggagatgctatctctacaaaaaaatttttttaaaaattagctgagcatggtggcacatgcctgtagtccccgctacttgggaggctgaggtgggaggatcacttgagtccaaggagatggaggctgcagtgagctatgattgtgccactgcactgcagcctaggtgacagagcaatgcctggcctctaaaaaacaacaacaacaaaaacatttaagcagatggcagtaatgttttcctgtttctagcatagatgggaaaattttcagaacataaaatgagtcttttgctttacatttaatgaagttttatgtcttcctaaaaacacagggacatcgatggagtgttgcagcgagcaaatagtacagagtatggtttggcctcaggggtttttacaagagacataaacaaagctatgtatgtgagtgaaaaactggaagcaggaactgtttttattaacacatacaacaagacagatgtggcggccccatttggcggagttaaacaatctggctttggaaaagacttaggtatggctttacttttctgcttcaccttccctttgttgtcacatcacagaaaaatctgctctatgtttcatgacttgtgtgtgactttgaggggcatttcctacatggcagttatatctgggtttagaagggcattcgttttttaaaatattaaacatttctattgaatataccatacatacagaaaagtacacacattgtgtggaaagatatttcttttcaaaaaagattaatgtttgaaaggaaaaagaaattgcaacaatatactttagctgaaatatgtttggtgtttaatctgacattcggcatgaacttgggttagctgtcacgagactaaatggaaccaagagaggcaaatgggtggagagcaataaccagcgagctccaagaataaatcctgtcctggagcttcttggcaggctttcagagtcaacactgaaaaaaccctgcaattggcagggtttttgggagtctgagcaatgagacttaagagtttgtaaaaagcccaaaatgtaattcactgtgagcagtgacactaacacctttcaagcaatagcttactttcagtgcgaaacacatgccaggccccattctacttagcctgtataagcaaaggcaattctcacacgagctcagaggaataggtactattattatcttattatacagaagaggacaatggggctcagagaggctgggtgagttgcctcaagtcacagagccaggcactggcaagagagaattcaaaggcaggcggtctggctgtggagcacatctcttattcccctcagtctggtacgttgtttcaaaaactgaaatgtttgtgatttactgaaattacagtctgcaaatataagtttagttcatttggagtttttttgttttgttttgtttttacattttctctttactaatgactttggccatgtatttgcagcagtaaaagtagctctcattttaaattccattgggtgaaggtaagggcttcccccccaacttttccatgtctttaatctggttttcatgcctgaatccaaatcactgtaggagactttcttagggaatttattattagaaagtgaggcatccctgtttcacccatcttttgagagagtgtatttgaccagctccaggtctgttttactataaaatactacagtttttctaatagtttcttcctcccccaattttaaaaccccttagcccagtggttgtcaaccttagctgcacagtggattcaaatcacctgggagcttcaaaaaatacagatactgatctaattgatctggggtgtgatgtggggtcaggagtcttaaaagctccctgagtgattctaacatgcggacaaagttgacagcccttgttttagctcagcttccagaatcacgcactcattagttttcccatggtattcagtgccctttaacctctgtagagattgatgacagtactggctcaaaatagaaacagtcaaagaaaggcagacctatttatttttgcctagacaggtttccctgtgtttctaacaaacaatataaactgaattttccttatctttaaaataaggttaaaccaaatgatttcaaactttcctgtgctcagttctgctttaattaatataatccagaggacagtatcctggttacttctgtttagtttaaatggacaaaaaggcagagtctgtcatcaagtagggaaataaaagagaagggttttggtttgaagctgaccaggcaacactctctgctccttagaaggcctggtagctggtctgggctgttactattcaaagtgtggtccatggaccactagcatcagcatcatcagggaatggttagcaacacaaaacctctgggcccacaccagacttaatcagatcaggatctgcaacttaacagagtcttcagatggttagtatgaacttcaaagtgtgagaagcactggcttaggccacattctatttacttagtgacctggacacctacgtatacctatgtctgaaggtctgaagacatcacatgtctgcctctgaatgtggtctgtcaactgcttttctcttccctaggtgaggaagctctaaatgaatatctcaaaaccaagacggtgacactggaatattagagcaacaccatcatcaggaaagccttgacagacagccctttacaactctggacacacttaagaagattgggtgtgttgaggcaggaggtgtcagccacaaaccaaaaaatacacagatggaccatgaagagggccaggccatgttaaagcatttacacatgtgcctgagtattttctaatacaccttccagtgatttggagttgttgcattttgactatgttgtatatcatacgtatttctaaaataccaagctgtttctcccctacctagacaaatctattcatggttcccatcttgaagatgtcagtaccatgcagttataatacacaaggtgcatttattggaaactttgtata

SEQ ID NO: 94109 - DNA, 633792 bp, Homo sapiens
  misc_feature (1)...(633792): n = A,T,C or G
ctttgggaggcagaggtgggcagatcacttgaggtcaggagttcgagaccagcctggccaacatggtgaaacactgtctctactaaaatacaaaaattagctgggtgtggtggagggtgcctgcaatcccaggtacttgggaggctgaggcaggacaatcgcttgaacctgggaggcagaggctgcagtgagccgagattgcaccactgcactccaagcatgggtgacagagcaagacaccctctcaaaaataactaactaactaaataaataaacaaactatccatacacacaacatcttggatgatgactctccagaaaacttgaatgacaaaagcacatttcaaaagattattcatttataatgcttaaaaaaaattgagacaaggtcttgctctgtcactcaggctggagtgcagtggtgcgatcatggctcattgcagcctcaatttcctggggtcaaatgaggtcccagcatccccagtagctgggaccagaggcacgtgccaccctgcctggctagtttttattttttgttgagctaaggtctcgctatattgctcaggctggtctcaaactcctgggttcaagcaattctccagactttatctcccaaagtgctgggattacaggcgtgaaccattccactcagcctatgatacattttgaaatgacaaaattttaaaaatagaggacagatttgtgttttcaaaggattagggatgggggtgggagggaggtggtgcagttataaaggggtaacatgaggtgtcctggtggttttggaatcttgatggcggtggtggatgcatgaatatatacatgcaataaaattgtatagaagtaggccacacatggtggctcatgcctgtaatcccagccctgtgggagaggccaaggcaggaggattgcttgagcccaagagttcaagaccagtctgggcaacaaagtgagactcctgtctctactcaaaataaataaattaaaaaaatagctgggcatggtggctcatacctgtaatcccagctctgtgggtggccaaggagggaggatcaattgagcccaggagctgaagaccagccttggcaaaagtgagacctcgtttctactaaaaataagcaaattagctggccatggtggtgtgtacctgtggtcccagctatatagaaggctgaggcaggaggacggcttgagcccaggaggttgaggctgcaagtgagtctggatgacagagtgagaccttgtctcaggcaaaacaaaccaaaccaaacggtacacaagtaaatacacatactcttgcacaaatgagtacaaaaactgaggaaatctgaatgagattggtgaattctatcaacgccaatatgctgcttgtgctattgctctatagtatttgaagacatgaccatgtcactcactgtatttcttaaaaatacatttgaatctacaattattagttgaaaaaaatatttatgagacagaggaagagaactcggagggccttcagttgttgatgtcaggacattaccaccatagctgaaggccagaattcagaaaaccactcctgctgccatgctgctcccccaacccaagtggctctcatgcccatgaaaacggtgactagacccaaacttggactctaactgccgttaatcctcatgtcagttggaccagaaagcagaaggatggcttctgtttcacttccacctgccagattgagcaggaacgcatctaattgacaaagctcaatttgcttcctatatatgagatgcaaaatggtctgggacatgtggctttgagcactctaatttttccaaagagagtatggaatgggagttgaatgagcataatatctaccataaccagccactagctatgtggccttgggcgagtttattaatgtttccaatcctcagtttctgactctatgaaataaagatcattatcatactgagtgtggacaaactcaaattgtttttcccctgctctaacaaaacaccaatcaacagagaagacttctgtgaccaagtatgcatgggatttcttcccacccacaagcaggcaatcaattctatagggcacaccagctgggtgcccttcaattccattcaactctgacactgtctccttggagatagcatcagatcccacaggtcaagggctcagtccccaatactgtgcccccgccaacttctgatgccaattgcaagccccaggttattctacctgtgcttctgactggccaaaaagtgggcttcacgtgacccccttcttaggtttattaatctgaaagagtggctcacggaactcagggaatctcttactcaggattaccagtttactggtatgacaaagtatatgacaaaggatgcagatgaggagatgtacagggcaaggaataggaggagcttggagctttggtgcccaccctgaagcgtcaccctccatgtacctccacgtgttcaactatctagaactctctgcacacagtcctttttgggtttttatggaggcttcattatgtcggcatgattgattaaatcgttggccgttggtgatcaacttaaccatcagcttctctctcctccctggaggttaggggatggggctgaaagtcccagccctctaatcctgcattggtctttacaatgaccagtttccaccctgaagccacctaagggctgccagccaacagtgaactcactcattaccctacaaaatacatcgctttggtgattctaagcattttagaaatcatatgccaggaaaacagaaatgaagaccaaatatagatttcaccacagcagacgcacttacctcctggagttggctgagatgcagcacgctgccccacacatctcacacgctccctccatccatgctggccattagcatggtttgtgcaatctgagaaagaagatcagcaaatgttccatgtgaaaagcaaaggaaagaaatgtttaaaaaaggagaggagagagaattttaaagggaatgctggagaatcgttcttgaataactggcatgcactcagtggcaagagatgggaaagaaagaagtgaaaaatgttattccacatatttagtcttgtacagaatgattgacttttatccaattagaggacttggagttggaggcctcactcttttctccatattttgtatcatattaaaacaaatatgaaaatgttatgaaaagtcataaaatgattcaatatcatatccctttcagattatagccccttgaagattatttctcctctactgctataccctcagcagctagtatgtttctggagattagccaagtttgtgagtaaaggtatcagcatcaacaattagctaccaaatgtatttgcttcttctgacataccatgaagtcactgtatagtatagccagtgtctgtcagttcaaccacccgcttgttaacatctttcactggcctcctggagaagggttactcagcctcagcactattgacattttgggctagaaaaatctttgttgtgggagcttcctgtgcactgcagatggtgagcaaaatacttaacctctactcattagatacctatagcacaactccatttgtgacaatcaaaaatgcctccagacattgtcaaatgtcccctgggggcaaaatcacccagggatgagaactgtgttagaggaaaacacaactgagccatcacccttagagctttccactaccgctggtcgctttacttctagttaatgtaatcttcttatgctgccccagaccctgtgctgacgttgttcaagttgccctaatgctactgggaaaatgacaacaacctccactaccaacctcctccctccgagcccacaaacagttaaaaaaaagaacctctttttccctctagctgtcaatcatgggttgaattttgtccctcccccaattaatatattgatgtcttaactcttagtagctcaaaatgtgactgtatttggaaataaggtcattaaagagggtcctaatcaaatgtaactggtgttcttataagaacaggaagtttggacacagacacacatacagagagaacgccatgtgaacatgaagacagccagctacaagaaaaggagagaggcctcagaagaaatcagcccttgatcctaaacttccagtctccagaactgtgaggaaataaatttctatcgtttgtcaccctatggatggtacgttgctgtagcagacctaccacctgtcttcagaaaagttctctagagaaatagcctttattcttcaagcttcctctgacctaccatttcccatcattttataaatattttcaggccctaataatgttgattttttttccatttttcttctactgtcacacacttctagggcaggtgtttggtggtgtgacaggaaattgactggtgtcaacttccagtgtttgtgtgataggaggtctcaaaactacaggataaatgtgtcatatctcccataagtatcagttttgctcagtgattttttttttttttttttgagatggagttttgctcttcttgcccaggctggaacgcaatggcaagatctcggctcactgcaacctcctcctcccgggttcaagcgattcttctgcctcagcctccagagtagctgggattacaggtgcccaccaccacgcctggctaattttttgtatttttagtagagacgggttttcaccgtgttggccaggctggtcttgaactcctgacctcaggtgatccacctgccgcagcttcccaaagtgctgggattacaggcgtgagccactgcgcccggcttgctcagtgatttttttaaggaaaatgttaaataattggctcatgcattaatttaaagcgtatttacatgaaaatgagtatagttttagcatattcccgtatatttcacagacatttctagcttatagcatgttcctctcaatggaagtgttccctctcctcagcttcagggtctcttcatcactcagaggcaccatcagatgtttgttgagccattctcctcatagaacgcagaggagaggccaggtgtgaaaccagaccagtctatctatagctaagaaatattcctaacggacctcgaggagcgcgagagggaggttttaaatgtaatcctgagcttttctgattttggggttccaggtctgctatacatactcttgcacgttatattgggcacagccctagtaactctgtgatttgaaatgatgatctgaagttatcgattagggagaggaatgtggacagagaagcagagcaacggagaccgggaagtttccgtctgtgtcctggattgcagccaactgcttaggcacacacacctgctgccctcccggctctgagtcacytcctctcctctccctgtccaacgagcagctgccaaatggcagccaaatccaacagatgtaagccgggaccccacctgtgtttgaattactttctttgaaatctgccacgtccaggtttattgacccgggcagtcttttcaacatttccttatgccgcatacgggtggggctagggactttcttgtgcactggcagtcctcagaagagaaaactttgaattcagctatttggaacctcgttactggttccgagcctcaggaaaggccagaagagcgagagccagcctagttagtcactcccacatctgtgacccccgtttacgggccttgtacgctactgcccttcaggtaccataaaccgggcttctcaaagggcactgcaacaggtttccaggaattatttatcaaagtccatgaccccggccctgtgacccctgggtttgaaaattcagaccttcagcctaacggagaggtcggctcagcgttcctcccagcatcctcgggcgatattagggtcctgggagattcgggaggccactgcgtccaggccccccacggccagccaggcgagaggcgggacgcgaagccgcggcctccttcctcttccctgaggcggtggcggcggcaggccccgcccctcccgcgcggtggccgtcggcggaggggcggggcctgctacagcgtcgccggctgacgcgaatgacgctgcgccagtcaggccgcagccccgctgcttggcccgtcgggcccgccttggccggctcggcccgcccccggccctccctgcacggcctcccgtgcgcccctgtcagactgtggcggccggtcgcgcggtgcgctctccctccctgcccgcagcctggagaggcgcttcgtgctgcacacccccgcgttcctgccggcaccgcgcctgccctctgccgcgctccgccctgccgccgaccgcacgcccgccgcgggacatggcacacgcaccggcacgctgccccagcgcccggggctccggggacggcgagatgggcaagcccaggaacgtggcgctcatcaccggtatcacaggccaggtgagtgcgggggcgggggcgcgccggccgaggcagcctgggcacgcgtgctctccctacgcgccgctactcgtgggctgcggtctctccaggaacagccctctcggcgtcccggaaggggtctgctgccgggaggtgggacggaaggtacggtgcagttagtgtgttgcgtgtggggtgtgcgggatacatcgagcgcctctggtcttyctctgggggctgtgagcgtgtgtgccgcgcgggatgtcgcgctcacacccgggcaggaccgcccgctctcacctgcccctcaggtgaccgcagcgtctcttcctccaagcccatgtcgtgcttcgcagctcctagtgccggaaagggaaaagaaccggtgatcaatgaacttgcgggtgaggtcttcttgatgtgtctcggctcaaggggcgcttacctgctaacgtttgggaagcaagaaaaagggtgctttgctggtttcgtcccctatcaccggatttccagatagaaaagagaacatgaaagaaagtaatgctgtggagtcacctactaggacatgtttaggaaaaagaacttaaaaaactttttaaaatcacgccaacttctgagattcaggttgacacatttggaagtgtatccgaggcacactggtccaaaagtgcggctagttccattttcaaaggaataagttcgtcgagtaaggtaatcaagaggaggtcttcggaatgtctcaggctaagcatggctggtttgtgagggtcgcctcttagaggtgttgcagtaggtgggatccgaccgctgtgtcttaccaagctgtgctgttttagattcagtggtcatgamgtaatcgtgcccacatattgctgtagaaagaatgtgatgtgtgtgctcctgggtatctctgggtggtggccaatataacactgagataaaggtgataatggctaatacatattgtgtctatcatgttccagtcgcttgcctaacattaactcatttagttctcataacaaactctttgaggaggtacttttattatctctatatatgtggaaactgaggcatgggagtttgatttgcctgaggttaaaccgctgggaagtgtccagttggtattgaaaccactctcaaagttctctagtgttagaaagggctaagtgggcaggaggcagcggctcatacttgaaatctcagcacttcggtgtgcagaggtggaaggattgctcgaggtgaggccaggagtttgagaccagcctgggcaacatattgagacgttgtctctacaaaaaaatttaaaaaatgaggcaggcatgttggtgctcacctgtagtgctagctactcaggaggctgaggcaggaggatcacttgagtccgggagtctgaggctgctgcagtgagcaatgatggtaccactgtactccagcctggggcaagagagtgagatcctgcctcaaaaaaaaaaaaaaaaaaaaaaaaaaaaaaagaaggagaagttgaaattggccagatgcacagtcacagaatattacacaatttcaagtattgaatacctgatttactgctggttattcatgcatcttgctttgcttaaggtaatcataatagacaagagtttgaaaactagtaagaggtggatctgagtttgaaaactagtaagagggcaaggatctgaggttgagaaattgaatccttgaattgaggcagtaagacaggtcagggcctacatactgtcctcccccttctctttgttttctaatgctgggacctttctgcagatgattcccttttttccattttgtcagactggacctgaagctcaaatgtttaccaagtttacctaatctctggaaagtagagattttattttagtattgtccggaaattagttaagattaacatcttaactaatgtgctgtgttggtgtggcctataccaatttacacgaccagcagtatgaatcagtgcagattagaaatggaacctaattttgacttttaagagcagtcatttggctggaactgagtggccaggaaggtatggaagtgggcccccactctagtttgtcctgcagcctgtcatgggagtctacctgaagcaccacactcagcagaccactccctgactggaattttttggttcctcatttcatttccaacttaaaacacctgcatggctttcaggttgggttgaatctctgccccagtgtttctttcttccctccggcatctgccctctgcattgtctcctcatttggtgttgcattggcttctgtacccctagcatagtgctgaattctgtagctaccacataaacacttgcagatggaatttactgctcttttatgttttttatttgtattccaggacagtgactcccaacttgagtatcaaggatctctggagcactgtggtgttaatgcaaggggtctgaaaatccataccttattgtatgttttcttaataatattggctgagaacttactgagctattcactctgctaagcattttgtatatccctacctaagagacaggtataataagtatccccatttatccctggctaagtaaggttaaatatgttccctgaggtcgtacatctaatgagtgtcagaactgagatctgaacccagatctcagcagttgctgtaagtcattttgttatacagactgtggtragccttatgagacagagagaaataaatagtcttactctaagaagagatttcagattcaaatgccactgctctggcacttggggctatcatggcatttgtgccaagaygggctcttaaatgggttgtcccaaattcccgcttgagaatagtgcggacagccagggtgtcctgtctgctgtgtatctctagtacgtattgtcaggcttcttattctagccttcccctcccatcggttcttgacacactccttttccaaagtgggaaccttattaaataggctttaaagaagctcaggctctggctttgcattgctgtctccaggccctctgccagccactcttaaaagctcacccccattggctaatgatgctgttctttactgcactcttggagatgttcttgctgttttttgaatactgttgccttgtacctctttggagtaattatttgtggctgaatggcctcacaattcttattccttttaaggtgagtctcagtgttctcagcctaatcctgataaatgcagccattccaggaacttcctctgtatttacatgtatgcagtccytgttgattgtataagtaatttcatatcttttgtcttgagattatgaactactttaagatagaaatctcattttcagcctgttacctcccacatgccttcatctagtggggtttcaaaactgttgacttactttttccattagcagaacacatcttcactgcatgtctgcagtgtccaaggcttgttttggtgctgctgcagatataaagatatgaaagttgtcttcatctgtttgtgttgctataaaggaatacctgaggctgggtaatttataaagaaaagaggtttatttggttcatggttctgaaggctgtacaagaagcatggcaccagcatctgcttctgctgaaagctttargcttccactcatggagctagtgtatgcagagattacatggtgagagaggaagcaagaggtggggtggggtgtggggtgccaggctctttttaacaaccggctctagcgggagctaatagagtgaggagtcactcattactgtgaggatggcaccaagcattcatgagggatctgcttccatgaccaaaacacctcctattagttcccacctccaaccttggggattaaatttcagtgtgagatttggaggggtcaaagatccaaaccatggcattccatccctgaccccccagatctcatccttctcacatgcaaaatacaatcatctttctcatgcaaaatacaattccaatagtccctaaaattcttaacttgttccagcaccaacttaacggttcaaagtctgagactcaaagcaagttccttctagctatgagcctgtaaaaccaaaaacgaataatttttttccaagatacaatggttgtacggtcattgggtagacattctgtgactgcagcagccaggatgtcggagcagcatgtaggacgttccaggactccttgaggtgtgccaggccagctgtgccccgggcctgtctccccaaaccatgctgtcctcctaggtctctgggcctctgatgggagagacagcctcaaagatgtctgagatgccttcagggtcttttcccattgttctgactattagcacctggctcccttttatccatgccaacctctttagcaggtgattgctccccagcaccattggctttctttactgaaaaatgctgttttctttcactatcacatgaccaggttgtagatttgaaaaatttttctgatctgtttcccttttctctaccaattctacaagtaatgcactttgaacagcaaatgcaacagactgaattaccatcttccttatgacattgatagtctagtggtatgatgatggtgatagttataattatggtagattaaaataattaacaagtactgagcatttagtttgtgccaggtaccgttcaaagtgcattacattttgttcaaagtatatttgttgaagcaacagagagcttctatgaggtggttttctttttcttttctttttttttttttttttttgagacagtcttattctgttgtccaggctggagtgcagtgacgtgacctcggtttactgcaacctctaccttccaggttcaaatgattctcgtgccttagctgcctgagtagctgggattacaggtgtttgaattactgcttagctctttctgaaytgcactggctttgggtaagtcacttatcttttctgccaggttggaagaataattcttatcaaataggaaataartctgcacatagtagtggcctttgcctcattactggaatggaccttccctccrtagtgttaacagaataataaaagatttcttgacttttaggaaaggaagttgaatgtgggaggtattactatttagccttgctttgcatggggaatctattatctagaagcagaaagttctgtaatatttggaatcaaccacaaggctataaagtactgggaggccaacagatttaatgtccagtgagtctttcaagactgtgcaaagcagatctgggagctggtcttatcttctcatataagaggattgtaggcagtgacttccattctaaatcttccttgctgggatttgcagtcctgggataaaaggtttggcattattgggctgggcgtggtggctcacacctgtggtcccagcactttgggaggctgaggcgggcctcccaaatctctggatcacgaggtcaggagatcgataccatcctggctaacatagtgaaaccctgtctctactaaaaatacaaaaaaattagctgggcatgggggcaggtgcctgtagtcccagctgcttgggaggctgaggcaggagagtggggtgaacccgggaggcagagcttgcagtgagccgagatcgtgccactgcactccagcctgggcgacagagcaagactccatttcaaaaaaaaaaaaaaggtctggcattattggaagtgagagagatgtcttgagtactgtcctgcttaatcaaagactgttacatgtgattaattgaaagagctctggactgggaatcagaggttgggttttgataccaattaattgtatagccttacattttttgagtgtttttcttaacttgtcaagtgaaagggttacctggttattcttagggatctaagggctgctcctagtctacagtagtgtgatgtttggattacatgctgacttattatgtgtacaatagagaaattatgcaattatctttatatttaagcagtgcagtaatttcagttttagacataaagccaattggattttttttttttttttttgagacagatcttactctgttgcctaggctggagtgcaatggtggtatgatctcactcactgcaacatccgtgtcctgggttcaagtgattcttgtgcctcagcctcctgagtagctgggattacaggcgtgcgctaccacgcccaactaatttttgtatttttagtagagttggggttttgccatgttggccaggctggtcttgaactcttggcctcaagtcatccgcccaccttggcctcccaaagtgctgggattataggcgtgagccaccgtgcccggccaggatagttttttttttaaatgaaaccaatgaactattaattttactgaatttgaaattaagtttgtaaactaagaagaaattcatatgagttgtatgttgtcagaatttgtaaggatagagtgaaaacttggagctgtccatctttgtaggacatatcaaatgaatgaagtgactttttggtgaggaacgattttttttttaactggtacataataattgtacatatttatggggtatgtgtgatattttggtacatgtttgtaaagttcaaatcagggaaattaggatagaggaaggagttttaaattcttgggtttttcttgggtagaaaaatggagttaattatgcccacatcacaaattgatgtgtggattacaaatgatgattatattataataaggcctatcactgttcctggcatgtagtgtttatgaagtgatagttcttatttattatgaataagttctcacagtgggaaggaatgagagaaggatggagaagtgcttgggaatgcagttaggggtatgtaggatgaatgagaatagtaaaagtatgaggataatgagatcaaggatgcaaatgcattttggtgacaggttggatggtaatagtatggccagaaatgcaaccactgggaaggaaaatcagttttctgggggaagacagtgaattattttgttcctctggagtttgaagtgcagtggtgcaatcatagctcrctgcagctttgaactcctgggctcaggtgatcctcctgcttcagcctccctggtagctgccaccaagcctgactgatttttttactattttttttttttttttgtagagacaggatctcaccagctgaccaggstagtcttgaactcctggcctcaagcaatcctctggtcttggcctcccaagtgctgataatacaggtgtgagccactgcacctggcctctttgtcttaaaaatgacttaaaagtgctcagaggtggctgctgtagagtgggcaagtcctaaaggtggccatgctgctgtgctgtacctttagccagtcttcttccctgtctcccagaactttctgtagctcttacttagaaggcatgaaaattaacactttccctttagtttcatgattgatgttaaccaggctattcttagtatatttcagttttctcctttctttctcctttatttatttgttgattatttgcatttcctaatgttaaagatacttccaggcggggcgaggtggctcatgcctgtaatcccaacactttgggaggccaaggtgggtagatcacctgaggccaggagttcaagactaccctggccaacgtggagaaaccccatctctactaaaaatacaaaaattagcctggcatggtggtgggcgcctggaatctcaagtactcgggaggctgaggcaggagaatcgcttgaacccgggaggcagagcttgcagtgagccgagatcataccactgtactccagcctgggtgacagagcgagactttgtctcaaaaaaaaaaaaaaaaaaaaaggtacttccaaacttccaatttacaatttctcatgcttttcttcctttcttgaggaattttgggaatctcacacttccagaagtaaggtgctcagttgcattaaccattcctgtataagcttaatacataggaaatgagtgagtaaaacatgtctgaaaggtaatcctataggatagaaagctgattatcagtaatgttcttggcagtggggcaccaatgtgccaaacctagtctttggcaagctagtaagcaattttcctgccaaratcttgtgacttaccataagtagtaacccaattgtttatataaatttactcattgaaatgactcagctttccaggatattattttggcatttacttatgtagaattgagttacatagacttgaggttagatgattttatatgcagtgacgttcttggctgaagggtatttacttcatttgtttcagactgttcatactgtgccttttaaacaatttaccacatgtgattctaggggaatcctttctcagatcttcatactaagttcttttaaacttaagagtgaaaaaataaaggtatttactagggatttatagaaagtatttctttatactgactaattacacttgggaaaatgaaccaccaaagcttggttgtattatatatatattatgcttgagcatttggtttgattgtaatgtgaaatgaattgcttgatcatgtttaacaaaaatatgttccttaatgctgagtgaaaaagcctctaattggcacttttagaaatcttttaaaatcaaaacatgatttttctatgtttcttagaatggtactgtatttctaycacttttcacaaaagttagatttttagtattgctttattcgaactatatttttacatcggttctttaaaaatgatgaattggaattttgcaagtatatgcagacactagtagtattttttggtgatcaatattgataaacgtgtttattgtagtttacagtggaatccttcaaaatggaagctttgttgcaagagacctgcaggacaaaatgcaagtgtggcatatatgcttgttggagtaaacccagtcaaggagaaagacagcagaaaccctgtttgtcaagaattgtgggaggcctgagattttaccttacttgcaggctaacaagttagcttcttaaaattccacggatgatggcagaagacacagcactcctgggtcagcaggcagtatgaacttcatgtttgtgacagctctgtttgtatagtattttcttgcccctcaaagaccatgtgggtaacacggtggctgggtgrgtctaggtggatgttgcccatgcagtgggtatgcaccacagttgagaaaatctgagattgggaaaccccaattttttataagggaactaataatcctgcccagcctttgctttgagggagacattatttttattattctgcatagcaaacaaatcttccatctgctccagagagaaacactattgctatcttaaaatgctatctacagatgtcctgtacaggaaagatagtagccaataaaagctgtcagtgcaatctgctcataagacatgcagaaactggagagacccatagagaactggctcccaacaccatttgtttgccttgttcctgaaacttaccagattggcaacacagaccagttttcctctttttttttttttcttattttttttatttttttttattttccagaaagggtcttgctcaggctggagtgcagcagtgcaaacacagatcactggagcctcaacctcctgggctcaagcgatcctttggcctcagcctcccgagaagctgggatcacagatgtgcaccactatgcctggctaatttttgtattttttttttttgttaagatggggtcttgccgtgctgctcaggctggtttcaaactccttggctcaagcaattctaccatctcaacctctccaagtgctggtattgcaggtgtcagccactgtgcctggccccagttttcctcttatgtctccatgcagactatggggagctccagctttgcatttgttttctttttgcttgaagaacaaaatgataagacctggatttgggtgcttagtatggaatgaattaggcattgtccctgggggaggcattttatatttccctgtatgtataggcatgggaagtatagtaggtttgattttgttggaatgtttagtaagtttaatctgatagattagtctcagttggcctgaagaagtctagctcagaaggacatttttccagccctgaagaagaatatgcctgcttccccatcacccctaaggggatgattctaactctgttggctgtggcacctttgtgtacacgtatcatcacttgtttttttgtttttttgttttttttgagatggagttttgctcttgttgcccaggctggagtgcaatggcataatcttggttcacagcaacctccacctcccaggttcaagcgattctcctgcctcagcctccagagtacctgggattacaggcatgtgccaccacgcccggctaattttctatttttagtagagacggggtttctccatgttggtcaggctggtctcraactccagacctcaggtgatccgcccaccttggcctcccagagtgctgggattacaggtcctcacttgtttttaatttactcactgagtgaccgtaaacttcttgcattaatttcaatgctttctctttttttgctttaaaattgtacctgatgtaaactctcataccttcatttagagattactcctatcatttttgagartgtttctctggtgtctaccatatgctaatagggcctgccctcgaggtcagaaaatttatgtcttttcaaatcttgtaagwttgctaggattttattttttttattttttttgatacggagtttcgctcttattgcccaggctggagtgcagtggtgcgattttggctcactgcaacctccgcctcctgggttcaagtgattctcctgcttcagcctcctgagtagctgggattacaggcacccgctaccatgcccagctaattttttgtatttttagtagagatggggtttcaccacgttgaccaggctggtctcgaactcccggcctcaggtgatctgcctgcctcggcctcccagtaggatcttgttttgattttcatgaattttgatgttatcattgaaatatctagaaatctgcatattttatttaagagagtctgctttttgtacacaaggaatgcttgttcttggtgaagcctcaggtatgatggataggaaggaataagaaagctgtttgagaggagaataaaaggacttagctactgattggattgttggattgggaaagtcaggagaagtaagggtttttgttttgtttgttgtctttatttttatggttgataccaatgacattcagtttgtgtaaatccatgaggacaagactgtattttactgctgtatccctagtgcagtgtctgaaatatggtgggctctcaatagatatttattgaatgacatctggagttcatacttcctcagaaatcctggaggaaatacactgcatataagaaggaatgggaatgtagatgtgcagtgtatcatactttagagcaggatcgacaaactgtatcccctggaccaagtccagctgcctcctgtttttgtttttgtttttcgagatggagtctccctctgttgtccaggctggagtgcagtggcgcgatcactgcccactgcaacttcggcgccccccaccgggatcaagagagtctcatccctcagcctcctgagtagctgggactacaggtgcctgccaccatgcytggctaatttttgtatttttagtagaattggggtttctccatgttggccaggctggtctagaactcctgacctcaagtgatctgcccacctcagcctctcaaagtgctgggattacaggtgtaagccaccacggcaagccctgtttttgtaaataaaggtttgttagagcatagaacacctgtttacttattgtttctggctgcttccacatagagttaaatagctgcaacagagaccatgtggctttgaaagcctgaaatgtttactctctggcccttcactgaaaaagttttctaaggtttgctgtagagctctcttccttagggtggatagtggaattgctactgatcatagatgatatctccaaatgagagaatgtggagacagaaggatgagagtgaggaggaggaaaatgtttgcatttcaggcttggaagagaaggaagctagggagggaggggagaggagagagaacaaaagtactgagtaatatcgtggaatctgagggaggccagagatgtttttgttgttttggtggtaacatgtaacatacaatttatcattactgacatttagtacatttacgaggtcgtaccttctttaccactctagttccagaacactttttgatcactccggaaggagagcccatacccattcatcagtcactccccatcccctcctttcccagcccctggcagcacaaatttacattctgtcttgtatgtttttccctttgccttagatctgggaaaggttttttttcgtcatggtggggaaatgggcttctgtgcagtcaggggagaagccgatggaggaaaggagtagtgtggttatggaagaggctgaargggagaaggtcgcgggcatctggaggcctgagatgtgcatgagcatccagtcctgcaccggcgctggtgctgcagtggtgccgtctctgtcactgcagtgctgttctctgagagctgttccgcagcgtgattttgggtgctgttcctcattatgaagcctctcagtcatcttcttcagtctgcactgtacctttcatagatttctgattcaattagctgcagattggtttttgtggcttcctacctgaacgamgatagaaaatgatgatatatatgatggtggacggtaagatgacaaaccagttttgaagtcctctaagaaacatgaaagtggatgtgagtggtagatcacaccagtgaggttgtgattttgattagagtgttgtgagtaaatttcatgggccataagtgctgacaaacaaagattgttatggtttgatgtttcaaaaggggcatcaggaattgaggataaagtgtttgttgtacccccttttggggtctaggagaatgaatgagtaaaaatcctgaatgtcagtagctcatggagtgttagattttacatagactggtaaaaacctgagattgatatatggtggctaggttattttgaaagtaagaatcttaggagtaacaaattgctgtctgctatcacagtatttaaaaaaaaaaacccgttttacacacyaaaatgtaagaagaacatgctcccagaataaagaacactcaccaaattatatacttttgactatgtgaactactttttctcatttccatttttttcattttgctaaagaacgggttaaaaatgtgtcatggattggcattagtccatacagtacatttgggaaccacctattgaatactattaaaaaaatttcatttgtccaatttcatttgttcagattctgaaatgaaaaacaatttcatttatctgatttcatttgctcagaaccgaaatatgaacttcttggggatagggatcatgtcttaaacctgtggtgaccattttttttcttgactccaaggtaggacacacgttatctcatatataaatgatctagagtggaactgaatgttggaaaccagggctgtctggaagaatttggagttactatactttataatacttcattcttcctggtacccatttgatattgagcaccataaaaggtgcttggtaagcattcgtttgttggttgtttcagatttcattttaaccacttcctttggcatgctgagcaaattccttaggctttttttttggagacaaggtctggctctattgcccaggctgaaaagcagtggagccatctcagctcactgcaacctccgcctcctgggctcaagccatcctcccacctcagccccctgagtacctgcgactttgggtgggttctaccatatctggctactttttgtatttttctttttgtagagatggggttttgccacgttgcccaatctgatctcaaacttgtgagctcaagccatccgcccacctcaggcctcctaaactgctgggataacaggtgtgagccactgttcctggcccttgggcacttttcatacctcacaaagaatatactagcagaacttaggagtcaagatacccagggaatccttacagctctgtttctgcagctctccctagtctctgagtgtgcttggaaggaatattcaaatcatcattgtgttgtttcaggtttaacttgggaacttgaaactgaaatcaagttttggggaccttctgggtggtgacagatcttgttgttttgaccaggcactctttcttgtccccctgtccttataatgttgacttaggcatcctgctagctttgtgagttggtcaaccctgggtattaggggaaggaacggggggggggggtgggaggggggaagagaatactaaatgcattaagtgaatttctcaaggtggatgggaaggttttggggtttttttttgaggagaagtaataatacatagtagatttttgttaaasttttgcttttctacatttaaatataaaccttgaaaaggagaaataggaagagttgaccaagtattgaagtcyctttttttttccttttggcttttttatggacaacggtggtttttaattttatcccttatcaattttgctattttgactaatttagtaagttcaaattatttaaatttatgtagtattttctttccattgagttgtcttttaatatttactgtttgaacatataggttttaacctatttaagcgttaccaaaagtttatactattgccagattgttactatggaaaatttcattttagttgctaaaaacaaggaagtattttatctaggccagggaaataattgggagcccaactagaaatcttagcagattctctatataggacatygctgttagtggagggcktagggatggatccaggaaacctgagattactgcttaggtctttgaagaatggagatcacttaacctttatgggctgtggtttttcttctctttaaatatacgtttcagaaaatagatgtaaatatacgtagctaataaaagcatctagatttttagttttcatcagtcaaaatttatagcatgtgtaatggaaacttttagtaggacattgactgatgtagataatgcttaacgtttggatttgggaaagatttcaggaattaatcctgtggtaggactctgaggaggaagtcaactgtggactctggagaggggtcttcagaggagtctcgcaactgtggactctggataggggtcttcagaggagtctcgcaactgtggactctggagggrggtcttcagaggagtctcgcaaagcctgtagtggaataggcagcattgttgtttccatggcagcttggaatgtggaggtggaagctgcttccctggggctctaggcaggaataagccttcgaggtttacaggtagagtctcatgctggatgactgggttacaatttagtattcttcaggtagagcaamcaaataatgctttgaaagattcatttatcttataggtcaacagtttttgttttctatttagttgtagtaagattgtgttaataggcaaatatttttgtcagggatgatctgggcaaagtacccatttctggtacctgaattctggccttggaattaagataaatctgtaaagggagaggagagaaagatgaacatgagtttgattcctgacctcagtactcactgggtgtcacaggcaaatttactttttttttgtcttgctcttgcccaggctggagtacagtggcgtgatctttgcttaccgcagcctggacatgctgggctcaactaatcctcccaccccagccttctgagtagctaggatcacaggtgtgtgccaccacacgtgactcatttttgtattttttttttttttttttttgtagaaacagggtctctctatgttgcccagactggtcttgaactcctgggctcaagtgattctcctatcttggcctcccaaagtgctgggattacaggcatgaatcaccatgcacagcccatgggcaaacttttgagtctttttgaaccacccttatctgtactaggacgaaagaaagtgccttgcgtaatgatcttctggaaatgagaacattgttatcctggaggatcactttggtttttcttgtataccagactggatgcgggcagtgtcctacctctggacagtgattggctgatgccctctctcaccccatctgcagtgaagccctggggaaaagtggagccacgggagacccccaccactagaagtttgcttcagggactcttgcttttcctgtcttcttccccttccctttccccacttcatcacatcaatcatagagtttgcctccaggagctagcctctggtgtggttgctgcccagagcctggctgcctggccacttccattgccccattgtcgactggagccttattttactcacttctcagatgtcatacctggatcccacttgttgaagctgtcarcgggggrtattggggctaattccaggggcaaaaagggagctctacagcactacacagttgtactgagaaagctattccatgcagcaaatgcattgttcagggttactcttaacactgcacattatggcgcaggaactaaatttgtgttcaaatgaatgcccttcctacagagaagtggactccaagtttaaatagctgatttccaagttttctttggaaggatttgttaaagcacacactttggatcagttcttaccaccagttccaaagctcaccaagcttaggtggaaggaggcatggctgccctggggatggggaagggatgctttcttaattgtactctgcatgggagaaatgtttctttctcttaaaagcagttttacctgtttaaaaaaygggctcagctcaaggcagatcacttaaggtgggacggagagggtttggagtgtatattgaagaaaaggagagtgcttataaaggtgggggaggaaaaggaggacgtgaaggcccagaagtgctgagaagcacagaagggtggtgttggtgttggcttttcagtcttcattttcctctgtgagtggatccttttagatcagtggtgggatgtcataaacgtttaatcctgagtgacacagaaggtgacacaggcttgcactttatatccaagaggaaccaagcacactcagataggtgcctgccattcttgtttctctaggaaaagttcctaaaggtgctaagaggggtacattttgtctaggttcagcactgggagggaggtgtaagaagctgcttgccttctttttaccttgtacttcactgcgtagacccagcacaggcttgggccacgtgccgagaaagggccgcacagccacaggttggctctcattgagcatggttatgtgttaactacccatatttcctggaaatgccacagaactgaagttggaagcaggtaggagagcctatgtctggayagcaaggggagtcctgggcagctgcacttacatggaccttggggagctggccccgttgttgccttgctgtcatggccactgagattcagctgctattgtgacccaggggacctctgtgtggcacagccttctgttctggaatcccagggaaacagctctggcctgcccgctccttcctatagttccagccacaattggcacctcactccctgcatccagtgcaatctcaggtgtctcctgctgtgcttgccttttccacagtcactctctaggaactactgaaattctcactagaatcagctgtttctctagatatggagcttgttccaaaagaatactttgcttttttgttgatgttctgacctttgatttcagtcctctccaaagataagaaacttgccatttgtagttgaagcatccataaagcatggttctgatgttggtggtgtaatagaattacttgggcaggttgaataactcttggctcttctatgcagttcagtgggcttagggtagaacttggagctggctgtttttagaaacattctgaggtgtttgaaaagtgaggtgttgtggttgagaaccattcatttatggggaccgtagtagtgacttgaaacattttatatatatatatgacatatatatggaaatatatatatttcataaacttttttccttaacatttattcagaatagtaaaaataatgttcactattgaaaaattggaagtataggaggatataaagtttcagggggraaaaaaacaacacccgcaatcccaccactcagaagtaattactgcctgcattatcttttcttcattgttttgactaacttkttactgattgacttcactgcttttcagcaaatgttactggccttgagttggatatggaacttaaattccatctggaatcattcctggatgattctttcagagtcatcaagtactgattgagtacgagggactccagggatgaatgcatctgggggtctagggtgaggaaaatcccagcctcaagagatcttgttagttaaccagcttagcacctcctattatgattgtcatagacatttgtgtgtatattttagttcacatgttaggtgtttttaatggtttcatattattttgagtgatagaatttaggagagtaaatgctagtagaatcagagttcattagtttttgacatgttatatgcaaacacttaaaaaaattcctgtgatgtttgctgaagtttgcatttccagatactcatattccatttctgtgtattctgataggagggttataatatctctgttgttggggctattgctctggagtatttatcgattaacttttgttaatgatatactctgtgaaagcactttattaactggattaaaaaaattaattgtagcacacagtaatgcgaaaatttagttggaatgttgcccttatggacagttatcataggcagaatctaactcttagatgggaacagcaatcatgatctcacaggtctcctacagctctgacaaattctttcaaaattagtgaactgcattctgggtctctactatagaagagtctctgacttcacgggtttcatgttatttctacccaggaatcaggatgcctcacccaaaggcagttttgacaaaattaaagtatattgttggtgagtgtccagaagagagtgaaaactgggatggcctggctcagtgttggtctagcagaaactacctctagtgtaattgtttcctttctccctcctctttgttttctgcctctatttcatttctttcttttcacagttttttcttttctattcctctctctttttttcttttcttaggttaggctttcaggggctggaatgggagcagagttcacctgccaggaagtgagaatggcaggaaagctggaatggcagtccttggctctcctgtggtcgaggtctgattaccttctaggtagtcattgtgtcccaggagatttcagagaacaaacagtggaatcttatttaaatagttctgttaggagcattaatgttgtttgtaggtcatggtccagatggaagctggcccttttctgacaaatacctggaaacatttccttattctactgtacgttaggattttgcaatcattcttttctgatccctagcttactggataatcacaaaggctttttacttcctttgtgctgtaatattgatcatctgtgttggttggtttacagccaacacactgatccggatgcaagccggaaaatctaagggttggcaaatgattcgtcatttgcatagaacagcctaggactcttcagaatgaacttatggaagagagctgtggcataggagcaggagaaggtacaagttagggagcagtttggtattgcacttcatctttarttcagctttgttgcagggatcaagactgcaagttaaagggcaagttagggggcacctctgtctttaatgagatcataggataaaggcttatttatttgtttgtttgtttatttattgagacagggtcttgcttggttactcaggatggagtgcggtggtgcagtcttggcttactgaagccttgacctccccagctcagacaatacttctgcctcagcctcccgagtagctgggaccacagttgtgcactaccatgcccagctaatttttttttttttttgtattttttatagaaacgaggtttcaccatgttgcccaggctggtcttgaattcctgggcccaagcgatccacccacctcggcttcccaaagtgctgaggttacaggcctgagccaccatgcccggccaaggcttactgttcatctcaggtagcgtctgacatcgtgtggacgtacgtgcgttcaaatctcctctctgccagttctcagttctgtgactttcaagtaattattcagcctctctgtgcctcagttttctcttttgtaaagtgaggataatggtactagccataggtgagggttgaaggacacagtgtctggcacataatattaataaatattcattaatgttttactcttggctgtcctgaacattagtctgctttgacctagaattcttttcctgaagacacrctataattttgatgagagtaaacaactaactcttatttgcatgttcaaataaacatgtttttatgaaggtacttggtgttcattaacaaatgctatacttatgattttttttctctgagacataataccaaacttgtacataaaatatttctgatcactgatcttcgctcctataactataaaattatatgtaaaatagctaaaaactactcagtgcactctttagaatatatgtatttctcctatgagaagcatcattgagatctttatttgggaagcaattaggttgcaaattgaaaacagtttccaacatcatcaccaaactgaaaatgccaagttgtctgagtctaatgtccagaagtcattgtggccctgtggtcagtgttctgcattagggatccctgcaacagagctgaattaaagatgaagcacagtaacccaacacctgtgtcaataagggtggataatttctagggttccacaacgggctgtcagtatctttctcattattcccccagcctttgtttcacagcccagtggcttcagtcactatgtccattttcttatctcttaaggactgttcaactcattatatttggttgctttccccatcctaccctaaactgttgttatataagatcttctaaattacctttcacggctaaaccctgcaacttcagtccttgtcttacttgctttgttggcgtgtgttatcactgtcacttttcctcttgattttccctcctctgctggttttccttgtacctctttgtcagtgcattgttctgcccacccttgcaggttagtgtgtcttaacataccattcctgactctctcctactttrttcactttctatgtctacaactgcagtcactcttcccttgtgaatcccaaagccttgtctccagtccagatttgtttcctgagttccagaccctgagttccaaatgcctcaacatttccatgtaggtatttcatagacatctcctactccacatgtccctcccttctatcatctctgtgtttttccccaccctatttcaaagcaggaccacaatccatttgggagccaaagtcagaaatcttggagtcatcctatcgtcctcctttcccctcactcctcatgtcttcaccagcaggtcctgctgattttaccccactagcatagctttggtagcggtgtcatctcttgtcctttccttgcccacatcagttaccttgtcctgcctgggctgttatagtaacctcctacctggtcttctgcttccagtctttttttttttccattcatttgctgccagtgagttttagctggagtgaccatctgatcatgtcagatggtcgctcctcagcttaaactattggtggctctctcttgccctggggggagtgtaaactctccagtgtcccagtgcctttgtgactagcactttcctgcctttgcaccacatgccccctggcttgtgtgtgttttgtaacccagccattttgtacggatagtttcttgaattcaccatatccacattagtcatggttctctggagaaacagaaccagtgggatggatggatatggatatatatatatgtgtgtatatatatatakagagagagagagcgcgctattgattgattgattgattgattgattgatttgaaggaattggttcatgtcattgtgggggctggcaagtctgagatttgcagggctggctggcaagctagagacacaggaaagagttgatgttgcagctccagtccaacatctaggccgcttggaggcagaattagttgttcctcctgggtaatgtctttgagtggatgaagcccactcacattgtagggagtattactcagtgtactgatttaaatgttaatcacatctaaaaaatagccttcagagcaacatctaggcaggtgtttgaccaagtctggttggcatatcctagttagcacacaaaattaactgcctcactgtctttctcaatgttgctcgtgtttgtatctgtccagatttcccccacacctactgtggtgcctactgaccgcctggaaacctgccactcatcctgtgctccactctcagcctgccctgaccttctcaagcagcacagcatttcttagtacagcatttcctttttttgttcctaattggctggtaattgcgtctattacagtattccccctttgctgtgagtattcttaaattgcctaacagaatcagtatgcctcaaggaccaagcttctattgtttasattcaccagtgcttaagcacctgatgagtacccaataattgtgtaatgaggcaccgaatgaatggagacatttgggccaaagggtcggagataagcagtgagaatggaagcagttgagggagaaagcagaggttttggagccatttggaattggaggaatcccattcactgcaccagggtgtggtctctaaccccaggagagcattttagacgcctagggaaagcagctctgcagtcagattgacaggatcggagtaaacctctgagaagytccaaaactcaatcccagatcatacttcttacagtgagtgctggtctaatgatttccatagaatttgcatcgtaatttggtgacagtgtgtaaaagctgtcattatcagacttcagcatactagtygcttccagctaatcacctccatgcaggggagcctagactgaaacattgttgcttttcattattttggagaataatttaggtaraattactgtttaatttttgtatttcctatttaagaaaacctgtttctttacggccctttgactttcattttctctttttcttcccactgacctggyggcttcttaaaggggcagcaccaagtttcctgttgcccctgtgggcagtggccacagattgtcttctttttcttcttttataccccatggcacattctgagagtattttcttttttcgttgttgtttgttttctttttgcttgggactgctataatgtgaatatgatattctcattaattcatttactcatgttgcaaaattcactaaaatycctttgttaaaagaacattttaaggccgggcatggtggctcactccygtaatcccagcactttgggaggccgaggcagtcggatcacgaggtcaggakatkgagaccatcctagctaacacggtgaaaccccgtctctactaaaaatacaaaaaattagccggtygtggtggcgggtgcctgtagtcccagctactctggaggctgaggcaggagaatggtgtgaacccgggaggccgggaggcggagcttgcagtgagccgagattgcgccaccgcactctagcctgggtgacagagcaagactccgtctcaaaaaaaaaaaaacattttagatgacactactttaagtaatgtaatattgtgtttaagggagcttgattaaaataataaaatgcaattgaagtcaaaacagatggataaatcatgatattacaagtgagaactggaattctacgtgaagccaggaataaagctgagaggtaatctttgagccacaattttgtgtttttttgtttatttgtttgagattgggtgttgcttcttgctctgttgcctaggctggagtacagtggctcctgtaacctcaaactcttagattcaagcaatcctcccacctcagtctcctgaggagtacattacttgtggtaatgtactacaggtgtacattaccatgcctggctaattaaaaaatttctgtatagacggggtcttgctgtattccccacgctggttgtgaactcctaatctcaagtgatcttcccacgttggcctccccaaatgcttggattccaggtgtgaaccactgtgcctgagcttgtacatcccttcttagaaggccacagctttattaccattatcaaacagggacatacaagtacaggttgagtatcccttatctgaagtgcttgggagcacaagtgtttcagattttttttttttccgattttgaaatattttcatatacgtagagaaatgtatatacaaatcttgggggtgggacccaagtttaaacatgaaatttgtttatcttcatatataccttaaacacatagcccgaaggtaattttatacaacacattaagtaattttatgtgtgtagcaaagtttgtgtacattgaactgtcagaaagtgaaggtgactctatctgagccacccatgtggacagtctgtagttgtctggcatccccatccttcttgaggctgaatttatatgctacgtataagcaattattgtctcacatctattcacattaaagcacttaacagtaaaaaatatgacatgccattattacagcgagaaaataagtgtcagggtaaccaagcagcacagagcatcaccagacatctgtaccagctgctaaaccacagcaacagcacacagcagcaggctttccgtctccatctgtgaggccttgtgttgaytaaaaggttaccgtacctgtatcttgtgtttggtgggtgaaaagaaacatcagaagtattgaaggaccgggaaattgagtcctctagggataaggaggcgttctgctggatggcttttaaagatgtttcctccggagtcatctgcctcattagccatgatttttgtcttacaagtctttgattttatacactgacaggatttcatgttttattgtgaatgcacactgccctagcccttgaataagcccttcacacattttcaacatgttgtctctgggcactttttctgcagtgttgacatcatcttcattgtcaccattataggttgaatatcccttatctgaaatgcttgggaccagaggggtggaattttccacttctggtgccatgttgacactaaaaaagttttggatttggggacattttggattttcagattagggatgcttaacctgtagttgtataatttatgacatttgaagaaaacggaagtgacccggctgctcaggagcaatattcatgatactgaaatcagagggaatttttttttaaagtttctggtttaagttggtgcccaggaggtgtggtcttttaactggtgtggtcggtgctctgtttgttactggtctgtgacaaggtaagtacagaaaatgagagtaaatttagaagcttttatagcaagttcctgagacatttacatctaatcatttttttttagtaactcaccttcagttgtattttacaaaagaaccagttcatgatggattagaaatttaaaatgaggatgctgacaataactagttctttactgcagacagtttgagaagcactggtttagaggatcctgtgtaaagtgattacgaatatcgtccatatagtaagttctatgttgtcttctcacttaacaggatgcactgttggctgatggcctaatgacagcatgctcttcagccaaactggttctgtaggactcaagtttctaccctctctatcatctggcttctatttagattttgctttatttccaaatttttatttatcttctgggtaggtaatatattcagctaatttaaaatataaagatgcaaatgggtattcaggtgagtcgtcctatgcctgtccgccacctccccatttcctcttctcagaggaccgacctgttgcctgtttactttctttttttgtttttcacacagggtcttgctctgtcgcccaggctggagtacagtggtatgatcgtagctcacttcagccttgacctcctgggctcaagcggtcctccctcctcaacctcccaagtagccagaactcaggcctgaatcactgtgcccagcctatttatttattaagagatttttaaagaaattcctaatgcttagaatctgtgaaaaagcacaggtgttaggttagctcttggaaccttgtgaccctgaataaactttagcctctacaaacctcagtttcataatgtatagaatgaagataattaactctaatttcagggttgttggcacgtaacatagctctcaataaatgatctggtgattgtaatctgaaatactttagaatgcacattaagatatatagaagattcataattacaattgtgcatattaaatatatttaataattatttgggaaagataaaaattaagataatgttctgtactctctgaggtgaatttttaaaaattgcttattttccattgcaagatgtaaaagtgtggtatcatagtatatttgcaaaagtgaatcactactttctggcaaagacagagtgtcttagtccaagaaacaatataaggtgaaaaattttgtaatttacggatgatctgatctaactggtttgtcctaatttttcacttccggtggtcaaagatatcttcatcccttgtttaaaacttagaagggaggcaatttctgtggacttgaggtggagaaagatggggttcctttttgctgtttactgccttgcttttctttcacctgtgcatttccagaggtgagtctgggtgttgtcttggtattcagatgagttcatcgtaatcctcaactttcttctctttcttttcctctttttctctgaggtgttcgctccaactctgcatatgttacaaaaaggggagtaagtgagaaaatggtcaggcttggggtggtgctggggaagcagtgaggaaaggtggtgaggaggtttggaaggcgttttggggcttaggggtacccccacaggtgatcgtgaatactcacttgacaaaccacttgtcagctcatttggagcccgagagcagttgttttcagtcactttgtcctttagacactggcagaataattccagagtccaaattaacttgggtaaaatactgcttgactttttattttctggatcaaaactaatcttttctttactcctttaaaagaaggatgtgtagggctgtttcttggtaggctttggctccagttaactcagttcatccagggctttggggggcactgggaggcttggaggggaatgggaggggcttacttacctttattaaagtgccctgatagttcagttattaacatgcaaagccactaatagcagctgaaacatattgagtgcttatatataccaggccttatgtgtgttaagatgtttgcaagtttaatcttcagaagataccatcactttataagctatttgcagcattattgtaagcacattttgatgtttactatttaaaacagagttgggaggtgtttctcctaccttaccccagtaaaaggcttagttcaaaagcaagttaatgagattatatgtgtttctcccttaaagttaaacaacaaaccacaaacataaaccttcacttaatattgaaaatattattacatgtcatatattttactatataaatattaagttgtattattaaagtattatagtatgttaaaaatatatggcagctctctattacaggcaaacacgtgtcctggtaatagaactggcagctcttggtgtggtgcagagtgaggtgaggggaaattaagcagggcaggccaggaagcaggggagggtcaggtgggagggggtgcagccaggtgtcccagtgtgggcttcacagaaactgctgtctgatgatctctgtccctctagtgaccaatgccaagctgcttacctgatgcttacagttgagagctgtgttctgagctgggtgcagagccagctcgagtccacgtgctgagcgctcaggccaggtgggcggctgaagccagggcggctgcgggaggctggcagggaggtctgatgtgcgggtctcagaatggtgcaaaccttgccaagtctcggggaagtgtcctggagtaggaaccactgagctccctttccgtgaggagccatgggagttggctgcgaaaaggggttgaggtgcaggggctgctgcagaggcacctgcccaggagaggcgggtgggaagcagccaacttaaagcactttgggggtgtttggagcacgtaaatgcagtgtaaaagggatagcacaaagggctatgaagaatcctagtgattatattacagatgtgcttcctccttagaaaatttgtatgtgtgcaagttgatagttaagcaggtttcagtgacccaggctggcattgaactcctgggctcaagtgctcctcctgtctcagtcttctgagtacctgagactgcaggtgcgtgctgccacaccagctcagacctctttaactgaagtcaggctctttcccacaaagaagtgtgagtgcagtttacccatgtgcacacgtgctcacacacgcttacacctgcacacacctccatgtaatcttagaggttcatagcactctggaaacacatgcctgttactctgattaaggtagaatctgtttcatactaacttaagccagtaaagatcatgtttttgttaaaatgttcaaaataacttataatgtaggaattatggaatgagattgttagtctcttcaattgagtttaaacacattatgtacatatttctgaactttaaatgctgtgtaactagaaatcaaaatatctttcattgtaactccttaagtagcatatattgtcccctttaaaactatttaatctaaaatcttttaagtctatatgctgtcctattcccaaaatgattcaaggcagccttatttatttaaactttttattaaggaagttttcaaatatatactgaagtaaaaatcatagtatagtgagcccccacatacccatcctctaattgtaattattaactcatagacaaatttatttcatatgtagctctatgtttccgtgatccccttccaaattttttacagtaaattctggtcactgtatatgatttcagctgtatttattatattatatatctttaattggctctttgaaaaagtaactacacaacctttattgtatttactaagttaataatagtttgttaacacaattagatgtctatcaatgttcagatttcactaattgtctcataattatttttaataatttgtttgaatcagggtccgaataaggtgatacattaaattggtcaatgtctcttagcctgtctttaattacctcctttcccccttcyttcctttccttcctttctcctatttttcttccctccccatctctttctctcttctccctctctactgtctctttctccctccttcccccactgatatggtttggctgtatctctacccaaatctcatctcgaattatagctcccattactcccacgtgttgtgggaaggacccggtgggagatcactgagtcatgggggtggttgcccccatgctgttcttgtggtagtgagtgagtctcatgagatctgatggttttataaagggaaacccttttgcttggctctcatttttccttttgcyttctgccatgattgtgagacctccccagccatgtggaactgtgagttcattaaacctctttttcttcataaattacccagtctgagttatgtctttatcagcagcttgaaaacggactaataacatcctctctctgtctctttttctstgtgtctctatctctgtatgtgtctctttctcccttccccatcctctcttataatctgtttgttgaggacactgagccatttgctgtgttttgtttcttccatagtctgaatttggttatattcccaaagtgttcttttatccctttatttcctgtaaattgatgtttagatttaaagacttaatcagattcagtcttgatttttcttgatgtggggtggagacaaaagtacttcacagttggtcttaacgtacttacattaagaagcatgtgatgtcttggttttcttcatgtaatatcagcaaccattgaagatcattctcaagattatccattatttcattagaagttgcaaagttgtgataatctaattctgtagttttttcttcagtgattagtggaatacttttaaaaagagaagctcctgctggatatggtggctcttgcctgtaatcccagcactttgggaggctgaggagggaggatcacttgaggctatgaattcaagactagcccaaccaacatagtgagaccttgtctcttaaaagaaagaaagaaaatttatgtaaaaaaagaagctcataagtgtaatcattccttggtatccatgaaggatagattccaggaccctcgcagacaccagcatccacagatgctcaagtcccttaaataaaatggcataatatttgcatgtaacctgcacacattctgctatgtatgataaatcatacttagattacttataatatctaatacaatgaaaatgctatgtaaatagttgttatactgtattgtttagggaataatgacaataaaggtctgtacatgttcattacaggtgyaaaaccatccattttttttccctcatatttttgatctgcagttggttgaatcctcaatgaggaaccgatggatataggggccaactgtattcggttactctgaggtatagaaaaggcaaaataaatgatcagttatttttctttaccagtttttaatgacttggtttcataccaatttccaatggtgactaattttgtttttagtaccattatgaattcatggaatgaaatattgttgatgtgtgtcagttgaagcttgttgtcctattgttgaagttctagttgtcctaatctgtgaacctttccatttggcctctgtgtccttttgatacaggcttgatagtctttgcttcattgctttctggtatgacaagaggattcatacatttttcctgcaccagatctggaatcagctctttttctaaggagcccaaaggcaggtttattttaattttgaaaatatttaaatgaaaaattaacactccgtaggtcatcttgacgttgctgctaaagtacttgttttagttgttgcctcaaagtatgtaaggaacattaccttgttcactttttcatttaatcagaaactctgaagagtgttagtttaccccttctcccccttaagcttgaattctagccttcgtcctcctattctcatagaccccactgtgmtttcttctggtcctgctgtgtcctctaatgctcgctgattggtattctccttatgtgggttagtttttaaagggtgctcttcctagctgccctrcactgaagcacggcccagcaatctgctctgggactacccttgttttatttttttactccgtatgtgcccctccttcaccccaarctatagtagaactgttttgtgtacctttatgacaaaatcaatttgtattttatttgctctcctttttcaaagtgagtttacatcaaatatcccatttaattcctacaactgctttgtcaagaccattgggtctgtattgttattttcatgtcacaaatgaaaaagattgaaacccaaagagcttaatgggcctaaggtcccaccattagtaaatgacagattaatgagcagctggaattagaatttagagctgcagagtccacccccactgccaggtttcaccaactaccataaatcaagggattccttgctacgtattttgagggactcttgagtcaggacagtctaaaaaggcttccctcagtgatatttgccacctgtggtgagcttttgctgtggattacagttttatgatttctaatactgtggacagagatcagcagtgagagcccacgccccctttattgaattcaaaaatactgggacaaaaataatgtacagtagggggctaattttgatttccctgtccctaaggttcctaagccacctagaaagggagtaaccttaggggatacaagttaagtaaaagaatgccatgggcatacagaagaaatgataagaaaaggtgatatttttctttttaaagacttaaactgattattttttacaggagtaaccattcagaaaatactgcccttttaagctttccagaggatgacacacgctcttatggtttatagtcagaatccatgtcgagctgcacatgtgaaaaatgaatgtcatgttgttttcaagtagtaagctcaatgtttctaawttagttttttttttttttttttttttacaagttaatctaattttggtataagtggaaaagttgataattaaagaaagcaggtcctttctaacacaaagaccactaaggatgttttctccagcaattcttaataactttatagtttttattcccttgcaaaacatgggtttggggctgtgcagttagagaatatgtattgtttaagtgtaaattttaagcacataaggaatatcctataacttgtattattatctaaaaattgttgtaatgtttttgaggttttgtcctgttgatttttttgttgctctttctttttaggaaaaattctttgaaatgttggtcctgcaatgctcgctgcttgaagcagtgttttgtctaagcttgggtggattctgaattgttaacatgtctgtatgcttgcctgcttaagtttttgacaaagaccttcttgaactcttaactttcccaagtagaaaataacagtagagccactgcaggagttagttgagatattgctattttataattgaattcatatgttaaaagctccaggtttgaagtagtataacttttctttatcatatcacaaaatatcacatctacttggcttcttaatcaattgaattacagagaaatgtaacacaggttctaaattaaaaacaaataggtactatgacattaaaattccctgcacagttatactatatttacttacttgaatgaactgtaattaaaaagagatgggttaaattattaccaattgttgaaggtttagttaaattttaggtgacgaaactgkgaaaagggataggaaagtcatatttttggaaggcttttatgtataatgtcttacaagagtacctagttcctactttggctcacctaaaagactggaagtcgtaaacttggtaacattgttttcaaattgaataaatatttcatgggaatttagaattctgggctcattctcactaatgtctgttttctgaccctacggcatagattatttaaaaactactaacatgaaatacgtattttttcctgccttacgtgttctttgggagttaaaaaattttttctagttatttttggtggggaagatcttgctacaaagaggagtgagactatttgagcatttcaaatagacctatttgagcatccttttggtttattttgaacatcttttgatgtagggtctattttttaaaaaaacatatagggcagatgttactattaattagtcttatctaaagtttaacatgcaaattagagaattgwaggagaaagtaattgaaagtgttatacacattaaaaataagcagatgtcatttggaaaacaaatagatacttgagattattttattacttcttcagcaggtatttgctgaacacccactatgttcaggtgggaatgaacgtggtagacatggccccagacgtcaagtacgtgtgtaaggggcgttagtaatgcacatccccaaaaaacattcctcttactcttctagtgtggtggcagaggaaagacagaagtaaacaaaccagagctgttttgggtaatcactgtgttagtccgttctcacactgctataaagagctacctgagactgggtaatttatgaagaaaaagaggtttaattgactcacagttatgcaggctgtacagggagtatgcctgggaggctgcaggaaacttgcaatcatggtggaagggcgaaggagaagcaagcacatcttcacatggcatcagaagaaacagtgaagggagaagtgccacacacttttaaaccatcagatctcatgataactcattatcacgagaacagaaagggggacatccgcccccatgatccaattatctcccaccaggtccctccctcagtgctgggaattacaattcaacatgagatttggatggggacacagagccaaaccatgttagtcactaagtgccgtgaaagggatgaactacatgtggtgtgatagggcagagggtgggtgtagaccctccaggtgccgtgcccagagatgcgggttcaggaggagacaccactgcccatggcccacctctgtctgtctcttaccccacsttgggagtaagcagacctttcctgggagcccctagctgatttcctttcccaccttgggagtaagcagacctttcctggaagcccctagctgatttcctttcctgtctcattggtctgaaatgaaccccatactcatgtcttagcccrtccattctcgaggcactcctggggctgcgttacaccaggaaaggatgggtaagcacattggggattttgttagataacttggtagttaacaaaccctgaccactacaggttttcttaataataggtaaaatatattgagcacttactatttgccaggctaagtgttctaagtattttatgtgcattatgccatttaatccttttaacagtgtgctaaggtaggtgcagaaactgaggcttatggagatgaacttggcctgccttgtgtggtggacctgggatgctaactgggcactctggtttcagagcttgcatccttaaaatgcaatctgtggaaagtaggaaatagatttttgaaatattctgtacaaatttgttgattataataaaggcactcaggagctaaattggttactttcagtagctagaaaatttatttatatgaagctttgttttctctagtgtagaatagtgattatctttttcactaattacatacaacagaatatatcacctttctatatgttaaggctgtcttgtttacggatcatttcacgctaggttttgggtcctttgggtaaggagtgtgtgttctatcttcctgtgcctggcagccatggtagtgtgagctgggctctgttagcctcttggtttatctgaaacagcttaagaatctgtcttaagcctagcattaaacattgtggtaaatcgtattagaaccccsaagatagattttcctcccaattttaaaattattttttcttacgtgtccttttttagggccacttactggcttctagaggttttataaatgcacgtttgataatgctaaacataggtaaaataagcagaagttttctagaattcagtccakagagagagagagagagagaacgtgtgtgtgtgtgtgtgtgtgtgtgtgtgtgtgtatgtgtatgtgtatgtatgtgtattagagatacattacatgcaaggtttgacttggcacttgaaaactgacagcaggtgtgtgagtacccactgtggtcaaggcatcttggctaacacctgcctrttgtgcgggactactccccctgcagggggaaggtgagctagtcagccagttctggcatttgccattgagctgaggctgcttaaaacatcagatctgcagagtmcattgtgttcagtggcccagacttttttatttccttaactagtagcctctacccccacagtatgtactaatttcaggttcactgtggggcaaccagtgctcttattttttcaaccaagtgtattttgggttcccatcatttaaaataaaggatattttaacaccagaatagttaggaagtaatctcaaaagatgttataagaagtctgattatggagtcatgggcttatctaataaatcttgatttctttttttattttgcaatgccctgctgaacacttaaccatgtgctgttaacatgaaggaggtggggatccaaaacagttttcttgaagtgatggaagaggtttctaaaactgagcttgagaattaagtttggtaatattcttgctcttatgcttggacaggacagcttgggtcagacacgtagttgttacctgtgctactgatgagaacattagattgcctaatagtttttttttttttttttaatgtagcccactgtaccggccttagaattcagttagtgataatcgtttagcaaaatgtgtttaacttgaagaaaatagtaaaacatgctctttctaaaattatggcttctcaaattaccacatcttgggcaagctattttctaaagtgcttttactttccttcgggtatttcagctacattgagctcttccacagtttgggctgccataaatctatgggaaagtgttttgaataattatgcagacagtttcttagaagcatctaasatatgtgggcctccatcagtaccacctctttgtggccctgcaagctgtgggaaaattgtctgtacagcttgtatataatactctacaattttcctgtgactgtaaaaagtatggactggcgatcagaaatagtagcttctgtttttagctttgctatgatttgatatttatccttaggtgagttgcttagcctttctttgtgacaattgtgtcatctgtaaaacggaatattgaatgtagataagctaactgcactgttcagctgtgatgcagctggtaacagaacaagtctcctgaaaatgatggataaatcttttctaatctaaactgctccagcagcagttttgggtgatggcgtaaacttgagggtagaagccagatatagaaggaggctacctaggtcattgattatygttgaccccgtaatcagcagttcttgactggctaccatcagacttctcytacatgatgtgtgttgggttctaacttatgcrcagcttcacctaatcctaacagagtaaagcttatgttttcatgaccttataagtaaaacttttctaatctgggaagggaatacctgtctgccttttccacctcatctttcctgactgggtttttcatatgcctggaaaaagctactaacttggcaaacatatatatgcttaatttcttggttctcaagatcctgttttagagaaatcttctcaatattttcctgttgagaggaatttactgtgtcccttagttattaagaaaattgcctgtggccatgttaaccttacagtcttccctgcagaaacttcaaatgggcaggactgtaatttccagaggggaaggggtgatctaaaatgagaatcacttttatttttacgtaacaataggcgaattgctcttaggggtagtattcattccttcaacaaatatttaytgagcatctgctaggtgctaggaacaaaaccgtcctaggaacaatgcagacaagttaatgggcaatttgaatccaatacagattttgtaagtttgattacaattctaaactctaatgttataagctcagtagtttgttgtcattgtggcatggacaaccagttagtcttcacttcctccttaaaaatacaatccctatattatttggggtgaacactgagcttaattaaatgatgacattttccagcttccttagcagtaaatgtgactgtgattcaattctggccaatgaacataagtgacagtgctttgtggaacttctggaaagcctgcttaaaggaagttgagagttgggagacatgtcccctgtgcctttaccttctgcttttctgtttcttggtacatggatgtgatgtctggagctccagcagcagttttcattggtgacataaacttgagggtagaagccagatatagaaggaggctacctaggtcattgattattgttgaccccgtaatcagcagttcttgactggctaccatcagacttcttttacatgatgtgtgttggattctaacttatgtgcagcttcacctaatcctaatagagtaaagcttatgttttcatgaccttataagtaaaacttatgttttctctgacctcatggcatggctgtgaataccaccactaagacttctgggagtgtggttttcagtagttcacccctgtgcttattctcccttcatggctctgatggactgctggagtaatttcagataacaggtaaggacatcctcagactaaggaatatcatctgtactgttcctaaacaaatatacctggaaatactttaaagcagtggttcccatagtgtttcctcagatcagcaataccggcatcaatctgggaatttgtttggaatcttaggcccacattttgacctaccaagccagagctctgaggggtggggcccagcagtctgaatgagtgacttggatgcagcctaaagtttaagaaccactgctatatggtcttctgcatcttgatactcaaagtggtatatgaatatgaggttggtcaggtgacagtgatggttgagtttgacaaagttgatgaaaataaccacttggactctgttcaacttgtttcctcttatttactactgaatggacaaatgaatacatcaaaagatgcatgaattcatgcaagagacaagtagacctatgaaggagtgggcataggtcttcagtgcctcctagagcctcccagaggcacccctggagtctgaccacactccacttgggttgagaacccagaagcatccgatattaaagataacaacactttgcttgaatgggaaaactcatttcagagttggatgtccgggcttttttttttcttgagatggagttttgctcttgttgcccaggttggagtgcaatggtgtgatcttggctcaccacaacctctgcctcccgggttcaagcgattctcctgcctcagcctcctgagtagctgggattacaggcatgtgccaccacgcccggctaattttgtatttttagtagagacatgatttctccatgttggtcaggctggtctcgaactcctgaccttgggtgatctgcccgccttggcctcccaaagcgctgagattacaggtgtgagccactgcacccagccgtctgtgcttttatactgccaccaaactgttacagtgaaaaatggacaagttgcttgaaaaaggacaaccagcctaaactgacttatcatgaaacagaacacacgtgtggtagcatatctattaaagaaattgatatcattatcaaaaacctctctgtcacacttacacacaaaagcctacaacacccccctccccccacacacacacaccctgaaggcttggactgaagagtgaaaaagagtccaacttgtagcaatctgtgggggtagatggaagagatggaagcagagatgcagtggctccagcawaagaacttctttggtaacatctctgcatatcgcaagggctgcattgtgcaggacttgtaagaatgtaggcatttggatgtcattctaattggaatcggaaacaaatgggagctattaaatagaaaagaattaggatctgatttgtgatgtaatcctcattctggcagctttatagaagctactccagagggccacgctggaagaagggagaccagttaggaggctgttagaatagtctggacacaaggacagtgtgctttggattagaggacatggtaagaaggcggcaggatgtgtgggatttgctacaggattgaacttaaggagatgaacttttcaatgggggagttttatatgcaactaatggtgaacttaggtagaggatggggaatagtagcatttaaaagcaaagaacatacagctctgggttgattgcttcagctttgcaactatccactgataacttggctttaaccaagttatgctgtatcttcaaaattttcatttgtaaaatggtgttattaacatccacctttgggattgctgagagaattaagtgagaaaaactctgttaaagggtttaggacaatatccagcgacagcaaatgctcaataaatgtcataattatttttctttgtaaaactttagacgtaaaaaaaattcaatattagaaaaagttcttcatcaaaccacacatagtatagattgacttttgttacagaaacaaatggtattcataaattttagcattatggtaattatgtaggagataacagaaaaatggcccctaacacaagcatgggcttaaaaaagagtgctgtggtcaagttgtggagctaaatagtttgccaccttttaccagtaggcgaaagggacattatatgatgatccttggtcttgtaaactggtcaaaaccatcagtgataaaggtaacctgtccactagggaagtgctggccaataaaattttctgcaatgatgggaatgctccgttctgcaccatctgaaataacagcctctagccacgtgtagttattgagcacttgaaatatgactgatgcaattgcacaactgaatttctaattttatttcattttaattgatttaagtagccacttgtggttagtagctactgtattgaatagcacagctctggaaggtgagcttgtaaatgcagggacttcgtatcataacactgtccctacatgcctaaagcagcatttggcacatgagcaatatttggtaaatattagttgaatgagtgaaagggtatcctttacacataagggatgtatgcaggaagatagtaaatggaatcattgctatttaattgttgcattacagtagtagagggatgagagagcattggacaagatttgggggaagaagggagatgacaaagtgggcaggagcacttcttggtaaaaaaattaactctacctgtggaaaggcaaacataaagagggccgggaaaatgacccgatcacagaccagcccacagctgtggtgattgatgatgtatacttggcatgtagagaaaatggtgtgaatcttaaccctatccctaaccctatcaaaataaagacaactaggatgctagttttgtagtttcctgaaataagtttccytaagaatgttagtcacccaaattaagaaaatttgtaaagtcaggttttccagagatacctctgcttagcttcaagggaaatcacaccctcccaccctcaattaaggaaaacgttaaatgctgatgtatgttggtctacaataatctttagtcttacaaaatgcctttttccatgtgaaatcgtgtgatcatttacagttttcattccctgtgctattgcgatgatgtttcacctgccttcctcccagcctacagcaaggttttctactaaaatgtacccacctgtgaagaaaacctggtagagttattggaatcagcgtaaactacttatatttctttggtataccagttagattctattttaaaaacacatttttttttcgtagygttaaccactgtctccaaatcattacagaaaacattgttttaaaagttatttaaaaaatctggacacataaaaaaaaaatcatagcctaaatgtcacaccagtattcacactgtgcttccacagtgggcctactgtactgtccaaagaaacttggcattttgtctaagaataagtcaataacaggaactccatcataaatgccctggtttcctgctaatacaagactctcagctgctgactctcactaggcaggagcatacaagtttaaataacagctggcagcaaagcccgacagggaaggccgtattatttttaaattggagaattgtttttcataagtttcttacatattttttttccaattttaccatcatttttcatttcaaaattgaataaatgtcctcaaagtgacaggaaaaactacattgaatcaataaacgttaactaccccccaaccccccagtggcctaaagtaactccagtacataagcatcggccttttattaattggacaagccttcaaaaatgaggaaaagtaatttatgttggcaatttgattaacaggcttcctatgaacacacattcctgtaaagttaacaagtatgagccattcaagacacaccaagaacggttcttagaaaccttgcaaatgaaaatgtggcaggatacttctggccaaagggggtgcacagcccagacccaggcgcctttattgcttgattcagggtgactttctgcagaccctgtcaagtgtaagatgccatgactgcttctttaggaccaagctcacaatctggaaccttctttgtttccgtctctgctccatcccctctctccactgtggtccagaaccagggtcatagcttatctttattgcagcaggaggcatttcaaggcagaaacagcccattctatccaggtaaaccacaacagacgtggcatcatgtcagattcaatagctctttcatgcagtagctcccttcccttgccaggacataggccacgaggccagtctctgagcctatgagctaccgtgactgttcccaccttactcagtttccatcaattaactccattctcttccatcagcctgtcccctcctctgcaactgaggcacggagagaattaagaggttgtcaaataagcatttgagttgaaaccagacatgtaagcatatcaatgtcagagaagattgtatctgtaaaaaaaaaaaaaaagaaagaaattggcagcagtcttactcgactgtgcttactcgactgtgcagtgaggacatgctgccctcactgcctagatggtttcatctcggatgtgcatgtggtgttctgtcttcatccttcgcctctctgctaacatgctgccctcactgcctagatggtttcatctcggatgtccatgtggtgytctstcttcatccttcacctctctgctaacatgctgccctcactgcctagatggttacatctcggatgyccatgtggtgctctctcttcatccttcacctctctgctaacatgctgccctcactgcctagatggttacatctcggatgtgcatgtggtgctctctcttcatccttcacctctctgctaacgcgctgccctcactgcctagatggtttcatctcggatgcccatgtggtgctctctcttcatccttcacctctctgctaacatgctgccctcactgcctagatggtttcatctcggatgtccatgtggtgctctgtcttcatccttcacctctctgctaacatgctgccctcactgcctagatggtttcatctcggatgcccatgtggtgctctctcttcatccttcrcctctctgctaacatgctgccctcactgcctagatggtttcatctcggatgtccatgtggtgttctgtcttcatccttcacctctctgctaacatgctgccctcactgcctagatggtttcatctcggatgcccatgtggtgctctctcttcatccttcacctctctgctaacatgctgccctcactgcctagatggtttcatctcagatgtgcatgtggtgctctctcttcatccttcacctctctgcwaacatgctgccctcactgcctagatggtttcatctcagatgtgcatgtggtgctctctcttcatccttcacctctctgctaacatgctgccctcactgcctagatggtttcatctcggatgcgcatgtggtgttctgtcttcatccttcacctctctgctaacatgctgccctcactgcctagatggttgttacatctcggatgtccatgtggtgctctctcttcatccytcacctctctgctaacatgctgccctcactgcctagatggtttcatctcggatgctcatgtggtgctctctcttcatctttcacccctctgctaacatgctgccctcactgcctagatggtttcatctcggatgcccatgtggtgctctgtcttcatccttcacgtctctgctaacatgctgccctcactgcctagattggttcatctcggatgcccatgtggtgctctgtcttcatccttcatctctctgctaacatgctgccctcactgcctagatggttacatttcggatgcccatttggtgctctctcttcatccttcacctctctgctaacatgctgccctcactgcctagatggttacatctcggatgcccatttggtgctctgtcttcatccttcacctctctgctaacatgctgccctcactgcctagatggttacatctcggatgtccatgtggtgctctctcttcatccttcacctctctgctaacatgctgccctcactgcctagatggtttcatctcggatgtgcatgtggtgttctgtcttcatccttcgcctctctgctaacatgctgccctcactgcctagatggttacatctcggatgtccatgtggtgctctctcttcatccttcacctctctgctaacatgatgccctcactgcctagttggttacatctcggatgtccatgtggtgctctctcttcatccttcacctctctgctaacatgctgccctcactgcctggatggttacatctcggatgtccatgtggtgttctgtcttcatccttcacctctctgctaacatgctgccctcactgcctagattgtttcatctcggatgtgcatgtggtgttctgtcttcatccttcgcctctctgctaacatgtcatcttctactgaggctcccatcccttccactctcttacactgctgtgttttttcctatagcacttttcatcacctggcacatgtatttgtttctcgtctgtgtcccttgtctacagaataaacttcctcagtgtagagtgttctgtttactgctggagtctctgctgcctagaataatatctgacacagtggatgtgcaataaatatttgtttaataaatgaatgaatatattctagagctatttgtacaaggcagagatttccagatcacagtgttcatatgtataacatacaatccygtaatgtttctaatttgctatggtatggaatagcatttaccatatatagcttaggtttgtaggctttatcttttagaaatccttaattcttagacttctcactcatttatttatttttgataaatattcctgtatctgctctgtacctggtactatttctaggtactgctgaaaagtggttaacaagcagacaagtgttctgcttttaagttgatacttgaatgaagaagactgaaataaaggaagatactaataatttcaacaaatgataaaaarccatgaaaatcatcttaggaatagagattgaaatgagcttggggcattgcattaagttgttggtaagaaggccttcagaggagctgaaaatggagaggaggaagggtttcaggcagtggaaaagatggcgccaaggtcctgagtaggctgtattctagaacacagagaaagtggcagtacatttaggggagggagcagtgagtggggagagcagcgaggacagagagtggaggcatttgaaggcagaaagtaaatggattgtgtaggccattgtatcaggtttatattttattccattagaaatgggaagccartggaatgacatttgatttgtattttataaagatttctggctgcctgtgagttgttktgtcagagaattaatttattttgggttcctgttaaggtccaacagagatatttgagtataatactttgttgccatccataaaactaaatattttcattaaatggagtttaggaaaatcttgattaatgagtaaacaccaccatgtattgtggacatgaagttaaaaacaaaaggtaaattagtctaaatatttataccattatgtccaataagaaatgaataatgttgaatatgaagtttttwatatgaattagggaattacattttgaaatattttaggataggaaaatgggtagatgattagagattcagctttatgtataaagatagttgtatgttctctttaggttagcaatggcaaacacttgatataaggacatcataagcaaagctgtaagccattaccaagcctgaattattgactttatgaatggtctgttttctacctgttctcattctaaccaattgtggtcttagagctaggctagagacacctctgtagatagactagtataattcttctggtttaggatccacaattgctaccctttctattccagacaccatgcatttcaaaatgcttagtttttcttgaacttgttgagaagtctgatgtggtatagaagtttcagcagttctaatattttccagtttcgcacaggcaaacataattttctgattttgtaaaatacctcgtagcagtaaaatgaaatttttcttattcatttcttctctgcagcattacttttctttattgcttaattctcttgtttttttttttttgtttatttgtttcttatccagtgatctctggaacatgattaaraactcatataaacttggaccttttggtcattgaagagtcttagcatactttgacattttagaaaagaaaaacagaattgaaggggacacaaggtacattggtttatgggawgttcctcaaaccctttctcaaatattttggatgtatttcatttcctaacaaatatttttttcctattttgaggcaggaagtgaggatatgcctgttgacaggcagccccttcttcaggaattacatgtatctgtataatgtgtacaggcatatgcatctgtgtatacatagccagatttgtcatcatggccaggaaattaccctttagctcctgctgcaagttctgcattcttcgttacttttctcattggctggtcctggtctcaggctcccttccagtggctgcttattttagtaaatttcacacactttcycatcattcgttcacagtaagcctgtggcacgatgtgcatcatttccattttatagatggggataggaatgatcagagaagttactttgtacagtgtctccccgatggtaaatgatagagatgggatttggggagacctggctttctgactctaatgcacgcatcctccactggtacctgtgttgtttctcaataacagcttgaggaaatgaatgacagaaagtaaaatctgccttttagccctgcagaatgggctcctctgtgagaacgtggcttccatgagaggggtgtcttcctttgccatccctacttgtgccattgtttctctcacaaggcrgctgtgtcctgttagcacccagaattaggaagtgtggaaaattaaagccatattatcctgttaaagtgtttcagggaaatgggatactttgatttgcatggaggaaaatgccaagcccatgtgtcactttttgatttgttcacagcaaagccagagcttctctagtgcagtgctcccttgtgaaggcaaatggtgcagggccaggcaggcccttttacgggaaatgtcatcatttttatagacctggcccttgacgtggtcaggtttagcaacttacttgggaccacacaggcagtggagctggagaaacagctggcaacaaagcctcctccttccagccaaatggtctttccctgaaactatctaccttcctcaggaaactagtcttttaatagcatctaccctccaccaagaacctgggcgggaggaggaatagaggcatcctttgagagcctccttcccactcagtgtttccacttggagagctgggcggccttgagtcgcttggatgagtcagggacatgaagcgctttgccttatggtgcgggagagcctctggcatcacctcctactaaagccagtaatgggarcagttatcataatggatgtgtcagtttgctaatgacattatttaatactgactttattcgttcttcacataagacattattgaaacttaaattgaggaagttgcttctcctaggaagggtstgggactgctgctggacacagaggtttaacttgcaacccttttactagttaaaaggcttaaattttcactggctttttgacaagtatccgtttagaatcaagtcatcaccaccattatcattagaattgtcatggctcctgtctaatgcactccagctgttaggctagtaagcttgaagataaaggtatgctttggacacattctgctttgataaaaatcttgatcaccccaagagtccctaatttgaagtcagagtcacaaagattggtgttctgcagctttcctcttggtaacagagtgtacttttgtttaactttttttcctgtgttttttaaccaacatctctgagcacctattactaccttgcttgacagttaagacagcaacctttaaaagttaatgtggtctgtcctgaactgtccagaactaggcaagaggtaaagaaaccacaagcaaacctgaggcatgatctgcagtttatttgaatttgttttggattctatgtttactgtaggcatcaaacactgtagaaaaaaacataagaaaacagttctagagacctgctatggtagatttcaggagtgccttctgtacttagcaacagtgaactttttaagtgcttccaagtagacttgtgccttgtgacccacactattactacattttggtaaaagtaaactctttctggtcttggcaccaaaagtaaaacttgtagagtctaattaaggttgtgtgcatagcactaggtgtttatcagtgcagtgagggaaataaaccaccaggtggcycaagtatatagcatctgcgtgttttagtccttgataattatagttttgcagttgctttgtacttcagggagaccatttaatataaaccattgtaataatttatctagttttttacacaatcttagaatgctaaagtagaagattgactgttttgaactgttactaatgtttgtaagtttttgggcacaaacttatgttttgcttaataaaataaaaacttagacattatttgtgttttggctgaaatcagtccccarttgtyatcttgggatgttatgattatttacttatatatgtatatatttattttggcatatactctccacagttgcaaatgaaattaatagatagatgtttaacttcactgttgaaatttaaactgtcagcatkatttattatttatatatttatttttattaactttttttttttttttggtagagacaaggtctttcttatgttgcccagggtggtttcaaactcctggtatcaagccagccttctggtttggcctcccaaagagctggggttataggcatgagctgccatacccaaccttgttgccatggtttacattgtcttattttataccttcattctttagaaaaaaagaaggacacataatacctaagaaatcaacatgtaatttttatggacttaattatttccaaagaaggcttttaaaaacttactttatcccctgaaaaggaagttgctttgtagctttccacttacattaggataaaaagaataaaatgtcaaagtatttgctttactttagaatatatatgcagcaaagttcaagaaaattatcacagttctcagcagaccaaggcatagcatctcagttttggttctcatactttttatatttgaatcacagagttcttggaatagatttttttttttttggcctgatagccttaaggaataatggaaaataaaacacttcttcaaaaatgtaacgtctaatttcctatttgtctaggtctttttgcttcagaatttttgaacagaatcattaagtactatcgcttctacagaagaagaaaaaggaaaagacagtgaaattcaaatccgttttttctttatactaagtctggttaaagcttttactggagaaaagatgcaagcttttaagcatgtgttttaaaattactatgattttacccttgctaacttcatgtgtgtataattacctcagaaaggaaacaaagatttttattgatattatttaaaataatgttttctttttctttttagcaaagtacaggctgataattccaaaggctgtttaaggggtaattgtggctgacagagcagcattcacggaacatcactactgtgcttggctggaacagtgtcactgtgtctgaaagtcttgataatgttcagttgactgtactaattgtcctgttttatgcatggctagccaagtggtaaccaagagttttaaacaatggatctttattaaggtattaatttttgtcaaggaaactgacgtgatttgaaagaatgtttactgtgtgtgacacgtgtggaagaaattgtttgtgttttcccctcttccatgtttaggaaataaaataaccaaaaagtgtgtgcgtgtagcactttttaaccttaattgtcttttatttatattggtatcttgatataaaaattgaaatttgttataatgataaagaaattagagatgtgaaacatgattgataaagtaaggaagtaaaattggtaaaaatgcttaaagatataatttagtgttataatacttttagctgaaatgtttatttattgggtttaaacaactatatatgtatgtgtgtatgtttaaaatatattccatgaggaatcgacctttaagaatcatgaagcatattttccccaactttcttcactcttctttacaagtcttaattttttgtattgtgaatattataatgccatttctctctgctttaatgttcttttaaagaacattcaaagattacagtgatttaaaaaattaaccttgaactcragaagaactcaatggagaatacagaagcaccttaatcaatagatgccttttcctcccctcacacacacacacagtccaaactgctgacagagctgagattaagccaggatttcctgaggcatgggaactacctaacttgacttacatcatgctgaattgagaaagacacatcatatttataatgcttctttttttttwaaaaaaaatagcatttttggctggacgcggtggctcacgcctgtaatccagcactttgggaggccgagcgggtggatcatgaggtcaggagatggagaccatcctggctaacatggtgaaaccccatctctactaaaaatacaaaaaattagctgggcgtggtggtggatgcctgtagtyccacctacttgggaggctgaggcaggagaatggcgtgaacctgggaggtagagcttgcagtgagccgagatcgcgccactgcactccagcctggcaacagagcgagactccatctcaaaaaaaaaaaaaaaaaaaaaatagcattttcactaagcttccactattccaggaatccatctggctatttcatgtgtatttgccacctttacaatcctaaaatgaaatttgtgaataacatatcctaattacacatgttatttaaaaaaatccatataccctttttatgacagtgaaaaaggaaatgaaaagcaagttgtttgccaggagaacttgcatctcagtattcagatgtggagaccctgctgcctagggtgtggaggaactgctcagaggccacacyttgggagcatccctgctgtggcagctgcagatgcagactgtggcacgtggatggcagtggagactcagcaagcactggtggtgtgctgttggtgtcattgtttcttgaaatggtcaaatttggttaaatttggaataaaatggtagtcttcctgtttaacacatactttgtaacacatacgttgtgcctatgtaataacttgagtgaggttttacgctcagacaattataaacaggttttttacccacgtgaatattcagcaggacttgaggaagttgtgaggaatgcagaagtctttggccgtgcagactgtcctgggtgtcttaggacctctagtgttcctggtttccacccactcagtgccagtagcatcccccagtgattgtgacaactgaaacgttcacaaattcccaaaaccctccttagggatcctgggatgagggctatcagagccaatggttaagccctagcacatttctctgccactttctggaaatagtgttacaggatctttggggtgtcatttttctggttggaaagctgtggccagtggtgtctttgtccaacttttgtttgggcctgctgggcttgttcctcccacttggcctggcaggctgcacttagctcatgstaccggcctggatcccacacctccaagggagactgagtcaggcgtggactggcaagacgtgtgtgagtgagtgcggggttgggctactgcacagtcagacatgctggctgctgctgtggggctgtcagctctaggtgccagcatgggcactggctctctgtgaggctgcggctggaccaggtgcrctgcagacagcttccccagctggcaccaaggaatgcaatggctcccagaagcttggagatgccaggaaccatggggccccaaagaaggagtcacagccctggcttggggagctcccaggtcagggctccttgaaggaccacagctgttctcccctcttcacctgcaatttgatgagtgaggagcatgtttcagccctgtgtgtgttacagctcttttagccttgccatttagtgggtcctgagttcttgtcttgtgaccaggaagactgaggtacgcagacaagtggagggtgagcaaggcaaagaggagctttattgagtaatagaacagctcagagaagacccacagtgggcagctcctctccatagccagggtgtcccgatgagtgttcagctcctagcagagagggtagctcctctctgcagctggtcatcccaacaagtgttcagctgtcagcagagagggtagctcctgtagtctgcagctgtcggcacagaggaggccctagagtgggtggcttctctctgtaggcagcttgtcccattgtctctgcagctcttagcagagagartagctcctctctgcatctggtcatctcatcttctccccatcccctgccctgctctagctgagcccggggcttttatgggcctcagagtggaggaagtgtgtgccagttggtccatgggtggtcatgggcaggcccagaaaagtcaccataagcctgcagtgtggtctgtgggactggtggcctggctcccagccttcatgccctccctggcctgaaggtggggtctcaccagggacctacccccttccaccccggagcctgtctgcttcctgccatggtctgtggtacccaggctgctcatccatggggtacctgcaggccagcatcaagctgctctcagtgtccccctaggttccacatcccatgcttgtcagcacacagagtctggagggagctgaggtggcaggaccctcacatacctggctgggctgtgacagctccccggcttggccccaaccccattcggagatcatagcaggtgcctggagcggggagaggccagacagtggaggtaggcacctccgagcctgcaagggcaaggcgggggccttccagggcccccaagagtgcagagaggcccgggtccacagccccacctgggcggctgcagatgtgtctgggagggcagggctggtgcctgctcctggctcccggttccatgaagcgggaagtcccagctgtgcccccttgcagcctgggggctctaggtccttgctgggcctgggctggtgtccagggacatcactgtgagctcccccgtggcccccgcactcaggggcagcctagagctccccctcatcccgcttgcggcccttccccagggggtgcctccaggagcggatagcgggtcgggagtgtcaggcccggtggtcaccccatgcggggcggacccctggggacatggctgtgggtggccctgtgcagagtcctctctgggggcgcaagaacacggcacccttggtgcagtgggcgtggtgaccgcaccactggctgggtccctgtagtgggcactgctcccatttccccctcccgccctgggtcccccagtgctgcctcctcctggtgccctccccgcagcagttgtgggtgagagtggtggtgtggggctagggtcyggagccactgatgttccaggcctgggagcgggtcctgcctggccacatgagggtgggggcagcacagtttgctgccttggggacacggggcacaggggacccacctttgccattgctgctcctgcagccgctcctgctgccgcytcccgccaccacccacgcctcccctgccgtggacagccccctgctgccatcaataggactgttaagaaccttctttgtgataggcagtgataggtgctgccaagtggaggatggtgccactggtttccttccccaagagagtgcagtcttttttgcaaaaaaacrtgtgctgtgtcagggagggtgaggtaacttggccgctggtggaatccagaaaaaagtattctctcccaaattgtggcagcctcttggggtcctgtccgagaggacactgacctcaggaaacactgggtgggaattctagttcttcccccatgagaagtgagaccttgagcaaaaacatgacttgtctgagccttggtgtttttatctgtagaagtgaggatcatgagattacttacagagcagaataactgtgagaattaaatgagaaattttatgtgaatttcacagtatattatagtgagtgcataaaaggtttccttttactatttttttaaacaaaagtgagaaaacaagcaatcaaaatggggttagggttagtcatactaaactatatttgcttttattagaaacgtttaaaaaataaaattcccatagtttgcaatgtcaggttcccattccacatttgctcttttttccctgatgtggttattttcagaaataaaatataaaataaaagcattttgtactttattaaaagttgaaggttgaatgttttccgttggctgagctgccttcctgagcttaatgatctcaccttgatggggtggaaaaggagatgggagtagtgaaaggacttggagccaggagtctataaaaggttcacatttgataccacgagttaccccataatctcactgcgctccattattaaaacagaaacgctgcttactacacattgttaccaacccagtagtcctggagtcatgagttatcttggtcactttaagtttgagcagaattgatctctgtgttgtagtagttgttactttgccgacctagaccatcagttatgtagtagcatatcaaagccattccccagaacgggtagaatacagactgagaagtaattattttcaaatgtgagagtgtgcttccaatcctccagagcagtgtactagtttcacattctgcaaatgtcccttcccccagaaaaatgctctggatgtatattcagaactatgaaggcaggagattatgaagtgcagagtgagcagagcacagagggcagtggctcccaccctgggcttctaaatcataggattcctgggccccatcccagatttacttaggatttcttagggtgggacttttgggggaggacaggttccccagctgattctgatggtcatatggatttgggaatcaccattatggactgaaaaattaaccctccgcatataagattctcctgcatctccagttgtccatttgatatctctaaatctctccctaaatctgaaagtcaccacaggtaaaacaacccatctgcacccctgacggtctccttcctctcaacctactcctacctctgttgtttgcttggctaacctccctgtaacccagactcaaaacaccagttgcctttgaacagttttctgctcccttttttccctcagaccagtcaccgtgtgttctgtctctttcatttttcttatctatccttgtccctttcctgtccatgtttttattaaccctcacttggtattttgcagtctcattggttttactrgattcagtgttctccaccagttcatataactatgaaatttgttttcttagagcagccttctgatactgagttcagctcttcagccaagtgttctagctttgtgacacggtcaccccagttctctctcttctatgtatggcaagctttggccatagtgggctgttgagtgttctcttaccttaccctgctgatctttctccagggcccaccttgttgtttctgggtatggcagcctcttccacgtcctcacctgtggctctcccaccattccttataacccagctcaaatttcatgcacttagaaggcctcatggttcctcctttgcaacatgtgccctcgcctgcctcgcagtcttctgttgtatgttataatcagtcagttattggcttatcattatgatgggacagtaaattccttgagaatcaagacttgtcatcttgatatcctgacacttagtgaggaacctaaccattgtcgatgaagcaataacttgaaatctttagaagtgaaattacctggaacatacttcattgctgcaaagagtacgaattaaaacctcttaactactttttcctacttcagtaatgaatccccgtccatatcaaaatagcattttttccctttggctctcaaggggagagatggattagtgaccagcatatgatagtttcagacatcccagatgaggcagctggggagactaaaagaaggttgytgatactgtttttataggcagtgctaaattacctttggttttggaattaaggtgttgaataagaaagctaaaattattttttggccattgatgcatttcagctaaattggactttgtgtctgaggagacatttctgagcatttgggtaaaataaccggatttgtactccagctgtctccagagcaggagcctctgtgtgtgcttcttgatgctttgagtccccctcctcggtgggcatgttgcccccagtgatgcagcaggttgtcagcctgaattgagaaccagcctgcatgtgtatggaattgacttgtcagttattaacagacctgggttagtgtgctaatcattaccatcctaagctgaatgctctgcaaggaggctgaaggcttgactgttctcctttcctaggcaaattacttgtggatattgtttcctaggattttagaggcaagaattgaatagtgattctgaaacgagagtggtggtttgaatccacaatttcctgttctttagaaattttattgaagccctttttaaataacagtctccttgaataaaataatttcagtgtgaaaacctttcttcattttctcctaatgtggatgctatttttctattgtctgttgcagtaaaagaaaggcagacaaaagtcacagcctagggtttaagtctttactgttctactcgtttgatgtgtcatcttaagcaaagctttctcaaatttaaaccttaatgttcttttctggaaagtaggcagagtgatggtggcaccactctcataggataggatctcatggtggattaagtgaaatgaggcatagcaagcactgtatctctcaatgtaaattttttctaaatagaacactgtgaggaggcatttttgtgtttcttccattttgcattttgtctcagagctcactacytctctaaggagtagtttaggtctgcttggatgagagtcaagcttgtgacatgactgttggtgccataggtaaaccaaactgagagaaatatgaacatttgctggtgataaaagaaggaaacgtacttcccacaggtcttgtaggccactgtgacttcatcccagaccagtggggtagaagtgaagtagaatctgaagacaggtaggggccactccttggcctgagacaggaacgctttacctgcacaccagcctgagacatcttcctgcctcagtgcagaaaggaccagctgaagccaacttactcatccatttcttttgtgaactttgctgatgaatgaagaatatctctgtcattgtaaaattcatacaatatacacaatatagaggaaaataggaaatacgattgactaaagagcaagaatcatttaggatgttttaatgatctggtaaagtttttacatttattgtttttaaacatagagaatcactaatgtttaatagtagactttttatcgaaagtataaagcttatccacatgcataattataaatatgaaatatatgtacacgtatatatactatttgtgcaatgtggcaaatccaaatacagacttcttttaggcacccgttttaaactccaacagtgagagaattagtacataaccactcagtaatttcagttcttcaccttgattagtcagatcctcctaagcgaaactgtgtaggtggttgtgtggtttttagtacttgcttgacagaatggattttttttctctaaattaataaatatacctaaacaatggtcttcagtgtgtattagagcaaatgcttgaaggcagctggaagggacatcaaatacagagatgaagttcttttagcatgtttaatttattatggaaaggctagcgaacacattgtttctgcagaagtaactgtaggggcttgttatagattcctctttcatccaggttgattcagatattcaagtgtattaatggaaatctttaaatagtgccctttgccttattttgggaatcagctaagttgagtaggtagacttatgccagatttcattaattggtatttttgctaattttaagggatacttaaaaatatcccytgattacagtaacataaacatctgaagtgatttttgaattgctacacaaacagtattctattaacattgtacattaaaacattgcagcggtccscataggctgtggaaatgagtagatttcattttcctacattccctttatgtttctgtttgtacacttggtttttacatggcaaatttcattggttcctagtgccagtttggcttcattagaaccacctggcaactctgttcactacagtttgggtgacttgaagcctagccaagtttgggactcattggtaagaacattgtatttaatataagaatttaataaatatatgttaacttattttttgagaattattactaaacgcgtggttctcagttttctcatttgtaaaatgggaataataacaatctgcagagttttgggggagataatgagttgattgaatgacagtggaaggaatgtgagcatattctagaaactcwgggtgcagccccagccttactacatagacgaggctgatgtgttctgaatggggaccttattttaatcacaagctgatgaggcttcaggaaattgggttatggatttgttaggtttaacattatcttggccctagggtggcagtatttaggcattgattacatcttgggtggctcttttaactgctcatctgagacatgtgggtgaaggaacttgcacacagggtggaatgacacagggcagccttggtacacatctgggcagtttagctgtggaaaatgagtaaaatggctgtaactgtatttattgttgttggctccagacactcgttgaagatgtttaactcttccacattgttggatcctcagagttggtatctcaatgtgtaccaatttagaagtaattattttgattaaaatatttggttggtgtacaatacaaagaatacgtaatgtaaagtgcagtagttttgaggaagaaatggtggtgtacatgagagtcagaagtaccacattggatcagatgcatgccaatatgctgcagctggcggtgaccacaggcatgttttgtaggaggatgttgttgttgatatcaactttgaaaaaacttaagtttgttcagtaattgtatcccagctttcatttcttcctccctgattaggatgcatttggcatacttcactgcttagctaagtgctgaagatttttcagaactcaggaaaaaccgtggagtcaaatctaagtttaaagctggctttgccttgtcggcttgaccaatagcctatcctccctgggcctccaccatagaacgtgagccctgtgagtgcagggatcttgtctgttttgttgatcgcttcaattccagtgcctaaaacagtgtctggtacagatcaacacataaatgaatagcgactctagagtgtggcaagtattgtgaaaggaattagcttggtggcacactggagcaatgtcacagtcttatctgctgacagttgtgtgctgattacaatggttcccaatggtataaacacagaaaacaagagacttttatggtaatatgatagattttttgactgttaatgctgataatgagaattttgggcttgtattttatatgtttttaaagttacatttttaaaagaaaattttttattgaatttttacaaaagttttatgacagattgacaatgaaaaacaatgggtccttcatcacagatagtttgggaagcaccgtgctagagagtgacagggaatgatagctatgtaggtccgggcagcctctctgagctgagatttgaactgaaatctaaagtcatcagagaggacctttctaggcagaacaaatagaagtgcaaagacctcaaagtagcaaaaagcctagttagtgtgttcaagggatggaaagaggccaggagtataatgaggaagagaatcgttaagagaggtggggggaaggtaggcaagggccagatcttctaggggcttaattgacttggtcatgagttttagttttattcttagtgccagttgttgagtggaagtggtgtctcacgtgtggtttgagatcacttttgctgcatatggattttagggagccaatagtgaaagaaaatatacctattaagaggctattacagtagtcaggcgagagatgttggaggattggataaaagtgtgggcagagaaaatggagagaagttgaccgcctgtatgatacaggcatacctctgagatattgtagatttggttccagaccactgtgatcccaaagtgaatatgacaataaaatgagtcacatgaatatgtaagttatatataacttatgcatatacaagttatatataacttatgcatatataagttatgttgtgcatatatgttatgttgacactgtactgtagtctattaagtgtacagtagcattatatctaaaaaatgtacataactaaagtatatcttatgctaaagaatgccagtgatcatctgaaccttcagtgagttgtaatctatttgctagtagagggtattgcctcccttttagtggctgctgactgatcagggtggtggttgctgaaggttggggtggctgtggcaatttcttacaataagacaataataaagtttgccacattggttgactcctcctttcacaaaagatttctctgtgccattcagctgtttgctaacattttactcactgtagaacttctttaaaaaagggaatcaatcttctcaaaccctgctgctgctaaatttatcaactaagtttatgtaatactctttgttgctatttcaacaatgttcatagcatcttcaccaggagtagatttgatctcaacagactactttctttgcttatctataagaagcaactcctcagccattcaagttttatcatgatattgcagcaattcagtcctatcttcaggctrcacttctgtggttcttcctccatggcagtcttgaccctctcaaagtcatccatgaggattggaatcaacttcttccaaacttatgttaataagttccaaacttatgttaatgttgctattttgacccytttccatgaatcatgaatctagaatggtgaatccctatctagaagattttcattccattagatgaatcacttgctgtggcaggtatagcctaagaaaaatgcatttcttaaataataagactgaaagttgaaattactccttgatccatgggctgcagaatggatgttgtgttagcaggcatgaaaacaacatattaacctccttgtacatctccatcagagctcttgggtaactaggtacattgtcagtgaacagtaatgatttgcaaataatcttttgtctgggcgtggtggctcacacctgtaatcccagcactttgggaggctgaggcaggcagatcgtttgagcccaggagcttgagaccaacctggggaacatggcgaaaccctgtctctacaaaaaaatacaaaaattagcctggcatggtgatgcataccctatagtcccagttactcgggaagctgaggtgggaggatgacttgagcccgcgaggtagaggatgcagtgagtttagattgcaccactgtactctggcctgggcaacacagtgatactctgtctcaaagacaagtaaatcttttgagcaataggtctcaatagtgtgcttaaaatattcagtaaaccaatttgtaaacagatgtgctgtcatccaggctttgttgtttcatttatagcacagaaacataatagatttaacaaaattcttaagggccttataatttttggaattgcaaataaacactggctcacataagtcagctgattagtcccaaacaagagagtcagcctgtcagttgaagctgtgaagataggcattgacatctctgcagctatgaaagtcccagatgacgtcttcttccaatagaagactgttttgtctacattgagaatctgttgtttagtgtaaccaccctcactaattatgttggctagatattctggctgacttgtagcttctctatcagcacttgctgcttcagcttacactttcatgttatggagatagttttttcactttggccccatgaaccaacctgtgctagcttccagcttttcttctgcaatttcctcacctctctcaaccatcatataatagaattgaagagagttagagccttgctctggattaggctttggcttaaggcactgttgttactagtttgatcttccattcagatcactagaactttatccacatcagcagtaaggctgtttcactttcttatcatttgtatgtacactggagtagtacttttaattttctccaagaacttttcatgtgcattcacagctaagctaactgtttggtgcaagaggctacctttcagccggtcttgactttggacatgtctttctccctaagcttaatcatttctagctttttatttaaagtgagagatgtgtgactgttcctttcacttgaacacatggaggtcattgctgggttattagttggtctaatttcaatgttgtttttctaaggaagggggaggcctgaggagagggaagagggaggagagtcagttggtggagcagtcagaacacacatgacattttccgattacatttaccattttgtatgggcttggtttgtggtcctggttcccctaaacaattacagtggtaacaaagatgactgatcacagaccaccacaactgacataataataatgaaaaagtttgaaatactgtgagaattatcaaagtgtaaaatagtgacatggagcaagcacatgctattggaaaaatgtatgacacaggattgccacaagccttcagtttattaaaaaaaagcagtgtctgggaattgcaataaaacgtagcacagcaaaacaagatatggctgtaatttgaaatagaattggtaggatttgccgatggattggattttgtgagtaaagggaggagttaagaatgaatcctaagtgttttgatcatttgggtgaatacagatgccatctgtcgagcagagacactttttgaggagagaggtaggtgggaattaggaattgagaggtattagttatattccttgctgctgtgtacctttttaatgaattctgttaaacatggaatttcatcgatctgtctttttttttttttttttttttgagatggagtctcgctctgtcacccaggatggagtgcagtggtgtgatctcggctcactgcaagctccaccacccgggttcatgccattctcctgcctcagccagcctgagtagctgggactacaggcacccaggtgtagtcactacgtctggctaattttttgtatttttagtagagactgggcttcactgttttagccaggatggtctcgatctcctgacctcatgatctgcccgcctcagcctcccaaagtgctgggattacaggcttgatccaccgcacctggccttcatccatctgtcttatgtacttttgttacaaatgacttggagaggaaatacctaatgaagtaggcttcttggacctctggctggttctaacagtttaaaaacattggagaaagaaatcttgtttatcaaatattttggaaattctttgtaaaattctttggaattaatgggaggatttgttcacattagctattatttgttccaaggtgacatcttgctctgtatttatttatttatttatatataatttatgtctcaactaattccacagaggaacaagttactcaagtagtcaagtatagatagatattgtgggctactatatagctttatcacaattcttcttaagtcagtgagaggaaaaagggaaaaattcaatttttcatattctaagtcttgaactttattttccaatttttatgtttgctaaccatttttttcttagtacattcaaaagatgaaaagatcaaaatttattgtcaaacttggaattaccacactggacctagcccctggtcaggacagctgagaaagcagattagttctggtatatacctttctctgtagcattagtcttttcaaaaagatctaggtgctttatgtttggtttgtgctctgtaagttgagatcttgacatccttcatcttttatttccctgagagaggtactttgatattttgaaatatgcctttgacattgcacaacctctggtgtctatgcctatggtggtagccagccagttgctagtcctctggctttgttttcctcctgcattcctgagcagtcttgaagtacccatttggtttcatttagaccacagatccagaggaactgcttggtcagtccacctgcagttaacctgttctttgtaatgggcactggtaggaaattgtggtgttacaatgcatctttctcatctttaartgtgatcagatagatgggtgtatcaccttaagtttcatttctatttctaaacgatgggtgttttgagatagatgagtgtttcaggatatttgtatgatcttatggactcacattggtataagaaacttcagggcttcttctaaatgtctgatagatgggtagatagatagatgggtttatcaccttaagtttcatttctatttctaaatgatgattttactgattttacatactttggcagtatcttaatctgtttgtgctactgtaacaaaatactacagagtaatttataaataatagaaatttatttctcaaattctggaggctgagaagtctgatcaaggcactacaggattggtgtctggtgagggctgctctctacttccaagatggtgcctagtcatggcatcctctggaggatgttctcacgtgggagaacaaaagaatgagaatgactctctctgaagcctcttttataagggcataatttatttgtgaggacagaacactcatgtcttaattacttccccaaaggtgtttcctcttaatactaccacagtgggcattaagttttaacacatgatttggggcaatattcaggctatagcaggcagtaattataatttcaaaatggagaaccctaaaatattttttttttggcataacctttttgtcttctctgtggaccttgatactgttacttcttgaaatcaagttttaagatattttgaaatgttttattagagagccaacaacctcttgtttctctaaaggagttatcttagatttaagttggattgttctgtaatatttgtactataacgttttactgtgtttacgatgctcatgtgcatgtactatggtggtttgcatttatttctcatcccgtggatttcataatagtattcttgaggacaggcagcattcttattcgctgtttatgccacatgaagaatgaaattgtcttttgcacaaagttattcaatggaagaatattgagagatttcaaattattctgttctgataatgacatctccatttgtctatacttgtttgtggtatacaccattttttaacaaagaatatttccaaggatgttttggcatcagaatatcattgttagtctggaaagtcagggcctgtggatgttcaaagacattgaaaaaggggaattaaatatgaaaattcttttaaatcctgacttaatgccagctatgtttcttgatttaaacttttattttagattcatggagtacatacacaggtgtgttacaaaggtacattgtgtgatgcttaggtgtggagcgtgaatgaatctgtcactcaggtagtgagcatagtgcctgatatggtttggatttgtgtccctgcctaaatcttaygttggattggaacccctggtgttggaggtagagcctactgggaggtgattggatcatgggggtggatctttcatgaatggctttcatgaatggcaccacctaccggtggtgttctcttcaaacagtgcccacgagatctggttgtttaaagcatgtggcacctcttccctttctcctcttcctcctgctttggccatgtcagacatgcctccttccccttcacctccttccmccatgattgtaagcttcctgaggcctccccagaagccaagcagatgccagcatcatgcttcctgtatagcctgtggaaccgtgagccaattaaacatcttttctttataagttacctagcctcaggtatttctttatagcagtgcaagaatggactaatacagtacacaataagtagttttccagctgttgctctccttcttccctcccgccagtagtccccagtgtctattgttcccatctttaggtccatgaatacccaatgtttatctcccacttatatgtgaaaatatgtgggatttggttttctgtttctgctttagtttgcttaggataatggccttcagctgcatccatgttgctgcaaaggacacaattttgttcttttttatggctgaatagtattccatggtgtatagataccacgttttctttatctagtccactgttgatgagcacctgcgttgattctatgtctttactattgtgaataatgctgcggtgaatattcaagtatgcatgtctttttggtaggatgatttattttcttttgggactgtcttgttccagttctgaaggggaatgcttccagcttttgcctgttgagtatgatgtgggctgtcatctgatcatacatggttcttattatttttaggcacgttcctttgatgcctagtgttttgagggtttttatcacgaaaggatgttggattttatcgaaaactttttctgtgtctattgagatgatcatgtggtttttgtttttaattctctttatgtggtgaatcatatatattgatttgtgtatgttgaaccaatctggcatttcagaaataaagcctacttgatcgtggtgaataaactttttgatgtgctgctagattcagtttgccagtattttgttgaggattttatgtctgtttatcagggatattggcctgaagttttattttttcgttgtttttctgccaaattttgatatcaggatgacggccagctatgtttttattcatctgattgtctagttgtttttgtcttcatagttactaccccaaacccagtctactttcctgatctctccagattatacgtactgcagacccatctgctttaacaaaatctttttcccacttcattgagattaagtctgcccttaggtgaagtaccttcatcccttcataatctctctgtggtttaatggtccccttcttcttagtctctgaacaggaaaacatgcctcctgcttaccaaggctggcgttccaactgcgttcttggtaccaaagacttttcttactggatccagctccatttatttcctgccctttcctgtttctctcttccccatctgcctacaaattttctgagaccatccctttcctaaaagagctctcttcctttgtcactgctgcctgcttaggttgctttcctaacctgcttgccttgatggccacatcttttcgaggtgtcccctcagtgccaggccttttacctgacccttctccctccttggccctgcactataacctgtgtgcaggactgccctagcactgaaaggtgtcttctgcagggaaggaagcaattacttctgggccaattcccacrttactccccaggattgtctggggagagtttctgagagggagtgtgagatgaaggatctctccatatggctattctttcccacctttcttgcttccttgcactcttcacatgccctcccctcctaccccaaccagcagatcaggttgtctctacaccttgcctaagttaagccagtaggtggtttctatgagctttgctctgcttccttcctggtttattcccacccaaccccgaatttcctccaagttaagttggtttaccagacactgggttaggaacttcatgctttaatctttgctcgacttcatgaaacactgctcacttcacaaacatgtgaaacaacttagctgaagtaatgcagctgggaagaaccaaatttctgacatcaaagtctgwttttaaccattgctgcattgtcttaagtgcttggaattctttccacagtgagataaaatattaagaaaaaaaaattttttttaagaaaaatgggtttttctaaaccatttgtttagaaaattgctaatatataattaataaatatagtgaatcagaatctgtcctgttttggtactatttgtcaatcagcaaaagtaactgatgtggggaggcagtcatccctggttgtagaaggggggctggacaccagaattacatgttgtcagtgtgcatttagctgtagtcacatctgctgtcttcagcctcttgacagtaaagcatctgtgctctgaggcamttttktgtgatccagttttgtacacaggcagtttgttgggagcgttaccattgcctctggttcctcatgtgtaaaatggtgagaaaatagtattaccttataaaatggggctaatcatagtgccacaagcctgatagggctgtttatgtgggttcatgaacttacgtgggttcatgcataaggtgcttacaacatgttttaagggctatataaatgttagctataaaaataataattactcttattgttaatagaaattgttattggatattttatttatggtaacatgagaggggcagtgtatctgcctttgtacgtgtattaaaaccaaagcatgctcatttctcaggagctctgttctgtgaggcttgggtaatgacagtgtgagcatgactggaaagttaaattggagaggggcaattcattgagtgaaatgatacaacctctgcttcttggttcttcccaagctgaggtatagtaatgctgctctcttttttctgtcgacacaactccctcaggaatatctgcagagtagtgggtctgatgtctcttttgcttaacagtttttacatagtaacttttctacctcaagtccgaggtggcatatgtcttcttggaaaagaatttcctctttgagctcaacagtgacaggaaccatatttttgttattctttagactgcttaaattgctgagacttttaaaggttaataatatttttatccaccttcaatttttcaatttactgttgttatattgcataacatgtgctgttctctttttgagttaatatattgtaagttaacttacattaataaataaaacatctcctttttcaagaagcaaaaatgtgattatttcatagatccccaaatcatccaaccataagacttctcaagagatctttaaaattattactttgcrctgtgtttcaaatagctaccctcaccccccttccccttcagatgatgagatagttcctctggtgtggtctgtgtggcctgcctagagagccctgatgccccacagtggctgtagacctggccccaagtcctgaagrcttctrccttcccaggtgcatgtcttatcctgtttcctatatttcatatttgtggttgagcctttagaaactaggcaccattcggccaggcatggtggatcatgcctrtaatgctagcactttgggaggccaagatgggcagatcayttgaggtcaggagttygagatcagcctggccaacatggtgcaatcccgtctctactaaaaatacaaaaagttagcctggcatggtggcacgtgcctgcagtcctagctactcgggatcctgaggcaggagaatcacttgaacccaggaggtggaggttgtagtgagccgagatcgcaccaccacactccagcccaggtgacagagcaagactccgtctcaatttaaaaaacaaaacaaaacaaaacaaaacaaaaaaaactaggcaccattaaattctattcctgtttgtggctattctttgattgtctcaacaatacttaagatgaaaaaataaagttttaaaaaatttagcatggtctttatccttgatttagatactctgcaagcatagtttaaaaaagatgaaattyacccattaaaaaagatgaaatgggtgaatttaagcatggagttctaaacttttctatgcgagacctgaagatatcttagcaggaaagaatggtattcraacattctcttatcctttttaaaaagtacttttgtaagcattttatcatccatcccctcagccttttgaagtagattgtgtatttgattatattttttgaaattcaggaactctgagcctccagcatctaagcacagaaccttgcacacagaagatgcttaatacatatttattgaatgagtgagaccgcccaaggtcacatgattagttactgttcgtagcctgtaattcatctatatcttggtcctcagtctcatggttttactcaataattataatgtattgggatcgagggttggaatcctcacttggacctttctagttatatggcctttggacccattctggacctcagtttgcttctaagtaaattggcgatgctaacctgccctttctgttccttaggatgagaagaaatgttactcagatgcttgaggaatggtagatattcctaaaaccaatcttatgaaatgctagcgtaagactcagtgggtgtggaaaccatctattwtataatctctgaatatgggcttattgcacttataaaagctaccactgcagtaattcagaagcctgggtattttccttgactcttgattatcagaactacaagcaaccacagcctttataagcaatcagggaattattttttcctgtatcattgatgtaraatagaacttcctgttttcactacttctctgtataacttcaatttatgcccactcagaattaattatacaaagaaaaatggatacatattaaactgtcttstgtgcccccagtctmtacttttgaacccttctaaatccgtgactttctctgccttgstgccctccttccctccatgccctgtaaaaacatggaagcatctggtattagttaaagttatcaaatcatcggctgggtgcaggtggcctaaaactggttcattctgaagtatgttgtcttaaamtatggatttgtactttaactcctttaatttcttactgtagatgaaaacatttctaccctcctgctctttttggataaactaggtatcagcaagtaggcaggaagatttttctatttttaataatgaaaggcttaagactcaattttcttcagactgtatctgattatatttcctaagtgttgataagcagtagtatgttgtttttaaaataacctagaagtgcagatttcttttttaatccattaattagactagtatttaaaaatttctaatatttgtgtcattttaaaattagtaattttatttctttggaaactgagaacacggcattgtgtacagtttatgtttgtttggaactttttgaaattttcaaattttctttgtggcctaatatgttaatattagtttttacaaatgtttcatgaatgctgtagaaggaagatatatttttaaaatgtcagtacaaagcctgatatccactaatgttatcaattgtataattccagtcctccatgctttgttaagtttttcctacacagtaggtcagactgaggtgtgtgctcttctaatgtgagtaggttttggggcaccagttttccatgcaattctaatactttttgcattttgtcatatcaattctgttttttttttggagatggagcctcactgtgtcgcccaggctrgagtgcagtggcgcgatctcggctcactgcaacctccgcctcccgggttcaagcaattctctgcctcagtctcccgagtagctgggattataggtgcccaccaccatgcctggctaattttttggtatttttagtagagatggggtttcactatcttggcaaggctggttttgaactcctgacctcgtgatccacctgcctcggcctcccaaagtgctrggattgcaggcgtgagccactgcgcccggccatatcaattctttttaatctttcagtgtaatggtagttcaaacagaaattcatgctttttgtgtcttaattattgttccacttaatacttttgccttgaattctattttgtcttgtgttcatattgtcactctctccttttatttttatcttcttgagatacaacatatctggttgttttgagaggtagtatctcattttttctcctcaatctgagagactttgtctttaatattggggaggtcaattcatttatgatgatcatcataaaagataagytcagttctacttgtgccttcttattttttgttttaaatgtattcttgcttttcgtgggggttgggaggtctgctttttgttacacatgctgtctttgatgtcttccgtagtgtttggaaggtatctttttttaattctacagtctgggaaagcctctcagattagccggccacgtgagttgtttctctgccatttattgcgtcagtttagcccctcactgctctctgtatgcatttaagttctgttgacattttagtttccttccttattttgttcatctccttacattatcctattatctttttaccttaacttctttctttcattgtggctctttgcacctttttcatggaagtctttgtgcattttaatgtggatattgaagactttcctgatgctttcttctggcttctgtggtaaatagtttcacactatgtatttctgagtccttaggatgatgatctcattttttgttccctgtgctatccacccacctgcagcaagcacaattttgttagttttattttctctttattaaatcctaatatatttactgactgcttcctagagatacataggtaaattagacagactttattctgtgtttgttttctggattttaatttttctccactcagttaattgyatctaatcatcaacacatctgccatttatttatttatttttgccatttgcttgtctgttcgggtagttgatcttggacttcctaggctccaaatctgtgagaaagaagagaactaggcacctagtttatggtattttgttatagcagaccgaatgggccaagaaaatgttaaacaaattacttacattctgtctctgtcctgtcttccttttttgttgttattcttttaatcttttgaatatgtgtacagactcatcactccattttattaagctcctcagaccactgaaagttgtgtgacaatgccataagctttactcttaagattaagaagcacagactcctgaattcaagttcatgagttcctgaattcatttaccaatgtgtatttgcaatttttggtactatgatttggattgacagatatttaaaggtagtaatttttttcagtctgatacatacttgtttttagagtattttttttttcttttggagacggagtctcactcttttgcccaggctggagtgcagtggtgcaatctcggctcaccacaagctctgcctcctgggttcatgccattctcctgcctcagcctcccgagtagctgggactacaggcgcccgccactgcacctggctaattttttgtatttttagtagagatggggtttcaccgtgttagtcaggatggtctcgatctcctgacctcgtgatccacccgcctcggcctcccaaagtgctgggattacaggcgtgaaccaccgcgcctggcctgtttttagagttttaacttctaaaaaaggtaaccaaatgggttagtctgtaatgtaattatgccttttttttttttatttttttttaaggcagggtcacactctgtcacccaggctggaatgcagtggtgcagtcatagcccactgcaaccttgaactcctgggctcaagtgatcctcccacgtcagcctcctgagtagctaggactataggtgtgcaccactatgcccatctaatttttatttttttctgtagaggtagggtcttgctgtgttgctcaggctggtctcgaactcctggcctcaagatatcctcctgtcttggccttccaaaatgtttagattataggtatgagctagtacacctggcctaattgtgcttctatttagtttagaacatatggtaacaaggataatggatttaaaccaatctgtaagtaataacattctcttaaaattgcatggagaaagtcgaatcctgttttctttctttctctctttttttttttttgagatgtagtttcgttgttgttgcccaggctggagtgcaatggcacgatcttggctcaccacaacctccacctcccgggttcaagcgattctcctgcctcagsctcccgagtagctgggattacaggcatctgccaccacgcctggctgattttgtatttttaatagagatggggtttctttatgttggtcaggctggtcgtgaactcccgacctcaggtgatcggcccaccttggcctcccaaagtgctgggattacaggcgtgagccaccgcgcccagccagtcctcttttctartataccaccagatagcaccttctgaatcagcccagcacccttaaagcagtaattgatagtcagggcttgccagctgaacacgtaactgagttctctctggatctgtgttttgaatcagtatttgaggatggtgttctgctgtaggagttgtgtaagttaaaagtctcagatcctggcaaatattttatgaaatcaaagggaaaaataagttattcttctgatggcctctgttttcccagaaaacttaaaattatattgcctttttttttgtttttttttttttttgctgcctggtggctttaaactattcttgctctgttgcccaggctggagtgcagtgatgtgatctcagctcactgcaacctctgcatccttggttcaatcgattctccagctccagcctcctgagtagctggaattacaggtgcttgccaccacacccagctaatttttgtgttctgagtagagacgagggtcttaccatgttggccaagctggtctcgaactcctggcctcaggtgttcctcccaccttggcctcccaaagtgctgggattacaggcgtgagccaccatactgttatatgtagtgttgttgaaggaactctttcttatgaagatttttcaactggttttaatatcaaatggacttttaagtatttttgtaataacgatattaataacttctgtttcattattaggtttttcaaagtgccttccagttcttaatttgtccctgactcatgttgggtgaatttaacaccttctgatgtttaaggttatcctagatactaagaatgtgggagaattttagttttttttccctctggaaagatgactgtggagtctaaaataaagtctacaaattctctctgaatcctagtatctttattcaagtgttctttctacctatgactttaaactttcagtatttacatgatacggtcttggttatataatcatatcttgtcagtgtaatatatccagatagaattttaaataccagtggagttttttgttctttgttggctgtaaggacttagaaatacatcaaaattgagagcagacttttttattctaaatattcagaagtggagttccttttaataattttgaccttgcttacaatacttgtattaaatttatgtttagaaacagagtccttatttggcatctactttgccccattttaagagtttcttttaaaagaagcagttgatgtgttctgactggtatttgaagaatttaactgattcatttaacttcagaaagtacagcaaagaaaagaaaaagcatagtagaaatctaaatttgtggtttatgaaatggaagcatagttagggtcttttctacagtgtatcctctctcaatgtataaatacactgtcttagttatttaatattgatttgtggtgatgtaggctaaaggctgccatctgacattcatatcatgtaagattttcttgcctcacattctgaggcccacattttgtttgtagggaagtgaccttttgctttgctccttgtttcttctactcatggatctcaggccttaaagtggtgcgcatgaagctgtccggtatcaaggtagttttggttttggatgctgttgttggtaaagaacaagcttcacgctcacccttccctgcagtttgcagaccctcagagagctaaggagggaaatggaaagaattggagcatgactgttgctaacacatctttccttctgaggaaggaagggaaagagcaggcaaatgtagaaacaataaagatggaaggggcacccttagagaagtttgtacctcctcagtgtaggggcatgaaatgacacccacaaagaagagccatggtattgtcttgctttctgcctcagtattggctaactttcactttaaaggaatttttaaaattggtaggacataataaatgcttcaatgaaggcaccttagtcatccagccatttgttcgcttatttaagcagtacttattgactgcctgctgtgtgaatccggttgtttcactaggcattgaaggtacaagaggaatgttgttcccatggaattaataccagtatatatatacgatttagtggagtgggatgttgccgaaatggaagtctgtgtaacttgtgatgggagcaaggaggtaagagcagccagaggaattatcagaggaggattggcttgggctgggtttttttcaggcaggctagctgggggcaggcattttaggaagaagctgcatgtaaagacaggaaagggcatattacgtgtgagggtgggggaagatgcatggcaagagattaggtggaatcataagggcatcgtatgtcttctggtagaattaaggtttatgggggacctgtaaagttgaagaggttttgactctgatgagatttgaattttgaaagatcattctgctagcttttagatcattctggtagatgatgttctggtagacaatgaattggagagggaaatgaaactgcaggtgtgatgaccagtaaggaaactagtatactagttgagattagggatgatgaggagctagatgaggcagtatagataaaacaaagaaaatgggtgtggtaagtatcaagaagacagaatagatagaatgtattgactaattggtgggtatagaggagacatctaggatgactttcccattttgccttaagtgactgggtgagtattagcacccatatcttcctggttaaccaagtgaaatgctacgaaaagtttaaggaagacaaggtctgaaaaaatgtccactgaattaggtatctaggaagtcattggtgaatttactgaaatgggaaagtgtaatgattcagtcacagtttaaaattgcttgggagaaacagtggccttgaaggtgtcataggtttgctgggcagttctgactatgcaattgcarttgaatcatctatttgtagaggcaacggtcttccctgggattttccttggcctatttcagctgcctgggattaggaacagagaatgtaaacaagatcttggctgatgaggaaggagtgggatggcagagttggggttttgctcactaggtgtgacaggctggcaaggtgtcagactcttggaggaactgggagaacaattagcattggccacattttttgcaggtgaagaaactgaggcctgctgatgagtgatttatcacagcagaaggagcatgcttttggagtaagatagcgcctgacttgatacttattaactctgtgacctgggaacattattttaaaatctttcttcacataaatcttcttactctgccattccagatgaagaatctaagagcagctatttgtgggtgattgtgaggagtagtatgaataaggttctagggttcagagtcagatccgaatttgaatttcagatgtccttgtgtaatttacttgaactctgagcttgtttcttcatctgtacaatgaaaatattcttacatgctgttttgaagcctaaaactacaagagataattgtaatattttcttagtatagggactggcaaagagtaacagcacagaaactgacagccatttattatgttgttatttttactgggaatctttgggaacagttgggcttttctttccctcagaatttgtgtcagttactttatggagtttcagtaagataaactgaagatattcagtataggagtgaattttcccaaatttgttctgcctgatactccatatgttttttctgcatggggaccgtcttcagttctggctagtgttctgcgagtgttaacgtgaatgctcacgttctctgttttcttgcttcttttttgtttttcctgttgaatgctttgcttgttgggtcgcccagtctgtcatccatttagtctgtttccatacttgtctttcatatttactggctttttatctctgagtaacttcagatgatttcttctaatatttgccttgattcttttttttatctttatttttttacctttgtcaagtctactgttcaacccatccttgagttcattttaataactatgtattttcctacgtggaatgtctgtgtttctttttcagaactgcccatttttatttcaaagtgttctcttgttgcattatgaatttgattccttcctttatgtctcaactctatatattttaaagtcctgtggagaatattctgttgtctaatatatgctatatgagctgacattattttatttagcttttaacatgagttgtcttccacaggatgcagattatgagataaacatactatgctatgtgatggttattttgtgtgccaactgacatttggtcagacattctgggtgtatctgtgagggtgtttttggatgaggctaacatttgtgttggtaaacttgagtataacagatggccctccctaatgtgggtgggccccatccaatgagttgaaaggctgaatggaacaaaaaggctgactctcccatgagtaagagggaatttctcctgcctgatatccatgagctgggacatgggtcttctcctccctttggactcaaagtgaaataccagctgttctcaggtctcaaagctgctggctttcagacaggaactataccaaggctctcctggctcttcagcgtgtggactgcagatcttgggattgccagtttctctctcatactgtttctatgtctctccacacactttattggtcctatttctggagaatcctgactagtacagattttggtactgggagtggttctagaggagcagagtttccaggatgggttttctgaatgtgattctggggtttctagaagtggctctctaatctgataagactaaaatatgctgataactctttccagtagtaaggagagcactgataggccatggcatgatctggcaatagagatatacaagatatcaccattggatactcctaaccaaccacttaaagcaatcaaggatctgggtactgtgtatatgatatttttgaacatttttggtaaactaacaaatacggtgagattggctggttgtcactggacaaagtggggaaagaaaaggatgagctcaagcattttattttccagctcaaacaccacataaatgccctgaaggcttgtatgtgtgccctgaaggagaaccttaagttgtattagttgcagggctgaaatggctaaaaaacccagaatcttatcctgtgactggctgtattatgatgcaaattgaactcccagtctcatagggtgaatactgttaaaggcattgattgggaaggaagggggtgccgaaagttgggatggggatgtgtgggaagatcctgatgaagctggggatatcgaaccctaaattctgatgagtcctctttgccagtggatgtggcctctccacccccaatgggagtagcctctccacccctgtttgagggcattaaccctgcattgtctaaggaaactgtagtggcttccttgaggcagttgctttgtaagataatgctgagtctactcaggacccacctttaccacggctctgtttttagaccagtaactccagcaggctcctaaaggtgaaggttcaagacatgacccctgagaaggtacactacactccaaaataactrcttgagttttctaacctatacagacagaaacctggggaacaaatgtgggcatgtatattaagactgtggaataatggtggaagaaacgtgaagttgtatcgggctgaatttgttgacatatactcactaagcaaagattctgcatttaatgttgcagtttagtgagtcagaaagtgctctaatagtacgttgggttggctgaaccatggaccaaaaggtggcctacggtgattgaattagaaatgctagacttggctcattttaatgtagagaaaaggattcaaaggcttattaggaagaatgaaatgttagagtagatttgtcgttaaagacctacttgcccaccacgggagggtccagaagacatggctttcacaatggtgagaaatgcatttgtgacgggagccccagcatcctggaagagctctgtggttgctttcgtctgttaggccttacagtgggagctgtagtcactgaattgggaaacctaatgcagcaggagcaattggatcccaggggccaagtggcagcgctcagcctgtggtgttggctagttcatcctgtgtgtctaatgtgggtaggtatcaccaggtatttgaagtcctgaatagaacaaaggttgaccctcttaacaagtaagaactcttcctgcctgactgtcttgagctgggacatggtcttttcctccctttggactcaaattaaaatgttatctccttttggttcttgaacctgtcagctttcatgctggaacttacaccattggctctcctgggtctacagcttattgactgcagatcttgggacttctcagcctctataatcacacgagccagtttgttgtagtaaatctctctctctctctcacacacacacacacacatagacacacacatgttgttggtccagttttcctggagaaccctgactaacacagctatttagtgtttgcctctcctggaccctgtggacctgctcaagaatcccacatgatgtgagtgggcttggaaatctgacttttccttggtgattctctttccacctgagaatcaaggcagatgacaggatttctgacacttcccttgcttgtaggcaatttttatagtccctgttcactgttaggacagtttattattgtcacctgggcctattattcagcattataaaagtagcctcctaggcacatgtcatcggtcgtgattgaatatatcaagaacttgtccagactttccttacgacagtttacatcagctacactacagtgtgcaaggatcaatgagaaaatgagagagctgtctagatcagtgggctgttgctcctctaattttttattttttgatgtagtcccagagccgatagagtgagtgagagggatggccacaaggaacaaaggatggcaggaatgaactgaaattgcagtggccccagagcttggagagcaggagggaactcggtttcctgtggaagcagtgtgggtgggaagtatgcatcactgctgctgtctcctctcaacccagggccacttcttagacgttacttatctcatgggtctcactcaaatctggtaatgtagggaagcaccaggaaagttttgtgtgtgtgtgtgtgtgtgtgtgtgtgtgtgtgtgtgtgtgtgtgtgkgttggaatgttatgaaaacctgatatttttattctattatttgaaccaggaataattttgctagcaataagtaagactgttttaagtatgaagtttaaaattctaaccctgaatacatgagactagaaaaaacaataaggtctactccttttttctgcttccttttagcagacaagtactttcaagccccagaggtataaggaaaaaattatgggaaagaactttggaaacagatgtctattatttgatttkagccacagaaagccacartcttaattagtggaaccctggtgttccatgggaggagattttgagaaccaccaaacttgtctagtcagttccttgtcaccattgcaaaaactggcctccctacgctgtggcttactcacaattcccaggtcatgtagcttggggcagaagcatgattagaacctaggcacccacaggtattctttctgctccttggaaaatggacttcctttatttttaaaataggcattggaatgtatatcttggtgtggctctggggccagtttagtctcaagagatttttgtctatgaatgcagtgaccttatcaagcatagacaatttcctgtgtcattaagatgttccttggcagaatattatttttcttggtgaatatattgtggtataaaacatgcatagagaaccagctctgtttttttctgagtgaattagctgtattgtagcttatctgtggcaagatcttgcttttgagtttattgacagtgactcctgtcattagtgacttgcttgaatgaggtcttggctttctctccttttattttgactttttagcagtctgagtcacagccaggaagtcctttgaaaccaaacccttagcccttttttgtgtttcarggacagtttgggaaatgtcccttaaaggggtcctttggtttctctgttgggtcccttatctttttcaccagccccacgtaggtccttgttctgtcctagactgattggtttgaaggtcacagtggggaattgggggttcccccaccacctctgggtcagcactttatagcacagttttattaagatgtggaaaatgaattttcaaatcctcaagtacacccaaattgaaacagaaaacctccaagaaacactgtgaagcttcctgagggaagctgtcaatcctctgataattcctaaatcttgtcccagtactcataagatgtcagatggtagatacagtaggtgcactgaaagcacctgtggtcagtcgtgtcatttgttactatttaacagcttgtttcagtcagtgagcaaaactaacatatacacagaactaaagattttatactttaaaattatcttagcatataggccgggtgtggtggctcacgcttgtaatcccagcactttgggaggccgaggcaggcggatcacaaggtcaggagatcgagaccatcctggtgaacatggtgaaatcccgtctctactaaaaatacaaaaaattagctgggcgtgatggtgtgcccgtagtcccagctacttgggaggctgaggcatgagaattgcttgaacctgggaggcagaggttgcagtgagccgagatcacaccattgcactccagctagggcaacagagagagactccgtctcaaaaaaaaaaagttaacatataatccttttgacaaagtttattaaaaataattctttcaaagagcttcagggtatggtcattgattattcagcttgaaagaataaagaaaatatatttagagaagtggtatttattggaatatttgcagtctgtgctcattcagtaaattgagtttgaacaacaatacatcagagtctttggtcaggtgtggtcgtggctcatgcctgtaatccagcactttgggaggccgaggtgggtggatagcttaggctcaggagttggagaccagcctaggcaacatggtgaaattccatctctacaaaaaattagccaggtgtggtggtgtgcacctctagttccagctacccaggaggctgaggtagctggaactacctggtggttgaggctgtagcgagccatgatggcaccacyacactgcagcctgggcaacacctgtctcaaaatcttcatagacttatataacaaccatgacaattgaatgacatttttctacaacttgaaaatttgtctttaaaaagaatctattttaaaaaagagttaataaagttggagtttggtgtcagacctaggttgattcctagttctttctagctgaaaagkgttccacctataaaatgggatcatagtagtgcttatccattatatcttagtgaagattaaatgttagaagctgtgttacatatttagtgcaaggcctggacactctctgttaatgtcagccactgtcactcttctgatgagaaattgttatccgmacttcactcttctcagagttcagatatgatattttggctgaacttgcaatttagaaagataaaaactatcgcatgtagtaaaaatctgttggaaaatatagtactacttttctttaatgggggagaagtttatgtttttctttgaaatatgttaatatttaggcttaaattgttcatagttgctttctattaactctaaaagattgaatgattttttcagcccaagattttttgtaggtttcgttgttaatttatgctcctgtgcatggtgctatataatatgactataaaattgcatattttatatattacagttgacccttaacacgggtttgaactttttttcaataaatatattggaagatgttttggagatttgtgacaatttgaaaaaacacatagatgaactgtgtagcctagaaatattgaaaaaattggccgggtgctgtggctcacacctgtagtcccagcactttgggaggccaaggcaggcagatcacctgaggtcaggttcgaaaccagcttggccaacatggtgaaaccccatctctagtaaaaataccaaaattagttgggcgtggtggcatacgtctgcaatcccagttacttgggaggctgaggcaggagcattgcttgagcctgggagatggaggttacagtgagccgagatcatgccactgcactccagcctggccggcagagcaagactctgtctcaaaaaaaaaaaaaaaaaaaaaagaaaaaaagaaatattgaaaaaattaagaaaaaggtatgccatgaatgcataaaatgtatgtagatattagtctgttttgtcatttactctcataaaatatacacaaatctatcataaaacgttaaaattggctggatgtggtggctcatgcctataatcccagcactttgggaggctgaggtgggcggatcatgtgagcccaagagtaggcaattagcagttaaatttttgggatcagaagttatctgaggatttctgactgcacaggaggtcggtacccctctgtctcctccccctcacattgttcaagggtcaactatacgtagaaggaatttttaaaaataacttttttggcctaaatttaatatgtatccccaaagttggacttagtttaacttaacatgtgatagaaacactggaagtgttgactttcatgaagtgtcgcaattctaaaaaattgaggaaaaattcagtacatattcagtacctgtgtttatccagagcacataattacttatcttccttctaaaccccaacctaatgttcagtgatttcttttcttgtgagagttaagcttgatgctttttgatgtaagtaggtatacttgtcaaaaacagctaagaacttggctcacctcaccgcctctggcagcgtaaggaattaaccaccgtggacactgtggggaggaagcatcattgatgccggttggcaaaggaaaggccatagtcagcgcatccatgttgccactgctttgagtgagcgctagggggcggtaagaagcgattcgctaagtccccatcctaactttccccactttcttgccccaatactgaagggaagtcagaccaaatatcttgataaacaaaaagtggccagcagatagccaaagaggtttttactaaggagtgagcagttttgatttgtgattcttactgaggttggaagttcctattttgatgtcttctgaaacattatcacttccatttaactgatggggaatgccattttattttagcatctagattatttatttgaggttgattggaaattttgctttacaattctttttcatttttcagaaaaaccagttgtcacatatttatgctttacttttgtgttgtatttttaccaaactgtaggaagtacttttttcaattataaattaaggaatccctcccagagcagttacatgaatgtcaaattgagatagcctttgaattctgtttcccttatgcgtacatatgttttattttgctattgtttttaaactattatatatgtatgtatatatgtatatagcattactagaaactattttgctattgtttttaaactattatatatatagcattactagaaactatgaagggaaaataaaagctggaaccagcaaggtgatgaaaaggccactgtgggagttgaacatgaaagaatggtgctttcatgaggaaggaggtattgatgtggttttgggggctgaggtttgtttttgtttcagctaccaycttakagacaatagtgaatcagaactgtatcaggcaggcagattttaatgcccatttccaaacagagatgtctctcttagatactcagggaaagagtcacatagaccatctgtatttgttctgcttctcattttacccttgaggaatgaaggaattctgttgaacagtgccagcattagtttaggctgaaacatataattgtattgagtaataaaggaattttaaaattcctgttttttcctgtggctctctttcacaaaacaggctaatggtgaaatacttttgcaagtgttcccattcatctctggctgatgcaagatgcctagtgccttgtggtttcctaattactgaagccctaatttctttggcaaatctctcccctatagatttcgttttggtagtgaaaattactcacaagacaagatgagcactggcatctctggtctggttaaggcaacatctggatgctgagattagccatagggatgggtcatcttttctactcaggtcagcagattagttgtccttggtcagtgggctgagacatagatttcttaccacttacttgtttcctggctcacttaaaatgaatcaaagacaatagcttgcattctaccgcagaaattagcaatcatattgcccacagtcagaaagaagacaaagaatttgaatgcacttgactatcttagtggaggtctctagaaacttattgcccaaagtagggtttacagataaactgtcctctgagagcctgtaagacatgcagagtctctggcccctgcccaatcatactgaaattagaactttcatgttaataagatgtcaagtaatttggatgcacaagtaaagtttgagaagctctgctctagaacataagtctatgaagacgatctgtgctgtgctacagttataaatggagtttttagtgagtctgtcagtcactgcagtactttttacaaaaggtaaattcctctggaatatgaaggaataaaagtttattatatacacaggtagaaaaaaaatctgaactagtttttctgtgatttttaaaataatttgttgatagttttatgttcaatgaatttagcaatatgtacagagaaaactgtggcatttggctttcttaaaatcctgagacctttttcctttcttctcattttaacagaacattgaagaaagtatgggtttatatatggcatatgtaaagaaaatagatgtatattcagaaaggaagtttaaaagttctcatgcacagagataaacataatatctaccccgagacatattcatcttttaaaaatagtgatgttttgaatcataatctcagttcttaccttactttaggaaaaaaagaaagtaatttgctttgttggtcatattttgaaatttaagttttttttatttcttaaaacaaagtatcactacacttaatattttaatagttatcaaagaaatgttctaagactatatttgtaaaaaaacagtgacttaaatttgttgtgaaagtcattatttgcttgtttgcctgattctcttttgttttcttattaatctcaccatttgtcgagcatgtgctgtgggctgatactgtgcaaggcaggcaggcttgcctttgattttcttaaaaaatcaatatcctttttcagtaaaaacatctaaaaaaattcaccgtgatagtgacgtagagataattgcattaccataggaaggtgtttttttgagtgacaattagtctgttgctagttttcctttcacacctttaccttgaaattatgacatgcaacatacaaacaaatatgggagaaccagcttttcaagacgctctataatatatttataattttctaagccccgaatcagaaagtggtatcaattgaaaatatttaaagcaagaaaacactatattatccatctatttagatttttcttgacatttaggaaagctaacaattattcttccttcctggaatcattaaaaaaagtaaccctaatagtcaagtctaataaatgtaaaaaacaatgagcgatttaaattttcttttgttgtgggtttatttctttatacctgagtttgattttataagtaggttagtttaaaatatcttttcaaatcatggctgttgtatctggtttcatttacgtaatttagaattcgcatttgggaaatcttcacgacctaatttaaaaatacttttcagcagagatactgattcttatccttcatttcaagaaagagcaaacagcttgatggagctgctgcttaagaggaaactggtatcatggctattcttcttacacatcatttttcttaaggatatggtatcccagagtgctccattaatacgcaactcctgtgaacgtggtgcctgaatttgaaaaatttaaaacaattatattcttatctgctgcttggtacacactaatcttctcctgtcagtcagatgcaattaggttgaaatgttgatctgtcatatattggtggtaaggaagtaaaatgcttccttttaaatggaggaactgtgagagaggtccaaaataaattttgggcctttggtcacaaggttcagccacaaaagacatccacccaaatggtaattaccttttatgtcatgccgtgaatccacttcatttctggaaactgtccaattttctgtttgttttaaaattaattattggggaaaaatcatagtcttttttgcagcttctcagcttttgtgttttgtctgttaaaatataattactaggaaatagtaaagataaacttggttgtagatagtcttctgagtgttaaggayaaatatccttatgatttgatatctttgcattatatcagattgggcatataaagcctcatttaaagatgttaatttgtttgcttttttgaagtggtcgacatttatcaagtatttgtgccagtatgggaaatgtatataaaaaatgaagtatgatacatgtcttatgggttgaaaaaagataatgttgtgaaagagttatcagcctctttaaaggttgaatattagccttaaccatatgaagtaggtaaaaatctgtagagtgttgaatactggaattttatattgttcaactttttatattattcttggaatagattggtttttgtcttttttttttttttttttttttgcatctcttcaataagaggcttttgttgaactcgtctttagccaaatgaaattcagcacagggttgggtctggccaaaagttcaggtcgttagtgataaaaactttgaaaaatccagcttttctctgatcggtcatataattgcatatctgggcatatgtttattgaagtaattattattaatactataaaccctagaattagtcaagagaacaacgtttgggtggcaccagacaatgaatgtctggagtcgagtggcctaagtttaggtggaaaaacctttttctgaatttgagttggaaaagaattggtgcatacttgtggtcactgcctttctttcctattttatatgccaaaatccaaattacagattttaaccacttcccagtatcttaatttaattttgaatatgagtactttttgaacattactttttgtatgttagttaatgtaaattattaacagcaatctgaatagaaaagaaaatttattttaaatgttattttgctgttggatagaatttctgaaatagaagtaaatgcgttcccaaatagggttgttgtatgtattcacaaaccatttttcttttaagtcagaaaaatgtggactgggccaacagctgaagaagaaagactaaatatacttcatggtttttccatttttgtgtctaaaatctaccctgaaatataaaaatcttttaatttaaattttcaataaacrtgattgtgacttggaattgtgcgtgttgggaagaataattagttgaatgcttgaatatagaaacataaaaagcaaccttcatgcatcctttcttacttttctttttaatgaaagtattgtatggacaaggcaaaaatcaaactgtatataaagtctctctggtcacatttatccctagtgctatatcttcccttcagagtataatttttggtatgttttctagcaatactagtgtctaacctctacaaatttctgtaaacgttatattctgcatacagttctgccttttgctggaatagacattcttgttcttgcacatgtatataacttgtcgtacatttttgagtatattcttagtctaaaattcttagctttggaattgctgggtcagagggtaatttttcttctctaaaagtatctctaccaatagcatatgaaaacaccttatcacagtggggtttagataacttttttttgtcagttcaataggtgaacaatatagtatttcattttgatttatatttatttcattttgagtagggatcagtatctttgcctgtaaatctgtttatgagttcatttatatatgaactcatttctcttaattgcctgttcatcaactgccattttccctactggactgttgttatgtttacttttcatattggacacattctttgtttatttggacattagttctttttgttatattcataaattttttccctccagtttgtcatttgctttttaattatttggtattttttggccctacagaagtttttagttttcctatagccagtcagattatcagtctttttcctttatgatctctggattttgtgtccttcttaaaatattccctggtctagggttgtaaatgcgtttatccagcctttttctagtattttatcataaaatttcctttttaacctttgttgtatctgaaaggtcttttggcataaagaatgaagtagggctgtagctttacttgcttcctaaaatgttgtttccaagcataatttattgaatagtccattgattaaaagatgctacttttgtcttttttatttatttatttattttgaggaggagtcttgctttcttgcccaggctggagtgcagcgacttccgcctactgggttcaagcgatgcccctgcctcagcttcccaagtagctgggattacaggcgcccaccaccacgcctggctaattgctacctttatcttatactacattcctgtatgtatttgggactgtatctagattttgattatatcattggtatctctgatatagttatattttcataatacataatttttatgattaaaatgattctatccttttaatattttttaagatctaggttatccttgcatatttatatgactccaacatataattttgtcacctgtccaaatttttgtaacttgttgtttaattaaacttaaagttaattagagtacagtggatttcttcatgatgttgaatcttctaatccaggagcaagaattttcttccaatatttaaaaatattttctgtttatacatcttagaagagcttaaagttttctttatattgttcctattaatatcttgttaactccattttaagtgttcaaatttgttgctagtataaataggatatttcctcccagcataattttcttgaatgttatcatttttaaatttggaaactcctgattttgaataataattttgtagccagttaataaattcttgtgttttaggtatacagttatatcatcaatcaaatgataattttagtcttctttttctttcttttatttaattgcattggctagtagcagtaacaaattctacgttttttaaatactattaaattggcctataaagtgccttgaatgaattcaatttgattttaaagagcctttcagaaaggtagtcttgagtttagttttgtatttaataaaggactttaaacatcattcttaaataaagtcaaagtataaggaactaaaaaatgtggacttaggtatttgtttactatattgatattttcagattagagaactatctgtgtttatgacattgacctgtcgacttgtgtgtggccttcaactatgatggactttctaacagaacatgtcatctttaatttgaaaacctggtacagattagcaaatgccagtttaggccagtgtttcttaaaactattggtaaggtaacatgaaatattttaaggggtacatttaaaaataatagttatatctaattttaatttgtcataagaaaaaatcatatacccatttcttacctgtgtgttaatggttgacatttagttagaacaagattaagatgaatggatttaaagaaaaatttacagtacacagatgtcttaaattcttaaagagtatgagaaattgattgaaatatagaaaacccagttttagattaatattaaggtgcataaattttcagagataaagagtaggttttttgcatattttgttaatagcaaggcttagtaaataacagtactggtgataatactgaagatgattatgagtaataggttacactaagagcttttatacattatctcagaaactgattacaagaatttaccttcctggcattacagtcacaaagacatatagcttacttgtaccagattacatagctagcaaatggctatattgctcatgtattgtaaattttatttactcagaattcactccaattcatatttacatgagataattatttttacaagttatatttgcttttggggatcttcaatgaaaataaaataaaaaaattgttttaagtttttgatttttaatttttgtgggtacatattaagtgatttatgggttacatgagatattttgatacaggtatgcaatgtgtaataatcacatcagggtaaatggaatgtccatcatctcaaacatttatcctttgtgttacaaacaacccaattatactctttaattttaaaatgtataattatattatttttgatgattgtctccctgttgtgctagcaaatactaggtcttattctttctaactattttttgtacccataaaattaaatattttaagctaatattaccttatagacaaatacatgaaagtagtttgtctcgttaaatctagggatatcgctaatagttcaggcatttctaagggaaatttgccagtgtaaaagcagtctaatcatatttcattcataatttccaaatattcaaattagctagaagctgtgaactttgactgtggtctgtataaatttttgtggaatagagatagcttgtattaggtatcatataattaaagatagaagtgttgataacagaagtggtagtcagcctaagcacttttaaatttactgagtaattagaactcagtttatggccaaaatctacaaagtttgcagaaacaccccatcttttaaatattctttagtttaagattgttgtggattcttaatctgaaataattgcttcttataggtggaaataattttagagattactttagggtgtgaagccctaattttatagatgagaaaactgaagccaaaagaagttagtggttttcccacaggacattgttataaatggtaaagctaatctgatactggaatccacatccctagaattccatggagatagtttcgtgttagtgggagaggtagactttatagccagaggcattccacttagtgaaattttatttttatgtttaaaaatttttatttttttaaaatagaaaggagtctcactatgtagcccaggcttttcttgaactcctgggctcaaatggtcccacctcagcctcccaaaatgccaggattagagtcatgaaccactgcatctggccttagtgaaatcattaatttatttcaccttgatcagaagttggtgatttcattgtcattctagtcagttccaaataccgttaatctgtatatacctgttcctaaatgaaaattattttacaagtacttgatcttctctcacaatacgtactagatggaatgagtgttttttcaaggaaataataaaatacttacaaactgtaagaatactgggtcgtggcagtgtttgccttgagcatattgttaatatgattaaaaatatcaggactcaacctatacagcaaaccaaaatagagggtcttttaaaatttttctgttatttccaggatataaggtaattttaagacatgtgaagaagatgaaaaaaagaaagagaaagctcccaagcaaaaaaccttgggacttagttaatgcacacaatcctggctggaatctgctgtgtgtactcagtctccccacagcttgtaaagtcagttaaatatagtcaccgttgggttctggggacgagcaaataggaaaagaagggaaagctggaggcgtgttgtagaaatacacttcaaagtaatttattctaacgctttttaaagccctctttgtaaatgcacttttaaatagtagttctgtttccttgaatccacgcaagagcataaaatagactggattcagaactggcgtgggaatattgtcagctccattactgcctgtgttgggacagctgctctgctccacgctgcctagtttcttttaatggacctaggttcaggtggctgaaaaagccattctgtggtagacgcctcacataatccttatgtgcgtgtttattgtgtgtgcctgttcatgrgagttctgtggcagttaaattgtccacccaggatttccagacagaaggaaacacacatgtaagtgatgcagtatttgctggtggtgtggctaaaaaaataaaaagtcaatacaccttgttctctttacattcattttaatgaaatcaacaaaactgatgctctcttcaaatcaaaccactggctgttcaatgatttttccaattaataagaatatatagttgcctaccttttttttctgtgagctaagcattccaagataaagcccttaatcatcttaaattgtcggggataactttgagcaagcagaagaaatgttatgtgcgtctatttttattcttttccgtattttatgtcatcaaggtcttgctttcctcattggtgaagcagttatattaggtgatccctcaggtgctctccatgtctgatgtgatgattcgtaaccatgctgtggaagcctgctgtatcagcggtacctgcatgttgtacctctagggtagggtgcttgtgttacagtgcagtccagatgagcagtttctcacgtgttctaccgtattgctgcatgtccgtgaatggtgctcccatagacttactcagatttggggtttttatgaaacacagcttcctaaacttcacctctttgacaaagctgatataatacacaggatgtaataataggtctttgagaaccttccatcaagactaacttcaggccggaygtggtggttcatgcctgtaatcccagcactttgggaggccaaggcgggcggatcacctgaggtcaggagttggagaccagcctggccaacatggtgaaacacctgctctactaataatacaaaattagccaggcgtggtggtgcatgcctgtaatcccagctacttgagaggctgaggcaggagaatagcttgaacccaggacgtgaaggtttcagtgagcagagatcacaccattgcactccagcctgggcgacaagaggtaaactccatctcaaaaaaaacaaaaacaaacaaacaaacaaaaacttgatagatgtgaatacaaactcagagatcagagaatgcttgtaagtctcatatttatactttgctgcccggcttacgacttggaggtgcatgttgaatcactgaatagatctattaactggaggtgtccacactgcaaatcagaatttgccacacttggcttagtcataccagcatttaatttattttggatcagcccttctagcaaggaacttaaggttttactactctaaaaatgcttttgaaaagttatttaccctgttgctcactcaacgtctgacaaaaatgtgaaagtgtttccaggaatagtaaaaatgtgtttcaaaacacaggactgaaacagggagtttaattctatggtatgggtgccgcactttgagaatgtctaatatacaacaacctttttagaggcttttacccaagattctactcctaacgtatttcaaatgtgagtcaatatataaatattttgttaagacaacttgtcagcaacacatctgtgtcattatgcataaaatgcaactacttttagtttctacgttgtggaattatctagtatgctcaggggacttgctctaaatttaaagcatgtactaggcttggatacatctttacatttttttgagtctcttaaagaaaaaggtctgtgttttgtagcatgatctgctttgtaagcatctcattaagaaatgaatccytgtgagaaatacaagcttgttgctcttctcacttgatggatggtggtggcatgtatgtggagaggggagggataaattgataaatgtaggggactctagagtgatgatctgggaatgatgcagaggtttccaatgtcttaacgccagactggagataattaatgctaaggtttcaaaattataggagtccgatgtctaggtctttccttccccatttggaattttatcaaaatatccttttggaccaaatcactggaaactttaggttcagagtcttatgcatctcttctgggctagcaaccaatgtcacgtactgctgaaattagggacgctaaacgtgtatgtgagtgggggcaagctagtattggttttctactcttggcagagtctgctgtgtcagaggtttaaatggttaccattttgattatcttcatgatttgtttcagaccatcgctcttgcattttggccaaccggtaacttttttaaggtttcatcaaaaccaaacagctttctgaatagtactgtttttctcttcatcycagtatactgcctttgactctacaatagtaaaagaaaatagacatcttgagtttaagaatcaactgggtaagtataagtcaaataggactcctattttccttcrcctttggtcctgcagtgccagttaatggtgtaccagatctatcagcaatatcctctttccagtcttcatacccttgggatgcaccgttctttctaccaagaataatatcactttcctcttctctgctaagtaagttcctttccatctccaaaaggctggctgaaaatttatctttaggaagactttgctgttagattgtacttaacagttaactcttcctttgttccatttagggggaaaaattactttgtgtattgtagtagaaggcactctgaggaaagaagatcaacactttcataccccttcaggaactgattgtctagctgaagaaccaagaaaaaaatcaaacatccctactataaagacattttgagaggggcgtgttgttaaaaagcttgtttgagtgtgcaagaatacagagtacaaaagaagttaattatagcaaaatacttgagtgagccgtggaatttggccctttctgatagtatcataagatcacaaagctttagggctacaagagtcattagagatcatgtaatataacataattcctgtctgtgagtattttgttaatgccggagactcaaaatgcccaaaacgaagtataatcttttcccaccaaaccagcccacccatttttaccattcttcagttaactcgactgtcttccttcctcttgccctgtaactgttgactttgcccatcctttatgtgttcatatcactacccttatttaggaacttaaccaccttcatatgtcttcaaggtatatcctacatcttgcggtatgagcaacttcaacattggaaaataaatgactgttgatcttgtaaagtggttttaccaatttacagtcctaccaacagtgcacaagaacatgtcttcctaacatatcttcattaataattgattttggtagtttatcaaactttggctaatctgctaggtgtgaaacgttatttcgctgtggttttaacttgcatttccatgattgctaatgaaaactcaggatctttcatgtgattactggtgacttatgttttgtcttctatgacatacctgcccatgcacttgccagcatagttgtctctcagtatgcatgagcgattggttccaggaaccctcatgggtgcttagtcccgtatatgagatggtgtggtatttgcatataacttacgtacatcctcctgtatactttatttttgagatagatgtcgctatgtagccaggctggtcctgaactctgggcccaaggcatcctcttgtctcagcctcctaagtagctgggactgcagtcctccgtatactttaaatcatctctagattacttatataatacagtgtaaacactgtawaaatagttgttatactatatttttaaatgtggcattgctgtttttttattgtttgttttctgaatattttccatctgacgttggtttaatccgtggatgcagcgggccatctgtgtttccattgggttgtctctttattttatttatttatttatttatttwttttgagacagagtctcactctgtcgcccaggttggagtatagtggcaccgtgccagctcactgcaacctccatctcctgggttcaagcaattctcctgcctcagcttcccgagtagctgggattacaggcatccaccaccacgcccggctaatttttatattttttttagtagagatggggtttcaccctgttggccaggatggtctcgaactcctgacctcaggtaatccacctgcctcagcctcccaaagtgctgggattacaggcatgagccaccgtgcccggtctaaaaatttgatatttaaggcttcttagatacgtttggtrttttgggtactaaatgtttctgttatatgtgagcttacactatacttagtgcttaataaacccttgaaatctattcatactacctgttatcatacacctaattgaaaattagggattcttgcccaggcctgcgtctccatcctcatctttagtgctgtcccaggaccctggccccagagacatcaaggcacagcagccaactggactggccaggttgcctttttattgcccagtccctttgcttggaaagtccttcttttattcttatcctcgtggaagcttctatgtttcctttattgttgatgtgcttygagtgctgcctttgtggatctttttctcaccttccagaggccttcattgtgtctcctacctggccttactttgtgcagtcactatgctggggatgtagcaggcacagttgctgaaggcttgaagtcaggtagtctggtgtattatttacggtttttattttctatatattatgatgttttgacatcttagaaaccattgtggttgggaagaggctgcccttgcaggtctagccagttctgagagggagccagggcctagccaggagcatgcctttgagatacaaaccaactagtccatacccagacctcctctatctggcccttacacttcaggaagcagtattcccttgcttacatcattcaaggctaggtgccaggcaactagagaccacctctgtagcccaaagcctgctgaaattattcaacttagccactcctaacctgttcaccctgccccgccttgtttttcctggaagtccattaaagactgtggcctagttctctcctcctcctgcccactctgcctctcaccagcctgaggcgttccagtgtggcctgcatggcgggcctcctgtctctaggatcactgaggacaatcagctgattcctgagcctctactgtgtggcctcttgtgaccacacctgactgggatcacctaaaatagcatagaacgtatggtttgtaatcttcctttgccctctttctagctggtsacctgacctgacctcctcaagactctttatttcctcatccttaaaattgggataattatgggamcctccctaaagggttgttcagaaggctaatgcacatagaatacttccagtgctgcctgtggtaaatattgcctgttatttttattattactgtttttacatatgtyaatggacacaactgtcttatttactgcattgctgttttttgaaggcaaggcatctctgtaaccttggaccacttcctaaaacagcagatttctgatgaatgaatgaatgaatgaatatgggagggaagaattggagccaagatatggaatgttcacgtgaagatgtttgtttttatttggttatgcttttgacaatggaggtgatagttaaatgaagagccttgattcctttactaaaaaggctggatttaaccagagggacctgtgatttctacactgttgtgaggagccctgagttacctggaatgcctcaagatttgctaagaggtggggtgggagtgtgacacaaagggtagtgggaggccactgcttgggaggcgccttgcctctcccacagccattcacagcttccccacccagaaaccagacagttctgtggtaatcccttgcatagatttgatttctgcttttaaaaaaaattactttagaataggcaatggaaatcaagctgatttttaagtaaagagtagcacagtcagtttatcctggtgtgtgggtgctcccacctggatgctggggcaggaagaccatggacactgcccagatgatggggatgggagtggatggcagtggttaagtctgagaagttctgtaggggaaaggagagcccgtgtggctctgcagagaaagggtcagtagtgcccctcaattgacaatgtgggagaccagagcccaggggtatctcatgttttaagacaaagaggccaagctggtgatacaggtttgctataaaagttgtagacatcatcagggcattggcgtgtctgctggagccataggacctgtgagattagtaacccaaggacaatgaattttaatttatggagcaaatatgtattccagccaaccagcaacatcatgttgagcaatgcagtcatggtcctgtccttgtagaccctacagaccagtgggaaacagtggggtctgatgcaggctggagggatcaggatgcatttctgagaaagtggtggttgaatcggcatttagaattgtgagttccactgaatgagtgtgtgagggacaggggcagctggaagagttgaggaaggaccagcagcttatgccaagctcaggagcgatggatgatggaccccagagaaagccagtgtgacaggcaggcgagtctgggggcttcctgacagttaactagaggtgcaaagagtggaaactctttcctccaaacttgcccggccaccttgcctgacctttcagttgccactctcctgattcttttggtcttgtgttagtccactagggctgccataacaaagtaccacagactgggtggttcaagcaactgaaacttattgtctcatagctctggaggctggaagtccatgatcaaggtgttgtcagggttggttccttctgagggctgtgagggaaggatctgttccaggccccttaccttgccgctggtggttttctggcaatatttggtgttccttggcttgtagaaacaccattccacttcatcatcctgtgacattcttgctgggtgttgcctgtgtccagattttcttttctttctttttttttaaataaggacaccactcatattggattaggggccacctactttagtatgacctaatcttaactaattacatctgcaccaaccgtatctccaactaacatcccattcccaggtcctggaggttagggcttcagcatatacattttcagggggacagaattcgacctataacagatcccgcttttgccaggtattgttgttattgttatttaaacagctccttcgaatatgaacaggaacctgctcttttttstcttatggcctagggacaaaaacgtaaaattgaaactggcttgtagtaaacgtgcagtaaaacttaaatagtaaggtctttgttcaagtgccataatttacctcccccgtataagaaaatacaagtgcctattgttgggcattaacctaccagacagttaccgccaaatggataagccggcaaccagtggaaccaaaatgtatgctataggagcggggtcggagagaagggggagtgtaggtgggaggaggagtgttgtgggggagaagaaagagaagagagagagagagagagagagagagagagcacgcacaaccaaaaccaaacccagacttcccagtgtgtcgttaggtcgcagccgtgctgagtcagtggccttggagatggcagggccacagtgtgtggctgccggccgtttgtggtcagagatgctgtatttagaatgtggcttccagcctacctggtcacctttccttgacatcctgtggcttcccaaaatgggggacctgctgtcagttcaagtgaagtttttaaacggcagtagtttcttcccctcccctcttcatccctgcctgttcagaatctgtttccaactctccgtcagcgttcacggttttatgaaggctgaaattcaggaggtgggcacctacctgtaggcacataagctgggatacgttctggtgggtcagtgcctgtgctacgcaggttattcaatattttgaatttcacccctagtttcacacaatatttttgaaattcagtttttattccagctctacatgtgcgtatgataaasaggcctgtgtccagtttaggtcatgaaatcttagacttgtggaagctggtcagttttgaggtccagcttcctatgcagtgtgggttttcttctcctgtggcagcctgataacttgtctccacaggaagatccatactggccaggtgcttcttactgcagatgcccatgggcagcttcctgttgacctgatcccactccccttgatggtttcacctttgacttttattgaaccgtttgtagctcattttttgttattaacaatatattttagcctttcgtttacttgaaggtactgctattttgtttcccatttgaatattgctctctagcacaacacttctttcattcttttatgtcatttctcactcgtcacactgtgaagccactttagtttgtcagcatccctcatgacaggagcacttcccagaggaggtggttccatcagggcagagttcactgctgtcagctgggagggctggctcagctgctgacatgttttatcttccaaagcaatgcattctgctactttgaagctaccctgaatccagggtcacagggtcctggatttcctcaccccaaatggttgacttcttgcaacatttcttaaaaaccttcgatcgtttttgcattgtttgaataaagttcagacttacttgattaaattgccttccagaatgtgacttgggttaggaattcccaaactttgttagaggaatgttaggtatgccagatgctaaaaggtgcatgctttcaccaccagctctctctttctgggaaatgggtattctctcattaaatagactgggaacgactgcttgctagattgacctcttgctgattcacaaggtcgctttgcatgttgcaggttttgagaggttctaagctgtattagtttcctatggcttttgaaacagactgagtggcctaaacaacacagctgtcttctcacagttctggatgtccaaaatcaaggtgtatgtcagaaaggccatgttccctttggaggcttcaagaggagaattccttgctttcttcttctaacttctagtggctgctggaatcccttgacttggggcacatggccctaatctctgcttctgtggtctcgtggcctcgtcttctgactgggtgaaatctcccactgcctgtttcttataaggactctcgcgattatgctcagagttcacccagataatccacgataatctccagtctccccaacgcaaggtccttaacttcatcacatctgcaaagatgattttctaatatgaggtatcagtcacagatttcagtggtgaggatgtggctgtgtcttttgggggccattttttagcctgctgcattaactccacagctgactcactttacctgttcatggctaaacacactttgctcgcgcttcgcacacctactcctcctgcgctcagctgcctgggctgtttatctgcagcatttatcttggactacgcagctcaagtctttctccctctttcacgacgtcttcctgtgagttctggcttccttcttttcattgcaaagtagtttggtttatatatatatttttaacacactctgcatctcttgcctcatctctcatgaaaccctgtgctgttgttgaacttctggcggtgtggaatagtggataagagtctctggagtcagactgtctgggttgaaatcccagttccccagttaatagctttgtgactttgggtaagtcacttaattacttttgcctaaattccattgtctgtaatgtggggataattagagtaaagacttctcttccttgtgagaattaccacaattaataaatacagactgccatgaacacagcctctcatcgtatgatcaggaacaatagctataagccacatgtgtctgtcgagcagttcagtgtgactagcgtacccgaggaactggatttttaagatggaagcagtgcacgatatatttctgttaaacacagttttcttgttttggtaagactacattagcatacataaacacactaccaatcttgctggtgtcaaataatttattcagtatatactttttctgtgttctcactttatagtatttattaaatattttgtgcagacagtgcagcttatagtgatgcaagtacattatcattagtaattaaattgaaatgtttgytttaaattttttatttcaatagcttttggggtacaagaagttcttggttacgtgggtgaattgtatggtggtaaaatctgagatttcagtgtacctgtcacccaagtagtgtacatggtacctgacatgtagatttttatccctcatcccccagaaatgtttaagtgatatataaaattaaggtaactacatcacttgttagtaaataaatatggacagtttttaaatttgaagtgaaggcatactactgttgcggagtgagtacagatacagaaattagtagtatgatcaaagcagtgggaacacaaagagactagggacttcatgatgaatctcatttgcaattgtataaaaaatgtaaagaaaatgaaatgggcaatattaagacattttcaagaaatctgtggtagatttgatgagaagttttttctcaaaggtcaatgaagaattgatggaagtaattgcctgaaagcagaatttagtgttttattagtccgttttgcattactgtaaaggaatacctgagaccgtgtaacttataaagaaaagaggcttatttggctctcagttctgcagatgttagcatggcagtaacactcattcatgagggatctgtccccctgtctcaaacacctcccactagaccgcaccttcaacattgaggatcacatttcaacatgagatttggagggacagaaatctaaactatatcaaatgttcattaagtttaaaaattttaacagagtatgagcctgtaactttggccacctatacagtgtcttggattcatgcactatagaggaagccagtttaagatggagagatggcagaaggaattattgcaggtaccaaaattttattagaaaattatgagaagagacaaaaatatatttcacaaaaacttaaagatatttttcactaaacagttgcctatagactacatgacccatttgaaatttgaaacatttcaattactttcctttagctttgtgtaagttatacagtatgatgatccattgtccgattaatacagactttaagatttataaataaatgttgtaattttttttgccaaaaataacagatttgtggcagagatatttttgaatgttttaagaacattcaattcaaacatttgactgtttcaaagaatttcagatggatatgaaaaaattaatttctattacagttgacccagctctcttagaccgaattctgtatttattggaatttttcaagaggctggtatttctcttattgcttcattcgactgtattctgaagctggacagagtacaatacagtagttaacttggcaaaaagtgtgacacatactagtagttaaaattatccagtctataagtgtaaattcatagatcattgctggtttatggacctgcagaaagaaatggaagacagtgaaggcagtgaccttgtgatctttagcagcacttgttggtggagtcctggacgagttttacacagatttctatagcataatatttactccaaccaaagatgatcttttgttgaaacaaaaaggggcacttgcccaagtattcagtacttaaaaagggaatatgggccgggcgcggtggctcacacctgcaatcccagcactttgggaagccaaagtgggtggatcacctgaggtcgggagtttgagaccagcctgaccaacatggagaaaccctgtctctactaaaaaatacaaaattagccgggtatggtgacgcatgcytgtaatcccagctactcgggaggctgaggcaggagaatcacttgaaccggggaggcagaggttgcagtgagccaagatcgtgccattgcactccagcctgggcaacaagagcaaaactccatccaaaaaaaaaaaaaaaaaagggaatatagcagtatggtttatgttttctgactcagatcacactacttttgaatgaactaatttgaaagtctcaggaaaggacaaggtaatttgtcaactagctaggcagatattagaattcatgttgaaattgaaggttttcataatataagtcaatagtaatgattaatgtgcagaagattttaattataaataccattatatatattggctacaaaaactagaatttgaagagctctttgttgatactgataaatttagagttgttttccaatttatgcaaatattcctttgaatccagtgttaatactgacttgacacaagagttaattagcttacttaacttgaaccgatatggatttgaaactgatatgcttatacttcaaagtcaaatcagtttttctttctttttttttttttttttgtttgaaatgaagtctcactctgtcacccaggctagaatgtagtggcctggtcatagttcactgcagtcttgaactcttgggctcaggcaattctcctgtcccagctttccaagtagctaggactacaggcctgcctcaccatgcccagtttactttaaaataacaaacattttctttgttttttttggtacatggtctcattctgtcacccaggttgagtgcagtggtgtgatcatggcacactgcagccttgaccttctggactacaagcaatcttcctgtgtcagcctcctgagcagctgggacacacccagctaattaaaaaaatattattttaaaaatcttttgtagagatggggtctcactatgttgcccagggaggccttgagctcttggcctcaagccatactttggctttggtttggcttcccaaagtgctggaattataggaaggagccaccacgcctggcccaaatcagttcttttaaacaaaagtgaaccagttttgtcaatgtacttgtgaaarttaaaggaaaatgattttttggatactcaatttcgttatgagaaaacttttaagtatatttggtacaggttgggtacatgaatttactttttcaatgatcagttttatgaaatctaaaacagatcaagtatttctgatgaaaatttacatttgaattgtgatatgccataagtgtaaaatatagtcatgtgctgcataatgacatgtgggtcagcaagggaccatacacaatggtagtcccataagataccatattttcactgtaccttttctgtgtagatacacaaatacttacaatagtgcgacagttgcctacagtattcagtacagtaacatgctgtacaggttgcaacctaggcaccataagactatatcatatatcctaggtatgtagttggctctactacctaggtttgtgcaagtatactgtaatgttcatgcaatggtacatttctcagaatgtttccccgttgttatgtaattcattgactgcgttggattttggagactttaatatgaaaaagtatgtaaaatatctggataattttttattaacatgtgcataaaacattctagatatatgtgttaaataaaattcatctttatctgtttctttttaccttttttaatttggctactggaaaattaaaaattacatatgtggctcacattatatttctgttggccagtgctggcctaaaatgtgagaagtatgtagtgaatgaatgtcggcattaatgtcattgctaatatgatgatgatgatgatgatgatgatgatgatgtggtagatgtgttgtttccttgtcctctcgctagattatagaaactcaaatgtaggaaatgcatcttattcttattttcatttactctgtcatgttgcatagtacatcagatattaatagatggttattagctgattgattgctccatgatctgcttttaacaatgaaaattcagacctcactgtttttaaacctcaggataaaggtatccctttaaatgagctcaggcaagcatgcacacactcactcacggatacacaaatacacacagtagcacgttgtttagtatacttaaaggggggattagtttaagcaatggcttttgatagtggattattgcaaggataattgaagatacttaaatttgaaatattattttgtgctaaactgtatatgggtttttatataaatttattaatttctttaaaaaactgctgtggcatcttattttggttgaaacgtttttattttgattgagggagaggtattgtggacataacactgtaattagaattaaacaaattggtttcatattctgccaagttctctaactagctctatgaccttgaacaagggatttatgctttcttcaattttctgatccggaaaaatgaggataatatcagctacctcaccaggatgttgtgagatataaatgggaaaaaacatctaaagagtacttagcaactataagaaattacaggaatgtaagatattattttgatagaaacaataataaatactttgctgtatagtgtaaggttgaagaatgtatgttatagtataaggcaaactatgtctatagaaagttgatagcttaactatatgactcaaatagttgacttaactatatgacttaactatatgactcaaatctactgtcaaatagccaagatatatcataaatattaggagagaatagctgggaaacagaagtagttgttagacatttaagtattttaagattagaccaaaaagtgcatgtggtcaggctagactgaatcagagacacctacctgcttttcagcttctacactgaaggtaagactcacttcggccttagcataagggcctggctagattggcaatttaaagtttggtgctattgagaccaagatgtgggtggtggtgtccaatccctattaggcgaggaagttatttttccacctagagaactccactacccttacaaagctctggtctttttcagtggaatcttgaaaatgttttctatcagtaccactgagtagagattttaaaaagtatrtggttgaataagagctaagcccccgctgctgttggcaaaagaaagcaaagcaacaaaataaagaacaacctaaaagcattagtcctatagaggttcaaactgcagtctcagtatctcgccaactgttcattttatcccctttatttctgtggtggagctgagctatctagawtcacaccatgattgtgcagtctacaaggcagtgacactggaagacagctgcacaagcatgaaggaggcacagactttgggacttttaatatgtgattcctccacgcccaccacaagttattttggataccttctttgggtggcagaaccgaaatacacaatatagcacaacctaacaaatacagagatttagtagcccacagaatggagttttgccaggtgtgcctatccccagtcaccacaccccggtgaaatcaacattctttgtgctaacttggagctctccttgcctccggtgacttaaagttgtttttacaaaatttgatatatccttgggcactgaatatgagttagctttattagtttaatgatctgcacctttctgggtaaatgcttacagatttctacatttacgctcctgatatatgcttgaattttgtctatttttcagtaattttaagtaacaaaatcacagttcttaacttgtatgtttcttcagtgatttacaatgtttcctgtctgyctggaactctatagtggcagagcagatctgaaatgcatcagagagttgacaagtgacatttctatcatgacctgcacatattttaagaacggtcttaactggattaattatatccttgaaagaaattgggttaaaaagacaagaatatttttaaatagttaactctgtgcttaaccaacagcagtatttcagtagcagactgttaaattaatgtacagtgaaatagggaaagatatagtcatcagtatttatgtatccttttgttattcttatgacctttttaaagccataaacaaaaggacatttgttttgccttcctgccttagccaggacacaaattataaaaagaaatgcacaaggaaacattaataaatcaagtaaatactaaaatttcataattcttctctttttactgcagtttttttccttccaaatttaaagtttttcattaagcatggccttgcacactggacaaagtgcagctctgttttagagtacctgcaaaacatcatttcctctataaatcactcgagtgattagaactgcaaagcatggactttgcaaagaaacagcctttaattgtatggcctgtcactttgagagatagtgagaaagggaggagagaggaactctaattttatttttcatcagttttaattttttaatatgtgtagctatttactgcaaagaagttattatttcagtgtgaagttcactgttaatttattattaacttccctacacacctgtacaaatctttattaatgtatttggaaccctggttctaaaaactttcagctagtatattgtaaacttgaaaggagttactcacatcagcactgaactgtccggttaggcagatctttaaaaggatctgatagggatattcttcttgtatttcctgtgtattttcccaatcctgatttcatgctcgtgtggtgatttatttttccagggcactgtgccatccagtatagaagaggtcagtgtggtagtatttcatagcttttctttcatccacaaagccttgccaccttctgtccatgactcatgcatctactggtgttctctgatagcaagaacattttgattagctgtacaggttacctggttattattctcatgctgtccacatgtgggtggatgtgtgtgaaatctggaggtcctagccaatgttgaaacataatcctatctagaccaggaaatgcctggcttcccagatacttctcagagcaatagggcagggactaaatttcttatttccttcctgtcctcctccatcccataacacctatggtccaaatgggtgtttgatagtcattattaatacattctatagaagccatattttatgtgaaaatatctctaggcccatcattttccattctaataggatccattatagagggatcgatcctattagtgaagcaaattgccatataaataatgtattacaagtagacatagtttaaatccttgttctacctactaactattagaccctgagctattacctctcaattcacctcagattcctcatctgtaaaatcgagatgaaaacagtaccaatgacatggggttattatgaagagttaaaaagatactgaatgcagagcacttagtgcatactgggcatataccaagtgctgtacaagtgctcactatccttcttagtactgctgtcatcatttgtagtgatagtaggccatatgaagatttttttttctctgatggatgaaaacttcagtatgagtggcaagaatgggatggagggagggagaggaaaatagaggttcaaataaaaggagcttacgttaagaaaaaaaaaaaaaaggaaaaccagtgagatactgtatgccttgggcatgcttgtattcacgtagtgatgagcaggtggactcacccttgctgtatctatatattatgtaccacctagcacacacgtaggctgttaatagatgcctttggatttacagatgttctttaacttacagtgggggtctgtccctataaatccttcgtatgttgaaaatatcaaaagtacatttttgatttacagtatcttcaatgtattatgggtttatcttggactccattgtaagttgaggagtgtactgaatgtgtaccgttttcataccatcatagagttgaagaattgtaggtggatccatcgtaagttggggactggttgtccctttgaggcttctccagcatttctgggactgtatttattggagtatctgtgtgtgtgtgtgctgtttttctcctaatcatttaattaaaaattaatctttctataccttaccaacagttgcttcctttgtacctgcttgttttaaaccctttagtctcatttttcttatagagtttgcctaaattatagaaaattattttagtatgttgaaagtagtattattacacatgttgggttgtgcaaagatgtgaattcctgagttcacattgtatttgcgttcttccttgctctaatattatactaagggtttacaataatcatttgcaatataaaagagactgaagatttgctagcctgcttcaaaatatcagtttttgagtggcttttattggaggtgaaaattagtcaattttgtacatgttcttgatacttccaagaacaaaccaattggtaaaacacagcctactagaaaaataggtaaagtgtatatataattccctgaaaaaaaaattaaggccacaaacaccaaaaactctgtagtgttactaccagtcaaaaaatgaaaaaacacgtctgtaccattttttaaaaacctatcacattggggaaagttttttttttaaattaatcttttagggcatttcttccctgtttgatattttttatatgtaaatcttttttttcttatcaaactaatcatggacataacataacattgcaatgtactgaaactgagtgtgttttgggggagagaattctgtgccatggtagaccaatatcaaggatgattgaaagcctctggcctctttctgaaatgctgatacttggtkagccttacactcatcacccaatactagaaggtattgtgtctggccacagagcggctctcttttcttgatrggtttgaggtgtatgtgcaaccactgagcacctgtttgcgaggctattgcccttgaaaggagggaaggggtggctatgtaaagagtatcttagctgctggacataaacgattcttcattattcagaggttattgatcatgttgctggattgcagtgcttctctgtatcaggaggtaaatcaaaggaagggaaagttggttctttggtgacagcagcttttatggggaaatatttttcacctttgaagactataggagatgggagttatttctgtgttttaaatattgatggtatcctcatttcctttctactaattagttaattattgctctattgataattattggctctatttttgttcttcactttggtaattccatttgtctgttttaccgggttctcaattgtagtcattagtccagcctcttcattttagatatttccccggtattttttagtgcaaaattctgaggtctgggagtccagagacctggttttcatttttattttttggttgcaggttctgctacttcctaactgtgactgtacaataaacatttacctgctttgaatctccatttcctgatctgtaaaatgagagggttggattaattaatccccatggtcttttgaattttgtgagtctgacagagattttgtccaatgatttgtgttacaaacatgacctaggtataaacacctttctattatattctgtctccgtattcttcacagcagtggttaaatcattggaagttttcattctcattcaaaacagcatcatttgttaatcattgaagtgtttgtgttttgcttattggaggcacagattaccttgatattgtaattccgattagctgggaagatgccttaggagtaattagacaacatggagttaaagaacataaaaaggcagtgcaaacgagtgctttctcttcttgcagaaggggktattctatttcctgatgcctgagatgatctaaacaaagagattsgttttattagtggtgtggtttctttagcccagtaccatgaccgtatcctgttcaaagaagccgccacagggtgcttaagtagaaacatacagtatgatttagcatgcagttcagaggggccaggttctcacattgcatgtaagaaagttcccttttcgtttgtctgtctgggctacttattcatctgtattggaagagaggagaaaaatgctagtcttcctgtgttgcgggaggatggcttgccctcgtacataggtgttgggatggggtgtgtgtgggggatgtgtggatgtgagatcagtcttttttttagccatctgtggtcattgagaaacacagaaactttctgtgtttctttcagcttttcatagttgtggaattttaggtagttgtcatactgtagtcaaaacatgattctgtgaatttctggaattggtctttaatttttacataactctgtctggaacatttctgagtrcttcatgaaaagtgagggtccatcccctcggaagaacaggataggcgtcaggaacactgaaacctggccccatgggaccctggtgccctgccctttggccccaaagctggacctacaaccaccagcaatctaaatccacctccaaacaacactgaacaactgcatgggcagtgccagtcccccaaaaacccagaccgggaaaatctcaggtgctgtatcctttctccctcctctgagctctggagtgttctaaaattacatgacttctctgcatttgggtcacttgattagaactggaagcactgtttcatccataaaataccctgtaatggaaaatgactacatcaacttggtttgaaaatgtatcttttatggtctcttattattttgttgggttttgacatgttttggtgccaggtagaggagtgggaggaaggagattattttctacttcaaaacagtgggtggctaggattctagtcctggctttgtctgtaactagtgtgatattagaaaagttggctaacccccctgtgcctcagttacccgagatgccaaatatctgcccaccttcctagcttagttcttgcgagagtaggatgggtggctcacacctataatcccagcactttgagaggctgaggcaggtggatcacctgaggtcaggggtttgagaacagcctggccaacatggtgaaacctgtctctactaaaaatacaaaaaattagctgggtgtggtggtgggcacctgtaatctgagttactcaggaggctcaggcaggagaatcactggaacctgtgagatggaggttgcagtgagccgagattgcactatcgcactccagcctgggcaacaagagtgaaattctgtctcaaaaaaaaaaaaaaaggaaaatatttctgtgtcttgaaaatgttaaagccatggtgattgctcaaaatagtatggcatttaatataaaatagatacccttaatagcccacgtgtaaaattaaacttaaaagggtcatattgggacattatctttacaactaaagagttttctgtaacaaggattgaacctaggcaggactttataccagaataattgtgttcatactgaatgagttacagatttagtctgtttgttccttgtttcagaggagtcaagcgtcasaacttaatggtggttgtaggttctcatttgctgtgacatttcagtcattagtctgattggagcattctttatcagctctgtgcttcaagaggaggcggaaaccaccatcctgttggcttggcggacgtctgcctgctcagataccacgtctctcctggagtcccccaggggcctggggaaaggacgagggggcggccagctgggccccctgggctggggaccaggagccctcgctcggctcgtttcccactcattgtgcggcccaggccctatcactcgagaggcctggcaaggaagtgaggaggaagccggtgccactactggttcagaatgttccagtgtggttggaaagtctgagaagcagcctgggtgagaagaacaagaccttattgacagggttcagtcctggtcaggtctgtttcacatcagctctstaaataatcacagctcttgccacctcagggatctctagcacgtttacctctggcttttttttttttaaacatttaatgtagctatggtagaacacaaagcattcaaactttttattccaagagaatgattagaagtatagtgttgcctgcttcaaaacaataatagcaaaacaaagtccaaacttcatactttacagggctttccaacctactgccaaattattagtcttattgcaaatatttttctattaagctgttttctcattgattgatttatagggatattgattatcctataataacattttcagtggttgtgtagcccgacttggcttgtcatggtctgaattggtcagtgtcattatctaacttagataatggtcagtgtcattatctgacatatattttagatatgtaaaaacggtaagaattgtaagaatgggattaaaaaagaatatgccaaacattttctcttctgcacatgaatctataaactagaatatttacctcaagaagtcagaagaaaatctgctggagattttagccctggcatggtggctaacgcctgaatctcagcctttgggaggccyaggcaggcagatcacgtgaggtctagagttccagatcagcctggccaacatggtgaaaacccgtctctactaaaaatatgaatattagctaggggtggtggcacgcacctgtaatcccagctatttgggaggctgaggcacgagaatcgcttgaacccggaggcagaggttgcagtgagccacrataacagcactgcactccggcctgggtgaaagagcgagactccatcttaaaaaagaagaagaagaagaaaatctgctctaggttttaatgaaccacagaatgtgtcccttgtatgctttgccttgtcattctgcctgaatttatgcatgacttctgcattaatgtagtaaacacacacttggcagtcctttcattttcaggacccatagggtgtttccaattccagcttttggtcaagtaataagaaaaaggttttttgtttttttttccccctggaatatctggtaggagcttttgaagctctaagggatatttaaagcctgttcaaattgaagaaaccgaagaaaacccaaacgtccccaaccacttctgaggacacgaatttccagtggttggagcttcccatttttatcttttcgtctgaatgagatggatggggaccctctagttgggcagaaagcagaggagcagttatgggatcgactgcaaaatgtctaaccaatttattttctgagagaggctggtgactttttatagcacctacagaatggtgatttttgaacttttgacctattaaatagtttaattatatgtctctcatactttccctctaaaagtggcacatgaaatattttaggtcaaatgaagacccctacccagaaattttaaaaataattattaagaaccagttgagaatctctgtattttgtcagacaccttcattttaaggcaggaattagctatatgatttaagattaatacaaaggaaatacgattttataaaaaaagagaatatcttctttttttaaaagttcatttgtatgtgtgcataataatacaaatctgatccccatccctgctccctgccaccttaaaaccttttcaagccttcagtgattttccagaacctttagggttagcagccagctgtggccattgcctggaaaggccagccctccaaaggtactcaccttcctccacatccccctggccttctttattctaccatggagtcttttcctctccacactagcccttctatatccccaacccacctagttcccatcttatccccttccccagtgattttttttttctttccctctggagacaatgtctccctctgccacccaggctggagtgcagttttgcaatcatggcttactccagcctcgaactcccaggttcaagtgatcctcccacctcagcttcccaagtagctggtaccataggcacgagccaccaagactggctaatttttaaagatgttttgggctgggcatggtggctcacacctgtaatacaacagtttgggaggccacggtgggaagatcacttgtgtccaggagtttgacaccagcctgggcaacatagtgagaccccatctccaccaattttttgttttgttttgttttgttttgttttaacagtgctaaggtctcactgtgttgctcaggctattctccaactcttggatgcaagtaatcctcctgccttgacctcccaaagtaccaggattataggtgtgagcaactgtgcctgacccccagtgatcttgtttaatgaccccccagaattactaagatttctgctttatgttgctatgacaccaaggcattctgcccccatattctgcatgtttcacacaactggtaagtggcaaaacctaaacccaaatccatctgattctggaacttcatgctgtctgttgatgcatatcactttcctggatttcattttcatcctctgtcttytgtggagctcaaatgaatactgtttgtgaaaatgctttgtgtatagtggaacaccatgtggtatttattgacattattggtgttatttttattttaggttgccattgtccttaagttaggtagccttttaaatgcttttctcaaaactcttcatctagaccacctttctataccactatgasactgacgttttgcaattttttctttctccccaggatggttcctacctggctgagttcctgctggagaaaggctatgaggtgggtgactcaatgggaagcgggcgcaggctggtggggttgctcgcatgcagcggccacatgcttcctctgctgcygtcctcctgagtgtgttttccactgaaacgcagataacaaatcagaatccggggaagaatgtgtctttgggcttgtgagcctgccaacccattgtgctgtttatctgctggtgagcactggtggctcccctgcactcacagtgttcagctgtggtgcacacttcccacattctccgataacgcagcagcctgtgcaagcgaagctgtaacatgattcgggttaatttatgatgtaatgtgtttcataagaaagtcctactcaccatgaagtcacttaattcagaaattacagagaacaataaaaaccaagctgattgttggcaaacttgaatgaaaaatttatacctggaggttttcctttctaataggcaaccatatattttatggagctgaaacttttaggtttgctgcttttgtcgttgtcttcaccatttctcctttccttaaaagaaacaatagttttatatattaattttgatgtgctaagtatgtacaacttaattttttaaagaacgtttttcagatatatacatgtatataaattcatgctatacagaaaaaaaaaaaaacctttacagtggcccgtatgctctgatctgttttatgaatgtttacattaatactttaggattatctgtttattctaattgttggtacgttgttttaaaaatgtgtaattggggcaaatggaaacacaacaggaaagaatttggcatctaaatgccaacattatttgaagaaaaaaagttaattttcttttaactcataatctgagagccttgacttttagacttgaagaagtaacagtagatatgtttagcaccttctgtacccttatccaagagctaatgctacattttgtaattatatgaaaataaatggaattatgaaagtacatatgtatacgtatgtccatatgcataagctgctgtaataatcgagaaagaaatgcatattctacggagcagagagttttagagtaggttatgtatagtacaaagtgttggttttagagaaagacctatatttattcaggctagattaacctaacgccttaatatctgttaaaaggaatagcttggcagagagatgcccatacygtgtttcagatatttgggatgagctgagagatgtttggtggctagagaggaattagtgatgttgttgtgtatcgagtgaacctagaaaatgagctagctgagcagaaatcgctgcacttgtgaagagtgaggtggcgtgtcaggcatgtcagaagtgatgctcaaaaccacgcaagtgttgcgatccactcttagggggacaaggtgggctgagactggaggtgagggtggtgttaacaggcagcatctgtgtctagtccagaggaggagggagcacggctatgcgctgcagtgatggtggacccagtgacagtgacagggcgagtttggatgtgtagatggcaaccattctcaagcacctggtactgttagtgttactggaaaaggcagagaagcagatctccatttaggtgtcccttgttaaggaactagcagacttcagaagacaagaaggatgagagatttgcaaatcgatgcaacaagaacctaggactgccagataagctgcagatgtttttgtggtatttgaaattgtaagagcagattttattatgacacaaaaagacaatagaaggcccacttggcaaatcatagttaatgggaggaatttatcattgaaacaatgtttgagagagaaaacaggtttaggagagagatccgtgaactgatagaaggaaacatggttgacactatagcgggaaagtacacagccacaaagcataatcagaaattagttctcttcctagtccaggggaaatgtgagctctcygcatattgtgggactgtaagtgtgtttatccttactgtattcaactttaataggctgctgtcctcaattttaagagattcgtataattcgagaataaaccattaggaggaatctgatggtggcacaggccttatgtttttatgcttaggtcaaagtaaatgttagagtaatttttcaaattggctgcattggaaaatttcccaaattatcagctgcagtccctgattattgaaggccatgagtaaaagaataggattagtagattgcatgaagtaggatgagagagggacgtattttattacgtgtgaactcggggtggggggcagtggtggtggtcaacatcagcaattttggatgcttacagacttcagactctcagcctttagtgtgcatcagaatcactcaggccctgttaagacacagaaggctggttcagggatctgggaattgttctttctaacacgaccccagtcagtgtgacattgcttgcctgggtactacagatagagaaaccaccacarctaaaggtttagatgagatcaggtgattgattgaatcatatgatgaagttgaacacggtaccctaagacattttaaatccgtgaggccttgcttctctgggttgccatattattttgaatctagcctttgtatgaggtatactactaaggtcaggaacagctggaaacaacctacttagggatagcagaggacaaaccaggaacagataaacactgtgaagaagagcttgatgctgaggctgagttgttctttctagaaaagaaaggcacactggttggttagcagtggtaaggccagctgtgcattttgaaactgggaagcatgggcagtgtggagaggccacagtcacctggaggggagcatgcaggagagcagggccaggttggtggggtagtgatggtgggtggtgtaggcaaaaacaaaccctgtgtatggaattcatgtagcacagttagacgcactcctttactttttctcccatcagaaaagcaaaatgaaagtataaataacttagctagccttaaagcaaaaataggcatttgcagatgacttgaaaagcaatagcgtgtactaacagattgattagttgtggttaatcactttgtrtcacctcacgcacatttagactcctgaagccgtggggccttgccatcaaatgtggccactgaaatccacacatctgatcatgctctgaatgaaccgtttgaaatgaaaaagtgaagggttacttctcactgagaagtgactcaatttaaaagtttaaagggacagtttttaatgttgtttgtttcttgaattttgctcaggattaaatgttaaggagagcatgaggagaatggatgtaacactctttcattctttattacctacaggggtcatctcataatgaggaaacctaagaattcttgggttttatggacaatcgctctttgattatgctatacacttaattctacacattgctgaagtgcagaggatcattctcctttatccctgttgaccagtacagagccagaggggtggacaaagtggttagctcgctgtggcaaaggagcctcaggctgggcactggacacctgtgtctcactcttcctctgccactttcaggctccgtgaccctgggcaagtcactcaacccctctgagacttagttgccttttctgtaaatggggatgataagcacacctatctcccaaggtggttgtgaaggttagataagacagtatatggaaaatacttagcccaatggagctctgtgggactcatgggcttattgatctggaggtggcagagtgacatggggtctaatgtggacaagccagtggacacagatctttaataggctctttagttggattcattaatgagtattcctgagtagcaggcatgttctgttgcctaggaagctggagctgtttgcatttcttcctgtcataagggaaaacggaggattgacagaaatgaagctttttatgaaagcgcattctagttctaagtgtgtttccagcaccactgttagcagataaaccaacacacttttgtacccattttgcactaagtacagaggaaaaccagagaagtaaagacaatgttgaaccctttaaaagctaaaatctgggactatatgaaaatatattaaataacttggtaacagctacaacacaatgtatcagaatttaaaataaagaataggtaaattgtgacatgaagtatcagcatagaaaagaaatggatataaggttagtcccattgttatctctgggagattttttgttagaacatggagatactttctttcttaatctgtgagaatccttgaactggttttcttctgggttgttatcccagaagcctttatactttgattaaaaaaaaggctaakcttttatggatttcatgttgaaactatactgagtgttggcagggctgaccaagtctatgtcctttaacgttgccacttactagctgtgttatctcaggcaacatcctcattcatggaatgggaccagtaatattatagtaagggtgttgtgatgattwagtgatttgatacatacagagaacggtgtccagtacatgatcattgctgtgtaagtgttagctattgatattacttaaataatctatacttttcaaaaggtgagtgacattaaccatccctgggagtcgtccttgcctccaagagaaatctagacactaagaatttgaaattcagtgataataattttccattttcttgatcataattaataaataataaagcatttctgttatgttacctgatctgactgtggattttgaagttaaatcaactttgttttaaatggaaagaacttgaaattttccattttatcaccttgttaagtgggacatgaaatttgtcaaaaaactcattttcatttattgtaagacctcagtgtttcagaattatattttgtttttgaactactataactttgtaatgattttgattaagtttatataaagccaaattcagctcttttatcttttcagtttggttcctaacacctcatatctttttctcccaaaatccttataaaaacaaacaaaaagctctacctacatcccttctgtaaagagaaagccgctaatctcaaattcttaactagattgtgcagtttgcacacattttggcttgtcttgaagtttgtatttcacctgtctcagaagcagacagacccagctttcattagttcttagaataatacctgctgtcatggattaagcatttggcaggtctttctttccctgtgtacacataccaaatgttgggagttagaggaaattaaaacacttgatttaaaaaaaaagcaaccagtgcttaatgcttttgatttttaatgtgacagtaaagtcttggttatgattggcttgactttgtatagttgtctgcattttagatggaatgcatcaaaatcatttaatatttttgtcaaagctttttatgtttatatgtaatgaatatatattaataaatggcatgtctctatattttgggctgttggaatatgtgacttccccagaatccagcaatctagagaagatagccgaaataacactattgttattcttttcattgtcaaacttaaattactctttttagtatatagactttttttatttaataaaacagagaatttacatctgagaaatctatttcataagtaactttgatagtaaacacaagttttgctatgtataagtatatatgtgaaatatatactttttgttaaaattaagtttatagagcagttcaactttacaattaagtagcaacctgaaaaattggagatcatgaagtagaacagataagcttaaaattagtgttttctccacgtttaaattaagaagtggatatgtatagccaaatctcaatttaatgcttcctagggttgaatgtttgcctcctaaaatgtgaaaccaagtttgcgaagttcctttcctaaaatattttmgtgtttaccaacttttcttgggtttcgttcttttggaaaataatgttgatgagtgcttttcttccaaagcaactaaccaacagaaatattaactgtgggtgtgttgtatccttygcagaagtcaatttctcatgtatgccatttaaaatgatgacatttctttctgtttgaaagaaagtcttatattcttataatttacctccgtatttggaatatttgagtcataccaaggattaattttggtttgaaatagaaatgattgagttaaaatatagaagtatattcagctgcaaatgaacttttcagcataagaaggaacacttctaaaataagtcaaggattaaaactgccaccagtagaactggaacttgggcagctggtgacaagctggtgttagcattggcagcacaaagggagcaatctgacatgagaaggaagtgggaccaggtctggaacaatttctcctgtgtgtcagacacaaatagtcttttcttcaatatcaggcaagtatgcattacattcctgttttatcaactgtccccccaccccccacctatggttaagtcaagataaaacaattttaagaatcctctcttcgtttgagttttctttaggtcttaaatcgagtagtacataagtgctgtctcttacccatgctctttagctttccgacttttctacttagctgcatagtaacatctgctctctgatgatgtctgtggctccagaaatacatacagtagatgcaaagtgcaagctctgaggccactgagaagctgtgatggcctggtgctctgtggtgagcaggccacaaaggctgttttaccgacacggcctcgaatggtctgtcttcagtttcaaatggaaaagatatttttgtcagcagttaggctgtaagtgtgtgtgtttggaaaaggagacatttgagtatctacaactaagcatgaagtcacataattacctgattacgtttgttgagattggcagtaaaatcgctggggaaagacagaggtaggatgttcgtagctggtggacagtggttggggagaaagtaagcagtgggactatttctaataatttaaaataatgcttacaaatcatttttttcataaagctaaacattagctaaagaagttgtttattagtcctcattgcacatttatctttccacactgtaaaaactcaggtccatggaattgtacggcggtccagttcatttaatacgggtcgaattgagcatctgtataagaatccccaggctcacattgaaggaagtaagtcattttctttttctagaatctctttctataaggtgttttcagatgttcctatgttcagataaggtgttttcaaatgtcatttttgtcaaagcccaacaagtcacaattacttacccatgaattactgcactgaatacgatttacatgccttgaaaaccttccctgctcactgccctaggccgtagtgtcatgatggtttggctgttagaaggctatgaagtagatggcttggagagaccaagaaagggcatgcctttgatcaccgctctgcaggtgtccttatcccctcaagtaagagcagttccacactggcagtgcaccgacccgctttttatattcagtccaatttaatcaatttaaacaatctttgtacatttaattatttttaaaaataatttgtgaagataggcccaaataaatggcaatcaaaactgttctaaatgactgatcattgtcagcatttgcagttgttttgctgcttttattaatttgtctgtatgcagctgtacagtttatatagcacaagcagactgttttcttgtttgagcttatggtaactcctgaggtggatagggagacccagagagcacattatagttgaggaaatggagacagagaggttatgagttttctgaggttgcgcactgtgaagaaggcagagctgtcaccaggacacagggattttaactccaagttcagcctgcattatgtggccagtttttccagccagcaaggacgatacagtcagcttgtaaaccatatgtggttttgtattcacccctgacccctgcatatttgaaggtttgggctacttgtataggtagtgacagcatcaggaagatgatgcagttgtccacagtaaaaggctttccactttaagtcatgaagtgtgttgtctttgaaaatcattattgtttttgtgcaaagttcagaacagtcctgccactggatgtagatatagatcaatattatgtaaaaatgatgaaaagatcaagttagtacatcacccatccacatgtatcaaattcttatgctaatgaagtcagtgtaaggatctgtttagatttaggagttgtccttcaatcaattatgtcaccacatcgggcattcagtcagggcctaaggttgatgtttataaagtacttgaaaattactagataaaagtatctaaagaaaagagagctgtcttcatcatcatcagtgttatggattgctttagatggtatacatgttattacaaggttttctttttctgaatctcattcttgcagaacacatcttacaaccacctggagccctaagatatgttattgtataacatgttcgtgatactgtgctttaaaaaacatttttctgagtttaccaccaaaatcttttacagacataggcattatgtagctatctttctattatttaggtaaaggtgacagttatattctgctactccagaaccatcagtacagcatttccattttgaccctggttttcagactttccaaatatgcatttcaattttgatgtttttaaaaattgagcttatgttgcttttctctatctaatgggatgtttttktatcctgaagacatgaagttgcactatggcgatctcactgacagtacctgccttgtgaagatcattaatgaagtaaagcccacagagatctacaaccttggagcccagagccacgtcaaagtaagcattttcattgggatttctctggccgtgtttctgtggygttctgtattttacttgtgtctgctgcttctcagtgtagtaatataatcactggtcttagtcttcaagttgaattgtcagtgttagtttaagtattaatcctaattgaagtactcatagattttttaaaagtctcttgtctgttattaaacaatataataaaaccttaccactaatattggaatagcagtatttgtttattttgggttgttccctgtagccatgaggcccatggatgtgttttctgccatttcaaataacagattgtgaattaaatgttttgttaaaatgttggaagatgtaactaagtaaaacctttatgttaatatcaatttttggtagcggctaaattactggctgagagaatatttttgagtcccaataatatgttaaaattagctgaattaactttttaattgtgaatggtaaaaatcattggaagaaagctttttagtctccctcctcctcagtgtgatatagccagtgtggattttcccctctattcgcattctggaaggaatcacggtaaacatcacaggcccatccttagggttctagtggtctgcttaattcaagtttttgttgccgtgtcctcctgctcacatgaataagtgaaatctgaagccatgaatgataggagttctatttagatacttgttcagacaggatggttagtggacctgagaaataaaagcaagtaactcttaagttataaaagcccctcaaaagtccagaaaatgtatgaggttttttttkgtttgtttgtttgtttgtttgttttgctatttaatgaacaagtacaggagtcttatttcagaaagtttttcttaggtgattggctatttttctgtatccccatgtttgcatagaatggaagctaaatgcctattctatatacctctgcttgtttaaggaagaaatcatgaactagataaaatgaaaccaagtggagaacatggtgagagaaacatagcaataaactcaatcttataactgattgccagtcttcattatatgtatttctttcaaatgttaaccttgaaggatggctacatatcgatgaatgatgatacctcatatctgcctgtgctgtctatgaagaaacatttttcttttcttaatctgtgatgattctgttctatatccagactttcaccaaagtctgtgaaaggtatcagggtctttaggttacagcttagctatttttctaaatgattctccatgtgttttttcattttggaaagtctcttatgcatactgtgtgcttgagaaattacatcccttctttcctatagagaagcggtgactttttatcattccaggaatgaagactttatttttccctaattgaggtagtcagtctatcttccacattataagtcatctggctgcttcttgaccttcctgaccagccatgagagtatcttccagacaaaacagaatgttttggaatgaacattctgttattcagtttcctttagattaagaagtttcctttgtaatcatagatagtttatcacctctaggagctgaaaattgtaatgaaagatgcagaaaatttttataaaggtttatttatagaagaccttccccttgtcatttagtattaaatgggctgattctttcctttccccaaaacatatttatagttcagaaatatgttatagttggttttcttagttgtagtgatcatgatagtgttttgttatcgttctggtgtggttgtactgtaagtaatagaaatcataggctattgagttggttccctctacattgctacacatgtgaagtttatctttttttatggtattttggctgcttttcttaatggttagttaatgggcggaaatggcactcttcagtgagaattttggtttgtaaggtcatttaatcttccaacaaatatttgttgagtgcatacctcatgcaaggtgtcatgcatggtacagtacgaaaagctgtgtcagatacacctctgctgtgggggtttcaactctaggaggggtgattggcacaagtgtctgactctttagaggagggtaagagagaacttccgtctgggggtagatggatagtgcgaggcggaaccgacactggctctggtgttgaggtatagagaggacagttacagagttacagacgtagcgggaaactaatagttgaaacgggggtaataatatgaggcaaagagaagtgggaaaacttggtacatgtttgcagcatcatgagcattcgagatgagctgagcagaaccagtatgaggagaagtgtgaggtaaggtcaggtaggaagctgggctgtgcctgggcagctacccatgttttgaacgggggaagatatattcagtgatgacttctagaggtaagagtctagaggtagggcttaagaagagctaggaagttgctggatgaggatggtgtcactagaaatgggggtgggagtgaggaatgaaacaggatgccaggtggggctgatttctctatgcactgatgtggtcactagagaagagggaaacccagggctccagtgcccaggggaccagaaggtcaatagaaccagtactagaaaccgacattcaaggaggaacttttggagtggggttggagaaataagttcccttttggaaacattttactggcgttacttgaaggacattcaagggaagcaggctataaggtagcttcaaatatgctgtgagttttgagagagatctagggtacagagctgtatattcagctcttgaggtcttaaagatgccaagtagtaactggagaaagacgggtagaggactgaagattgaatcttggaaacaggttgatagtgagagggtgggatgaggacaagtagggctgatgactgaagtggaggaggcagagggtgggattgtgccatggcagtcaagaaattgggtcattgcaagcaagaggggatgaggctaggagaatgaggaccaggaaaagtcaccggccttgccagttaggccagcgaggatttgtgacgttttaaagaaacattttagtgatgtgacagaagaacttggccagcgtgcaaggggtttagaagttgagaggttataagggaaatgcaaattgaatgcatttttttccagaaatttttatgtagagggacaagagagaatatgatgggtaaagcttgtagcatcatttgtgggttgccaggcctctcttcagaatccttgattctttaggtctagggtggggtcttcgaacttgcatttttagggtgtgtccagatgatgctgtccctggtctgggaaccgcactttgagaacccttgttctagtgtttcaggtttcttggtttatccaaatagaatatgttccttaaatgctttcttcttagacctttgcctttaatatataggtttttgagtttgatgtaaaataatcctattacttactagttaatgacttaatgagcttttaaagcccaaaactacgtctgcagtcaggagttataagaatggaaagcgaatatgatatatgtttgtatcaaagttcttgatattcagaaacctctttttctgaattgtacatagtctgagataataaatacttctcaagtacttagtatgaacagctcctcttagaatgtccttcgaaatccctgttccataccactgtttatgctgtgatctgtggacaggcttcgtcatggccagagcgggcgtggggaaggggcctgggatgatggcgccatgtgatcacagactgctcatctgtcaggttgctggcagcatgctgctgtgttccctcacctctccagggctctccatggtgggttgcaattgtttgtttgttttctagtagcttgttagggaaggaattaggatgaaaaaatacatattttgtttcttatagttaatttctctatattaatcagctttgtagaatttattgtattcatagatatatttagacaaaaaaagttacttctgacagtgtaatgtttgccataagattaattaaatttcttgttatttggtttggtgtccttttgaaaaaaggtcctaatattagcacacatttgcatttaattttgcacccgtgacttctagactgggtgttgtttgtgttggcttctgtttgtatggaataaagtctcctaccgctctcacttccagttaacttgatgtgggctagggtatgctaaaagtaaggaaaataaaataataggaagttgctctggtttcctgtaggaaaccagcgaagatgaaattggttcttggaataaacccacagaagtctgggaaatactgactgaagacatttttctgaatcataaacagaaaaattatgactcatgaagtaggtcattgaaaggctggtttgatcttatgtgggagaaagtgagagatgactgaaatgtactagttattaaaagaagttaaacctagcatgatgacatcatccaagtaggaacaaattatccaatgcgtagtcctgcccatttgatggagaaaatgttttaggaaactgctttttttgttgtggttgtgcggttggttggtttgtgtattttttgctgtgtaagtaatagtgttgcttaattgtttaactttaattgctgtccggattttcgattcgtcccccatgtcttggagcttctttaataatcttaatgtcattttcaaagtagtggtgttggtgagatctttctacagtgaacctagtgcagtatttctttcctttgcctcacaatgccatgttggaattgccttgatttttctcaaagaaacaacagttattccattgtggaatgtgtctttagtggagacagaaagtcacttagtcttttttttagttttgaaaaggattttcaaattctttctcagcgttacaaaccatgagtrtgtctttctttcactttctcttactcagattgaataacccatactttctactccttttctaaccctttaaatatctgtattactttccttttcaagtctctgtgtaagttatttgtttaattttgtttcaggactgctaggaggcatgagtgcctgggaggtacactgggtcatgaccatgtggcaggagctgagatttcctcacagagttgtgcgggacaagttagcagattctgactgtggaagccccagggggttgagtctgaacactcctccacgtgggacttcaagcttgggatgccagtcaggaggcagagttgactgtgagtcaaggggccagtgcgttagtgacctggcacgaagttagaatctaggagggatgagacagaaaagctagttaaaggaatggaggtgggaataaaaatagccataggaattaaatctgtggcccctgggaaagggcccaagaaactgaattacctaagctaaagaactgtcatctccagtgacattttcctggtggttctgagagttgaaatccgtaccttaatagctgacccccatattcgtccccaggaagcctgaacctcttggggctgttctaattgagggaggggggtgggtgaacaaatacattgggagaattgcattatgggggggaagggcggttggtgaaaggtgggagtctatagttgaacatctggttagtgcctggctaacccaattatagaacaaaacaaaattgcaacagcgtggccctttaccgtgtaattacagtaaggatagggggtagcctattaaaaacccagagcaaacagcagagagggactgttcttctgtgttcttgctcattcatttatttattttggaccctggggagcctgacagggaggtgtgagtagagcaggaaagtaaggagcaggcagggagcgtagctattgctgttagaaggaaagagaagctgttagaacatcctgaaatgtggatgagggcctggcctgtggcccatacaattgcatgttagcattcagtaagttaacatgtgtgaatacagccatcggccctttacaggccctgtgcccagaggatgcagcggggagacattatgtccactactggaacagacgactgccatggggcagaagagaggaatgttctcacaagaaactatggtccaggcaaggttatcaaatcaggggtgcatatcacggttcctgggacacactctaaaacttcatatccaggtccacaccagaccctgggtcttggacttttctgtggcttaaaatcctggtcacgtcacatgctcactacatgaccctaagagggcacttagcctttttatgcttctgtttttctcatccatgcagcaagcacctgccttaggctgtgtttccttaagatgtgattctacctgtgggcctatgtatgtggacttgactgtaactctttttccctagatatctacttgtctcattcccttaactacactcgaacttaagcatcagcttctccgtgaggccccctgaccatcctgtctccaataatatctctcctgggattggaccctcaccaccccaagtcctgatgaaggaggcaagcagtgaatgcagtgggcatgggggaaaggaaatatgcattggccgctgtgtgtcctccttcacttcagtcccagtgtgctgcctgctcacagttcagtctaacttgaggcaaattatctagagaaatggatgggctcaggttacatagtcaacatatccgtctttgctgtttctgcctgggactgaggcctgtcatttgccttagctgctgttcgaaatgattgcaagaatgtcttcctcattcaaataactgtatttcctgccaccaaaatgttaacttgttatgatgtattctaaaggaaaaagtgatgttttggatcctttgttttttaataaatgggctctagaattctaaagtggcaaagattttggcacagagccagctcaagcacttatttcacaggtgcccacctggacgtgcggttcataagcagccacacgctacctagtctccagcccagatatgatgccactcagtcttcctgtcacactactaagctgagaataccgaggtgggcagtatcgttgaactgtgaggggaagataccgcaggactctgatactttatatcggacctcttgtcattcccactgtttactacggtgaaatgaagttttggtgcatttgagtttgagtttaaaacattgttctttccttgctggagggaactggttttaattaataccatatgaaagagtatttgaatagctagaagatccccaaattcaacaatgccaggtgcaatgttagcacatcagtgatactaacataaaattaatatatataatatatacagacaacagaaatccacggtactaactcatcaggaatgataatcatctttttggttagggtagtacaatttaattcaatataaaatttaaaattttgaatatctacaccatggtggtttgtaagttagcttccctaaaagctatgggaggcaaataatatttgctacaatttcttaatgaagacgttgttagaatgagcagcttgttcctattcatacaattatttttaaatgaaattgtcaagtcagttatataagtataatgtgaattaacctattttctaagatctaaaaataaatatttctgctttagcactgaaaatacatttttgtccatatattagtatacacaaactgtaacttcatattgggtctctgaagataacttattttgcttagtatatttatgaatcgatatagtttattatgatgttatatgagttttaaaactcattgttttcttgtcttatgtaatttttagatgtgctcagagcaacataaatcactctagtttgttagcaaattatgaatgttcaaataataaagattccttatgagcagaatgctttacttgttaaagagcagtgagtactttgaaagcctgaggattaataaggtatgtttgcatttagacctaatatccctgcatactatagtgccttttgtgtctagaagaattagctctcttacaggtacagtgagtaggtgcttggagcaaagactggatacttttaatctctgtgaataggtgatgtggatggaacaaacctctacggtcaagtaatgttacggttttgtttgtttttgttctacaagctcccatttctttctgatcagtcctgttgtcccttcacctgtgtggacacagcccccgtgataacttaatacagtttgtaaccacttttatttgttacagcgcaaaattgcaatacraaacctttttcattttataatttcatgtttaggtttataatgaataaacaccacgattgtaaatatgactagtttattcccatggttcttaggaagaagttgagcatgtttgactttgtattcatcagggtaggcaggagtgtatgctgttggtgggtgcctgtgtgtcatctggctcagattcttcttggaagcctgttgtagatttgagcaattgaattcaaatctaaaaccacttaaaaagtcctttatagtccattaagaatttatatgagagagaacactctatgaaagttctcctctccctgttcaaacagattgttctgttttattagagctaggtggtattgtaattttgataacagctaataatgtttggaattttgctcataattaattagtggaccacacaaagctatgcttgttgggtttttcacccttaatgtgtttataaatagtggcttgtttactaaataaaatccagagtagcattattttagtattgyaacattattttatatatattaagctaaaattaatacaaatagctaaatgaacatatttaccacaatattaatttctagatgctatttataaaaatggtgggtaaagagtaagttagtaaatacactgtgagtaaaacttttccttttttttttctttttttgagacagagtctcgctctgtcgcccaggctggagtgcagtggcaccatattggctcactgcaatctctgtctcctgagttgaagcaattctcctgcctcagcctcccgagtagctgtgattacaggtgcccaccaccacgctcagctaatttttgtatttttagtagagacagggtttcaccatgttggccaggccggtctccatctcctgacctcaggtgatccacctgccttggcctcccaaagtgctaggattacaggtatgagccaccttgcccagccaggattcttgattagattacagtatgtaatttacataaattaaggtgaagacataaatgatactttgtttaataccataatgtatctcccccgcccccaaaatttgtatgtatatttaaaaaaattagacttaatacctcttttaaaatacatagtaaagcttgatattaaatatgatttctactttatccttacatatggcggagtttataaaatttgccttgttaaagttggatccttaaagttagtacggtaaaataaaatgaaatcttttctagttcaaaaaatgtaatgcgtaagaattttttctgctactttgtactgtaaatcattaattggataccttaccagtgccagcaagaaataaatcatatgaaaatggtttgaatgtatcagatttctattttttgaaaaatgtctaagatcgaagatgagtgattagtaggtatcacttttactctttgaaaaatggcagagtatgttcctagtttggaaatgttaatttraagtgtaatccacagcgaatttagatttgctttatttataagaaaccgcacatcaagccttggtttggcatgttacagctccgttaacagtttatcgttaagagactgattctttagaaaatgttgcaccctgaaaggttagctcaacttgtgtacggttctagtgttgataattaaagtgaaatgtttgccagagaagaggagtattgtgttgatagcaattatgcagttattctaaatgggagctgatagagaagaggcagcagtttcgcacttcttatgctgtttggtatatcagggtaaaaaaacctgttcctgagtttcttttctaytcccattccatatatttcattggtgccaggtttttatttttttagtatataacagtaaagtcttttagaaattagtggtattgacaaaataaaccttttaggacattcttcaagactgtcaacccacattattagtactgatggtaaataaccagtctttaccctgagtgcatggattaattgttacatggtgtaggggacagggtttttttgtttgttgtaacattcccatatggctcacactagagtgcctttctatttgtttgtttgacactaacttatcttaggacaattcagagccagtatggtcagtcctaaaggggaggctgagaggctctttagtgtggtctgatacatttctccatcttccctagagaagaagtgtttgaatatttgacagaagttagtcgattattatgtcacaatatttgagttattggttgtttacataatgtgtgtaaataattttttcatctgtttgctttgcatttgctttatattaaatattaggaaagtgttttggtttagtgatcatttctttttttttttttttttttttttgagacggagtctygctctgtcacccaggctggagtgcagtggcgtgatctccgctcactgcaagctccgcctcccgggttcacgccattctccagcctcagcctcccgagtcgctgggactacaggtgcctgccaccacacctggctaattttttgtgtttttggtagagacggggtttcaccatgttagccaggatggtctcgatctcctgactttgtgatctgcccgcctcagcctcccaaagtgctgggattataggcgtgagccaccgcacccggttaggtttagtgatcatttcactctatcatttggcaagatatttagattgcaatttagcaaaaattaatttatcttattggaattatttacttaagtgacttaaaatttcaacttttgtttttcaagcataagttcatcaaatttgccaaattaaaatttatcagcagcaataatggaaaaaatctattggttatgttcaataatattatgttaaataatgtaacttcagtcatttttcagttttataaatttgcttcacagagaaagaaatggaaatttccaataagctttacgtttgtgtagggaagcaaattatccctaaagcttccttcttcatccctctagattagagacatgattgtttttgaaactgaggaagtttctggtgtgtttaagaatgttgtgctcttttatacacatagatggcagcaaagaattagacaaaggaagtgaaccttgcagttgtagtgaaagatgagtgacagtacaaactgactccatcagcatagctgcctgtgtctcatacttaaacataaaataagaaagaaagctactattgataacacaagaatataggagaacgaagaaggctctgagaagctgtaatacactgaatttctggacaaatcccaggtggggaagcttaatcttttaaggtatgtcatccactcctgtaagatgattgaaatcagctaagataatatgcatgtcaaaataaagagacagtgaagggctgaggggcagtagggccagagggaagtaaaagagaaaccacgcacaagttgcagcggcaagcaatagcctgctgcctgcgggcactgtggagtttggcctgcatgtctcctctttagttaagcaagttacaaagaggaaatgtcagtccacgaatcaggcaaacattccctgggaacgtttgctcaaatgtcagcattttagaaaatagaactgtagtctattatggttcagtccccatactgggtttgctgttaagtgcacaagcacaaatatattgcttaagaatgcatttgctattaacaagtcattttatgtcttaattaacattcctaaataatgacataatcactataaaagatgacagtcatcattataattaatatttaatatgtgtgtgcttccgaggacctttctgtggcttctcacaaatttccaaggtaattttcaagttttagaattgcatttggtgagatcacagtcatgaggatctaatgaagtagaatcatatttagtagaaactgagattcggaagtgagttgtagaaaagcaatttgtaacatgtccttaacaatcccatcacctcagtatcttactaattataaacgaaataagggcttcttaatgccactagagtaatgctaacattgtttaggaaaacatttctcctaccctctattttttttctggtctactctcaggaattttagtaccacagactaatctctgggtcacaaaatttattctaaaggtgtgtataacaacgtgcttaaaagcagtatctggcaagtctctcttgtgacagcaacgttatttctgacataattattttcttagtaaatttgatatcttaacaaccccttccctcatttctgagttcaaaaaataacacttaatataatttatttctcatacttaataaaagcttacttgagagcatattgccattcatcctctagctgcttcccccaaatgaggttagaagggaatgcggtttgcgagggtataaggtggtttccagcatcgtacgctgtgtactgtaatgggcctcaatgttgttttaatgaagcattaaacatattctggctgttgcttgttacttattaatgattaattggttatactctgtcatatcagtagaaaaagaagatatgtatgtagtttttctgttttaagcagtctactgtgttaacttcagtttgtatgcacagatattatctgtgttaccctaatatttttagtagtgtaggcggtttgaaaacaaggacaaagaaaattctgatgtctaaacacataatcttgcaattttgtgaatttttaatttaattaaatggaattttataagttgaactttcattatcatatatttcttaaaaccagggtgtaagataattgaattagtcacaattacataaacatttctttataggtcatttttgagatagcaaatgggttttagattaaaaggttgtttaaaaacagcttttaatcagaatataatatgttttgcaggtgactgcgtactttttcttttacacttttagcccctctttggcaggcattagatttagactgtgactttcttaatgcaataacatcgtgcagattatttatgtgaccttttcactgccacggttttcattaaacggacagtattgcaacaccatttccttcaattgcttggtttcaaaagaatcgtgtctcaagcaggcaaatctaagtgatttgtgttgcttactaactgaagaatattgttttaaaactttttttaaaaaccagcatattaattttcttcatattagcactagaacatttattttccttgacaatattttataaatattttgcatgaataattaaatgttggataattaataacatttttttcaatttgcttataatttttaaatgggcttttaaaaatgatacactttatagtttttgatgccctttttaaagtctaaaaacagattttgtatgaattataggggacttcaatgttttattggcattttataaccaattttaatttatgatggctttacatttgtttacgtgactacatcttacaaaatcttagatatttgaaaaatttccagtgtagtataataatagcttaagtaatacttgccttgtttgtctttcttacttactttaactttcacatggttaattaagtagcattcctgttgattaataaactagagcgcacactgttgtttgaggttaaaataccaaagttttgtgcttatgatacttagattttcctttatgtccaaattgtcctttcttttatctgatgtaaaatatttaaacatatatagatactttgaaaattatttaaattgatagatgattgcatgtaatcacgaagtatgttttctcatgtggccattgtttttcaatgaagtgttaatggttagtggaaaaatttgtgtaatataaatgccctaaagttcaattttggcgctaaatttaattgccttttttyccccacagtttgtgtctttattttagataaacacataagttcataaatgtattgctcatatttcgtctttcttgaggaatggtttcagatagatttgatatactttctctcatttcgtgggagattcttttctctttctctcagtttctaactggggattccacttatcaggttgaaccatcttacatgatgatgattcttggtggtgcaactttgttggcacaggatccagagactaatccataaagcagttactggatttccaatgtgtgaaatattagtttgtccctttttcttgtgttttttcttctgaaaagctttactgaaatttcattttttattttctctcttttttttgttttttgtttttttagtgtttttttaccatgctacttatgaaagaatttcctaagaactttcccaagttctatcacttgggaaaagatgtgttttaactacaacagaaacatcccggttaaacccttatctggtcagagatttttagttcctagccagtaaaaaactgttttttataatgtaacataaattacatactaaattagtactttcagtaaaaacttttcagtaaaattttgacacttaaatgctcactttttaaaaaaaaaatctcagtaatgtcaggtcataggcacatgaaatgtttaatacaaaaattgcaatatctttcataataacatagaagttaacagagttttgactaatcttactcattttcttgcattcttacagaaaatactagtacaattgtaacctttagtgaaattagttctttgtaagaattacatttctatatgtaaaacaactataaaaagagtgccaagatttaatgcgtgccttcacttttcggggacgttttattttttccactgtaagtaatcttaattccagatgttagcacatgacattttgtgtagtgcccctatcacatgtttgagtttttttaacattagctctatgatctgatgctatgtatactatcttgactcgtcagtgatatagattttgttgctgtcatttagtttttattaatagtcttccatttgtattagtcaaacttaaaggcatatgtttgttgccacatacaaaatattttacggaataatctgtagtttatttacattgtattgtgacgttagacctttctagtacagctttataaaataaaatagttggttgcatatagaggtatcttattgaaacatcagtgtaatgataaaaatattaattgttgtaatgtttaggacattagaagaacacagatgtggccaccttttgaaaacttagaagttatttatctcataggaatttgtaataaatccaaaagataactatagggttaacacatggaatgacgatttcactatattggcaatttatttacatttctttaacccaattttaattgtaattctgtgatttaagcctcattgatttatatttttgattggtatattgaaatataaaaccttctaaattctaactagcacagggtactttttctttgtcatgtgaaattaagggaattaatcttgtcagaatttttataatcatgtaaaacaaacctgtgaggaagacacatagtctctctgggcctcagttttcccatctgtaaaataggatgtgaggctttgggaaacaggtaagagttatgctgtatgttctccaagatctcctacaaccccaaaatttcatgattgtccaatttgtttttgaagtggtattgtgcttatcaatataaattacatgtcctgtctaatgaaaacatcagtgttaataaaacctaaggatgaaaagttcagtttcttttaaaaatcatactttttgggagaaacaattgtcagatattagcatataatggtttttctcaagaaatatttaaaactttatataaagttatcttgcacctttttaaaaacttaatgcagaatagtggaaattctgggatggaaaaggcattatattctattttgtcagaaagtataaattaaagttaaatgctgtataagcttttggtcatactgttaatatggggatatcttatctagagaaaattagtatgtgaatattttctataaaatagaaatctgaatgaagaagttgatttgttttcttacaggtaaataaatatacatgaacttccatgaaatgattctgaggcatgtaaataaatttaggtgccagtgttaattttccacatttagctttggtatttattataatttacagacaattacagtagaacctgttgtgccccaaaattgctcaccagggaaaaatacaaacaaacctatttcatgccgtaactatattgactgtataggatgtgattatgaaaactaagcttcttaatactgtactttcactcaagtacaactttgcagaaatttctatttaacgaattgatgcttttttgtggggaaggggaagtagctgtttggagaagtagttaagtttaaaacacatatttgatttgtataataatagaccattattggccactgtagtaaatgtatgctaaatgagagtttataatgtaaaaatagtggttaaacgtagatgacttagagaacaaaaagtaaatgttttaaaaatgtgtctttataagcgacagtattgtagtatcccaagcacagcacaaattccacctatagcagaaaaaaaatagttaaaagttttaattttcaaagcgtccttttttgttaattttttacttgaataagggatttctgttgatttgtagagtttctaaaagtcaaagaaaaatacttatataataataaaacttttcatcttaactgtcattgtatttaaaccttggattcccaagtaaaagattccaggatttatagctagcatagattcaattattttaaagccatccagattccattttcaatttagtggcatttcatactgtcaaggtggcaaacttgttcctaagttagtttttttaagcttattatcagccatagtttaaccccaatcaagacattcctaagaggtttactccgagcttttataagtttatttatatgtcttgtggaaattttcagttcagtgcagggtttgctttaagtgtttctcaactaagcgtataaaaattagactttttctaccttttatgaaattaccataaggatttaagattttgtttctaaataaagttataaactacgtacaaattcttagattggtgtttatccttgttaatctatgatagctaaaaatatttcaagtagattactttctttattactaaattttccttatttgaagagtaattataaaaataatttatgtggctgggcgcrgtggcttacgcctgtaatcccagcactttgggaagctgaggcaggtggatcgactgaggtcaggagtttgagacctgcctggccaacatggcgaaacaccatctctactaaaatataaaaattagccgggtgtggtggtgggcacctgtaatcccagctacagggaggctgaggcaggagaatcacctgaacctgggagayggaggttgcagtgagcgagccgagatcgtgccactgcacaccagcctgggcgataaagagatttcgtctcaaaaaaataataataataatattatgtgtaattttcttattgtcccagtttagtttttttttttttcttaaaacataagggagcattgaaacagctttatagtttgttttcacatgctttggtagtttgaaagttgttttgttttgtttgtttttatagtcgtactaaatttagaaagtacctgcaaataaattctatttaatggtaaccatttatttatttgacatgtttcttttgtttgtcactatcctaaccatgtagactggtaattgccttgctacgagaagatcctagtcttttctacagtcaaacagctaggttttagggcggaactggagcctagagtaaaggctcactttcttaactcttcactgggagctaaagctcttcttcccgtggcctctcccttgctttgtcaaagtatgacatggatggattgcttggaattctttcaaagcctttcctgtgtaataatgatggcaaagatttcaggcatttgtcaagggccactagcatgtgtgtgacagcagtttaaggggggaaaacagtggatttattactaataaaatattaaaactcttatatttaaagccaggcataatttacattcagtttcacccctcrtcgttttagctgtccattttctacttaagctgcaccctctttctcttcccagaagccttcatcctccttttagccacccccgcaccaccatctccttccctagataggtgataatgctcagtcgccgaggggctttgactagagccatctgttctactctctctcaagaacaacagacaaggcattattctgtgggggcttgtgtatacaattatctacaataataaaatataaaactacagagtttttagattccaaaaattcagtgatctgtaacagcttccattgggtttctgggtgttcttgtaattcattttttcatttattacctggaatttgcaaactttttttttcttttcaaatatattttctttatatttttgtacagcatgatatcattaaaatgatacctgttgaattcacattgtctgttagtatatatacatattatatatctgtctttagtgactatataaaaaagacaactattctttgactcttaaatatatgggcatttttatatataaaatttacagtcactaacttaattagtctctagatgtgtctgtgtacacatacatgtaatatacgtacacacaactaaaatataaagtcatgtgttcattgtgacttgtttggaattttagtgagataactgtacttggagcttttatccatctgtttgaatggagaacctccctttttggcataggtcaaataggttttcactgaccccaagctagtgagaattgtttttttctatttgcttttgattagtcctagaattactgagtaatatgtggacttcccagctaaagaacctatttaaatgttttttggaactaactatgccgattgaattgtgtttgacctactgacagctgttacttagcttgtcatgctccttaaaatggcaaatcattaatgtagtcctttccactacattagttaacataaagtgtcttatttctgaaatagacacggtgaatgtttccctgactaggttgtgcttaaacagtgttcaagtttgtaaatatgttgttttctgaaacaaaaacaaattctagtaataaaaacaaattaaatatatatgtttttacttggaaatcataaaatatagtttatttctctgtacaggtccctgctttaagacactggatgtataacaacaaatcacatggatatttacttctttcatttcacgcctctttttaataaactttctgtttcacatcattaaaattaagatctacccttttactctgcaaactggaggagagttatataatgtcatagctgtacctctaattaataatggggttgaactcactttatagatttagaaattctggcgtttctttctgtcaaatgcctcttcctatcctttgtccattcagtttttattgctaatttgtaggaattcctattaactttttatcaggtatatatgttgcagatatattcttccagttgtcacttctatgcttgctctatctgtgatgtccttcacagaacgtaaatcttaaatttcattgaggtcaaacctctctcccccttttttgaggggacttgagaattcttcttttggatagcatactttccacgattggtggatgtctttcagcttctttaaaagttgtcatccagcacgttagatatatcattgaaagggtttatatgctagattgagtttatgttcaaatgacttccaaggtttcatccaactctgcaattctaagattcccgtatattaaagagagattaaaaataaagtgctctgtctatgaaatctacatcacatttgcaagaaacactctgtatttcactgattctgcaacaccgattttcagatgcatcattattttatgtaccattaggaaagcacaagctcttctgattaaactatgactcaactctttctcaccactgagattcttaatattttatacttattgataagcttatttagatttattgagacatggatttgtatcattttactcttgtgtatatgtctaaaacaaatagcaaaatgaattgattactttgcaggaaaatacagaattgtagacatccgtcaagtggcagatgttcttaagttaatacgagtttgtgccccactgagtattttagttactttctatgtttaactttttattactgaactatagtgtcattaagcttaagatgtgtaatacctgaagcatgcactatttaactcaagtaactggcattaacagtgatgatcaggtgtgcacgtgatcaggcaaggacaactacaccactgcaacctggccgactgcgattgtaaggtaccacctgattttggggataatagaatatgagaatatgtacggcattctgtgctatattgtaaacctgggtgcacgtgtttagtgttttgggggagtgtggcatctgctccacagtttctagagaaaataaccattcrtttgattcttagtgagaaaatttcatagagaatcatttcattttcagtgttggtatagttgtgcttcccatactgtgcctccgttggtttaacacatcaagaaatgtagcagctggaagagattttgcaggtgtctatgcttatcttttatatagtgcaggggtcttttctgtagcttccctgaccacatgtaagagttaatgtgtgcttccgtatgactgcctttgctaggagcctgatctgtatttgggctgctttctggtgagaaaagtcttccttatattgaacccaaatctgcttctttccagtctctgtaccattgattctaactcccctcaacccctaaactgcaccaaatatgcctacccacttcttaggtaagttctcctttaaaatgtgaatgttattcttaaatctgctccgtttttttccaagtacttaggtcatgactgtccttatagaatgtggtactgaacacggtacatggcacgaccgtcttctcttttcagcagtctagaattgtatttgctttattggcagtcatgccatgctgttgagtgacaattaaaatgcctgtgttttcctcagatatttggtctcttagctatatttccttgtgccccacttatacagttaatatttggacctagtagaggactttagatttatctttgttaagttgcaatcttgtagatctagctcaaatttttctagtctatacaaattaaacaaaaaatcttagtctgttatacagtgtctaattgtaatcatttctagtactttctaacgtgtgcaacatgtttctcagtgtgtgtctgcctcactgtcacatgtagtgcacaggacagtcttgtgaagagagctcttgtgtccagtagaatcttatcgacattggtcttcagctcccttgggagtggtcatttagccagttgagaatctccctgtttccgcacaaaggcccacatttcattatccagtcatgaataactggatgtcatgaagaacttcattgaggcttcaagattgttgggaaattatcacaggattgtttcttgagaaatctgtctcccaccataagcactgttttccaggtcttcctaacaaatttcaartgaaattttaataatacaaaagtgacataatattagcacaaatttggaaaaccaaaaaaagttacctaaaatcttaacaccagacctatgtttttttctttttttttttgctgcttttctttctagtctgttatcagatatttctgacatacacacagtcatgatatgcatttaatttgtatcttttttagaatttaatttttataagatcatcttctttttgcaataagcaacatttcattggctgtgtaattgtatgagtctttcaccttgaagaataatgcagaataatgatttttaacctcatatttatattgagcattataattaaaatgctatcttatgcatttttctcatttgtttggatcctctccctggttatctataattggtactattgcagtcattaacaactattactagttttttaggggattaagttgaatctttgctgatcatttgaaacaccctgaatgtttcttttaaagtcaaatttatatttttgttttctcatcattcatcttttacgagaaacagaatgcataatgcaaaaaacaaaggtttttggcttatttgtacttatttgtgttttttcaagtgttttcgctgcttcttttaaatatgagaaataatgtttcatggtcttgtagacctgtttttctttaaaagtagagatttctcaaaactcaayaagaatggcttaaggtaaatatgtttggacttaattcacagtccgtgtagttggacgtggaaagactggtcacaatggaaatatttgacttggtggtgagactataggtttcctgctttgtcttacttttatagttttggcatatgtcaatgagtaagttcaaaatagagcccagaaaaagaggataatgaataatttttgttttatggatttgtaatctggtaactactggctgaatacacatactccttcatatttcttgacaacctcctattatctttctgtatctatcattctgttttatttagaatatcatttatattgctattcaattaaaggttgttttttggatatctaaaatgtccaacttatacctatggagtttttgcatgaattttttgtttttactgttggaagaaatgtactggattctgagtctttctagttctgtttaagggtacatgtgtagcacttttttaggcatgtcggtgttagagaatcttctgtgttcactgctaaaagtccttaaacgtgtctctacattttctagtaccatagaatctcagtgtcttaaagtcatctaggttgactctgcatctattatttgtatattatctacatttccaaacaaatctgttacgtacaataaatgcgctaaaattatgccagacacaacacatttaccaagaatataattacaatagtctatatgttttgttatactttagtgtaggtatatactgtaatagaaaacacaaaaagtgctgcataagctgggatgaggtgatgattaattctaaggatgggaaggtttaggggaaagagtgatgtcagggaaaattgtagaaagggcaatgtgtgagtagaatgattgaagttatattttgccaggtagtcacagaaggggactggttcagggaacagcacagcttaggcaagattgtgtgatggtgcatggatacttagtgtggattaacaagtataccctgaaggagtagtttagttcactactactaaccggtcgtagcagttcattccatccacaaacaactctagttgaaagtctctctccatagcttattttacacatattatttctaatttctttccttgggaatccatgtaaaattcattgtttttgtatatttctatttttaatatttagaaagggttgttcccatgaatccactcttccctgagtcctggcccaaaccaggtcatatagccctatccttgtagttgctctttttgttatgtagattcatggtctgtaactctcctgattttttttttcctttttctgagatagggtcttgctctgtcgcccaggttggagtgcagtggtgccataacagctcactcagcttctcaggctcaaaggatcctcccacctcagtctcccgagtagctgggaccacagctgtgcatcactatacctggctaattaaaaaaaaaatttttttctttgcagagatgtccaggctggttgtgaattccttgggctccagttatcctcccaccttgccctcccttataggcgtgagctgttgtgccagcctcctgattcttatctgccaagcacatcccacttgtctttatccttcttaaggtataatgctcagaattaagcatcttatactaggtgtggcctgactggtttggaaagaaataagactgtcattttctttgttctagtgactaaacttatgtttttcagactaaaagtatgagtctgtattggtgaccgtatcaaactgttccattgtccagtcacattaaattacttacactgtccttgtagctcattatcacttaacatttattgagatcctgatagtccaaagaggatggatagaatttgagttcctagtaatggaaaatggaagaactaagttcatttcccctgaagagttttaatgtgttttgatccattgaagttgttaaatgtatgagcctatgtattatacagctaatggtagtttggatctccttttgatatgtgttggtttcacatctatccaaacatctggtgaggatatttcaaaccacactgggttttctatcagcgtactttaaaagtaagcaattccaactaaacattatgaagtcttccatactataaaccaagaagcaatttagttggcaactcaaaagtggaatgtagaatgaaaatgaaatgagataaactccccccacgaggcagtccacagtgtacaccctaaagggatgaatgctgatacagtacataaagtgtgcttttataaaagcttggaatttccaaatatttatcatggcagtgttttatgcttaaatcacataatgaatatagtgtcatttttctttttagttctgttatgctgatagtttgaactaataagtgatgagactcgaaacttcagctaaatccttcttcaatactctaaagcatatattccacttcagttgcagaagagtcgttcaaattatttaatgccactatagacacagtaagagtatcagtataaaacatagcaccattccaaaaacttttggtttttattccactgtaattaagattgagaaacaaggatttgtcgttgttgttctagcttatgattggaatcctagaaagcaattttaaacaggtcgttttataagcttaagagtttaaaaaatctatttctgtttattcaggttgaattttgctttgaaaatgtaagagatttgttgatacttagaatatacatcattgtgagtattttctatgtactgttggttgatggcctaataacagtttttagtggtgtataaatgtgtttataactatcgtcagataaacttgttaacctcagtttttcagatactgatttctttccgaagtataggaatttcttatacatgtttcctactctttaccatcggatttgggaccaggtatttccatggctgaccacaacactttttgtgtagagatttgaatttattgttttgtttcacatccaggaatttggtaggctagattatttggatcaaatcttctattgaaaacaactaaaatgcagaatataaaattctttaaaatctccttaaaataattgaagaactaactacatggtaagccattatcaggctgatacttgtgggaaagtagaggaggtaagctacaaatttaggctgttttgatcttgaggacatttgcccatttggcaaactggaacttcattttgacagtcctatgtgatcaaaggcacagaaatcaaagggtcacattcttagatttatggtgaattatgcctaaaccctctctccacatggccccagcgtgttccacaggaaaagtacttttgtgctacgcagagcaggagtggagggggattcctaagaaggtgtaaccacaagtagaccctcaagcatactgtaatccaaagacgtactgcttgggtagtccagaacattttaaactcaggatttagttttaggagtttgggaacttgtgtaagtcctaggttcctgacacaagccaacagaatttctctctggaggaagttaccacaaataagacccaagaataagttttcaaaagcagtgaacaacacatagtaaaaaataaccaggcactcaaggaaaaagtctgatgagacctctcctcttacatctccttttctcttttactttgggtgctgcttctctttttccttctgcttctcttttctttcttattatctattctcccttcttcaacttttgtagctgttttatttgcattgaaaatcatcctctactttgtggcctcttgaagcatttattttattttgttctcggttctgttgctctggttaagtccttccttgtcatctcacaaatagtctattgttagaaccttttagttgactttaattttattttttcttcctaaattcaatagtaaatcaggttcaggctaattaagtctcttctcacaatccttcagtagtttctctgtgaaaattcctgagcatgacttttgatttccttgtaatctggccccagataaaagaactaaaaagtattggaagctgggggaatgattgagcaccatttattcatgacattcatttccatactggataacagtattttaaatgaatctatacgctgtttgagaaattagttttttttgttttgttttagtattaccattggcttttcgtgtagtgatttacacataatagctgcccaataaatgttcactggatgaattaatgactaaagagagaacagataaaactgttcagtcacctgcctcccttggcacatgttgcctctatcaaggataaagggacaaggaccagctctgacatgcttgttgtcacactgtggattgtcctttgtgctctcagtttctcagtgtatccccaatacccattgagttatgcatcttatctgagcttcagctctcttggtggtgggatatagggaaagagtggtgccaacataaaccatgcttagggcatgacatgaggcctggattttcctctcttgccaggtggagtatttcatctctaggatcaagattgtgatcagaaagaaccagtgttctctaatttacagagccagtaacaatgtcattcattttaagtaaagtatgcatagaaaatttctatctcaataaaaaagagagatcaggaaactatttattttgtacaacccaaagacttaaggaatttcgagactggaagaatgtgtgagttatcaggcaagatgaggttgataggaggaacctgcattcactggtggttcattatagtttgcaggtctttccaygtattatctctttttgtctttataccaatcctatgatacaggcaaagcagattcctattattaccattttacagacaagttaatgtctagctagcctttctttttgcaaacgaatcacttagatcatttctggaagcattagctgaatacctcccatatcccccacactctgctcttgattgcattttttttctgatctccgctatcactaattaagctttgtaatctcagcaaaacactgactgttttcttccataacattcttgtttgtaaaatctgtactctatatcacagcattttttttttttactttctacatctcattttaacctttctagccacctttctttcctccactccagcatatgagcatattactttgtagacaaataaaataagtaaatgctgaattaattgttaagtcaaaagcttctctttcagcccttttaggttaggaaaaacaaagatcctacttggcataaacaaaatgtcaacagaagatgcgcaataatgtctataaaaatctgaggacacaaaacttgggcaatgcagataatctaccttgattatagggacttcactcaatctaacattctggcaaactaaaaacttctttgatgttgataatatttgagagcaaataggcacactgtgttaggtcttgggataactaaacgtccaagacttatttttcaggttcataagcaagtgaacaacattcaagcaatactaaaattgcgtgtggctaagtgctaaaacatgaagtttacttaccacagcagtcattgagtgcctactttttctgggtactgagaataaacacagaaatctgtccttaaatttgaatagtgaagatgaaattgtgggcctgagtgcaaattgtctcttctgttagagattttcttaatgagaatatttctgttaagattgagttcagagagaattcatgaatactcaaagattattgatgttactgatgttgggctcacttcctttctgatagattattatcactaattaatttgttacattttgaggccaaatttttcaacttaagtaaataaatctacatttaggatgacaggaagaaagaaaaagtattttcatatacaaaagaagtaatcatcatttcttcaaataaaattgtaagaactgactattggtttactaagtgtccatctaatcaagaaatgaatcatgacagctttccttgtccatctaatctatcctgtcagaacttctgaggatccccaaagcaattcgttctggttggtggcatctatgttgtgtgagaacaataccaaacatgtgcctgtggtgggagtggaaaggcccttaggaggtgaaggcactcatatcctcataaattacagctgtggtcataattctttagtattttagctcaacatttcaacaagttttttatgttaatattttatttggagcaatattgtgattttccaagtgatttctcttatggaaactcttgggtctatggaggacacagacaaatatttcagagcttttttattgctccagacagcagcaaacacatggcaacaataatacactaaaaggaaaactattatagtcggcctgaacattcttcgtcaaagcccttctttcataatcttggccataaagggcctggaaaggcatactatcacctcttcattgtgttattctctgccagcacgtagcccagaagggaaataaaacacatttaactgatgtgcacaggcagaagaaaatctatcagcaactttctgtgaaatgtctattatatgaattgaaaagtatgtaaaagctgggagcagcctttgtcactactgaagttgtttcgaagtccccgagtcagctgcagaacggcagctttggggaggagcagcagcatgctggttactcatggttggctgttcccttctgatttaagtggagatgctgcctggccagtgtgccttgaaaggtctggattttaacagagtagctctctgtatcgtattagaatgatgggaattctaggtgtgtgagccacaattttctattgtgtaagatcaatgtctttgacttgtgtgttagcacaaaagtgttgcttctagtagagggatgaaaagaagaaaggggaggcagggtttcattgaaactgccagcctctaggtcagtgcacatagatagttactgcctcaggaggcacaattgctgggtgaatggtaccacagagattgatttagagtcatggctagtgggggtgttctacatgtcatgtctggaagaaaatcaggtgtgtttttgagacagtgtgttttcatgtggagcaaacaatcaaaaccagtgagtgagagcaaccccagcatgaccattgtttcctcacctgtgccacactctctgtgaagagttgtgtccacactttagtttatttaataatttgatgtaatctgtattgtatccctcattttattcagaaaataagctcagagaatttttatatcttaaggccacagaattaatgaatgacaggagagcctggattaatgaatgactagagagttcaggtatgcctgactttagtaatgtctacatttcatggttggccaggtgtggtgactcacgcctgtaatccagcactttgggaagccgaggcaggtggattgcttaagctcaggagtttgagaccagcctgggaaacatagtgagaccctgtttctacaaaaartacaaaaattagccggtgtggtggtgagcgcctgtagtcccagttacttggaggctgaagtgagaggatcacttgagcccaaaatgttgaggctacagtgagctgagatagtgacactgcactccagcctggatgacagagtgagaccctgtttaaaaaaaaatagttagatttttctcttccgaggagactgatgtgcaaaaaagtcagagaaactggaaggaagtgcatatgactgctaaatgtgtaaggtaaggtgcacagacaattaagaataatgttaattcaagatgaaatattataatcagagttatttacttagtgagaaaagaaacccgatttttttatttagcctaacatatttgctatactaaaaagccacaggtgattcacaagaaaaaaataagtgagaaaataatgaaaataaccatgttacagatacctagggagaaagaaaggaataaaaaagataaggtcacgagagtggacctgggtttgccttaaagatttctaagctaagaaaaataatttttttttttgcttctttcatggaagagaaaatactttcataaacttaaggatctcatgacattggttaaataggactgtagaagagtagacttttctaaatgtgaacatgttcaggtattttcctaggcttcatttgctttgtctagtaaaaactggtacaaccttgaaaaatgatagggttgctaaatttggtactgacttctgaatttggttgtggttttatgtaactaattgcaagactggttctttcactttaatagtgtcagaaagtttctgatgaaggggatagtcctctctggtttgctcaaattatatgtaaacccactcttttacttttgagaagttgaattaaagagttttatttaggccgggcatggtggctcacacctgtaatcccagcactttgggaagctgaggcgggcggatcacaaggtcaggagatcgagaccatcctggctaacacggtgaaaccccatctctatttaaaaatacaaaaaattagccgggcgtggtggcgggcgcctgtagtcccagctacacgggaggctgaggcaggagaatggtgtgaacccgggaggcggagcttgcagtgagycaagatcgcgccactgcactccagcctgggtgacagagcaagactccgtctcaaaaaaaagaaaaaaaaagagttttatttagattattttattagagctgcttgctgtgaaatgaagggtaattgagtaatctagaatctgggagctattttagagattggaaagtttgatcatcatctgctacttgaacaaataagcagcttgtcaaatgtgagtccaaccacttgatgaaaaagggtatgtttatggggtggccacttgttcatttgtttttaaagtttatatgatttttaaaatctcttttctccctcaaacctctcaaacgcagatgcctctacattataggtatagtacttggaaatacataaattgatatgaagagtatctatgaggaggaaggaaaaggttaattaagttttatgtaatcaattgtaatttttataatctgacccaagactttagccaggaaagtaagttacttgcatttacctaaaatataaagtgtagcacggtattttgcatatagagggcatttgattaagtatttgttaatttggttttctctgcccagaactgtccttgagacatataatttgactgatttatgatttattataacttaaatattatatattttagctttagctgtttcttcttattcaagttgaataatttctgttaatgtgggccattgtaataccccccaattaactggaatattttgttagaaataaacctccacttgagtatatctgtcaggatataggatatcaatagcaaatgataaatataccataatttgcagattagttgatgatggacttacccaataagctgtagttatattaagactcaaattgcatgaaggtttgtgagaaatcagagacttgattgtaaaatgaaggcaaaattagctttctgagggtataggcataaccttcaactcttgattatctagaagrtgtttgggtcaatctttcaaagtagttagaattaaccaaaatatcagaagaggtgtctgtattctgtattcagtgtggcattttcatttgaatgatttgatttttccttcttaagtggttgttttgaatcttgtttttctgtccacttcatttaattttacaacccattagagtaagtcaggatgtatttatggtttttgtgttttcttggggctgccttagatacttgacgagttgcagattacttaataatggtaatactatggttgggtagctggattagatggaagatttgctgttgttggatggtctgggctccatccaggctcaagctgtatggatgtgaaagtgcaggaagtatgattaaggaagatactagcgtttactaagtgctcgacatcgtgctaaagtgttaaaggtatctaatcttgtattgattaaaagccacagtgccgtgtttctaatcccactgtctgattttaccctgagaacctacatttgccaagtgacttggagaaattgtttaagttgtttatactcaattctctgaaaaatttgcagatacctgcttctgtgttttataaatgatgatgtttagtgggacttttaagaattgtagaaatgggattgtggtttttcttaaaaagacatcttgtgatgaagaatgaataggtttgaatccttgtcagtaccaaggtgtgtaacttactttaaccacctttacccactttggggttcggttttgtcatccagtgaggatattgaattagataaatattttgaaggcttttgtttaaatgagtgcaacccacagtaagaaatatgttttataaaacattatagcacagacacatgttgaaaacagaaattttacaaaccagtatatgttcttacagtgtgcaatatttctttattttttaaaagtgtcattaactaaattgattttgtgacccataaccattactttcagtttgaaaaacactgttttagatgctctcagacagctctttcagtgttaggatttataagtgagatttaggatttaattttgttatttttgatcaaagaaatgcactttgagtttttagcaatgttgagctgtaatcctcattgtaacatggaggggacatgataggagcccatgcctgcaattttatgaggggacctgccagatagactgctgtgggatatgtggggccctgggccgctggcctggccagcagcagtgacactcttctctttttgtctccttctgttgactgtctccctgtcgcagtacctcattctttgtgctgccttactttcctgattactaaaagaaaatacttgaagtgcatcgagggaatgaccagtgagccctgtggtaaatgtcatcagctgatgggttcttgaaaagtccatggattttgtttgagtgtgtgtttgtgtgtgtgtgcgcacacgtgtgtgtaaagtagggaacacgtatcatgtgtcttttatctcattactttcttcatcttgaatgttattactatgcatataattgtttgtatagctgggatgaacgtagaaatagtgttccatcatgtaagaacaatgagggtatttcctattgtggctaaatcgcctgaactttttggcagtggtgagattgagctgggcattgggtttgttacaccacattctgcttgcttacacgctcctggaagtcagacagttttgaagtgggtggtaattgagaggccaccttcgttgatatctttttgcttgagagagggagaggggagatctcagcaataaacatakctattctggaattccaaagacctcattagaacagaaatgatgggtcattcacctacgctgaatttttcattgtgaatattctctaaaacagagagaagggctccagatcaaacccatactgtaaggaggcctacaaaagcaaatcggtacactgtggtagcatagagtgtggcttgtggcctgtgactttcagggttgtggttaatcttattgctaaaatgcaaacattggctttttttttccccctcaaagtcagcctaggtcaggggagcaagctgcagaactgggtaatgtaagttcaaatgatgaggtgatggaagggctctaggacaaggacattccagagcagagggatgtggacagacaagcagaaggttgtctggaggaatccggaggggaagtcctgatgaaagactttgtgtggtccttcataaggctgttgggtgttcagggaaagaaggccgagccatcctactgagctgcacagagagggcatagagcagccctctgggactgagccattagcagtgtgcagactctttgtgtgtagccagagaaaaccatccggagttcctagggcatatttttctgtcctgattgttttgttttgtttttttttccaccacagaagtgctgattttaccatatctttttcatctttcaaaagtttaaaatatakaacatgggtttctcactaagaatctgacattttacgtttactaacacattttaaaacaaacctttgataaaaatatttaaagagtttttgtgagactattgtatgagcccatacaatggccttgttaagttgggggatattttctcagttttacasaaaattgaggctactataattattcagttgggccatatgaaattgcgatcttgtagcacccaaatacagtagttgaatatcagcagtattaggttgttcaacctaataacttacctgagatgaaatacccaggaagtgacaggaatggtattgtaattcagctctgatgacaccagaattaatcttcgcatttttatactttccaagaattggcctgcttggacctgtaacaccagtgccagtgtacactgccttggggcccaaggaaatgcatgctcaacccactgctgctatcatggggcctgaagactgacttacctgccaccccaggccctagcaaaacgttaccacagcctccactaataactgcaccataagctactgaggaaatcacagataactggtgctgtgtacagctgaagaaatcttacagagactacactactgcatacatctagaatcatagctaaagtgccctacccaaccaacaccatagatacatgttcaaaacaatgccctcccctgttaaagtaaattcaaaaaattgaaggcagtgactgacaccagatgcccaagtagcaacataaggatgcaggaaacatcaaaaagcaaggaaatatgacatctccaggggaacacaataattcttcagcaatgattccgatcaaaaagaaattcacgaaatcctgaacaaataattcacattcttgattgtgaagaagctcagtgagataccagggaattatgaaaaataatacatagaaatcagaaaaacagtgcaggatatgaatgaaaaatttgccaaagagatagttatcataaaaaagaaccatacagaaatcctgaaactgaagaattcattgaatgaaataaaaaatgttagattcaacaatagtctagattaagcagaagaaggaatctgacaactcaaagacagaagacaggtctttcaaaataacctaatcagacagaaataatgttaaaagaataaaaaagaataattgaagccttcgagacatatgggatactataaagccaccacatatttgaatcatttgggtcccagaagacagagaacaaaaggattggaaaactcatctatttttttgttattaaataatagatgaaaacttcccaaatctatcaaatgatttagatatccagaaacaggaggctccaagatccgcaaacatatacaatgcaagaaagtcttctccttggcacattatagtcaaactatctaaagtcaaagacagaattctgaaaaaggcaagagaaaagtgcctagtcagttgtaaagaaaaccttatcaggctaatagtgaatttctcagcagaaaccttacaagccaggaaagaatgatacattcaaagtactgaatgaaaaaaatgctatccaagggatactatatctagcaaaaatattctttgtaactgaaggagaaataaagtcttccccagaaattgcttaagggagtcctaatcctgggagcaaaatgactacatttaccatcatgaaaacttatgaatgtgtaaaacctgctaataaagcaatcacacaaaggaataagggaaagtaattaaatggtacctgtacggaaaaccaccaaaccaaaattagaaaaaataagtgaaaaagaaaggaatgaagagtatataaaaccagaaaacaataacaatataataggaacaaaacctcacatgttaataataatcttgaatgtggaaggattgaattttccacttagaagctacagcctggcagaatggattaaaaattaagatccagctatatattacctgcaagaaacacactttacctataatggcacatgtagactaaaaataaaggaatggaaaaaattactccacacgaacagaaaccaaaagtgagtaggagtagctatacttatgtcagataaaacagactttaagtcaaacmcagtaaaaaaaaaaaaaaaaaaaaaaaaaagacaaggtcattatgcaatgacaaaggaatcaattcagcaacagaatattatggctctaaatatatatgtgtccaacactggagcaacaagattcataggataaatattactagatttaaggagagagactacaatacaataatagtggggaactccaaccccattctcagcatgagacaaatcatttagacagaaagttaacaaacatttataaacttttatttaaactggattttagactacctggactcaacagatatttacagaacattttatccaaaaactacagaatataaagtcttctcatcagcacatggaatattctccagaatagactgttaggccacaaaataggtaacaacaattttttaaaacgcaagatcatatcaactatgtcctcagaacacaatggaataaaactagaaatatcaagaggatctttggaaactatacggatgtatggaattaaacaacatgttcctgaatgacgattagatcaattaagaaattaagaaggaagttaaaaaatttcttgaaacgaatgaaagtggaaacacaacataccaaaacctgtgggatacagcaaaagcagtactaacatgaagtttatagcaataaatgcccacatcaaaacagtagagtttaaataaacaatctaatgatgcacctcaagaaactagaaaagcaagaacaaaacaaatccaagattaggagaaagaaagaaataatgtagatcagggcagagataagcaaaatagagactaaagtaacagttcaaaggatcagttaaacgaaaagttgattctttgaaaagacacaaaattgataaatcactagcttgactaaccaagaaaaggagagatgacccacataaatcagaaataaaaaagaaattacatctgataccacagaaatacaaaggttcatcagagactatcatgaacagctacacactaacagactggaaaatctagaggaaatggataatttcctggacacctaccatctaccaagcttgaatctggaaaaaacagaaagcctgaacaaaccaataaccagtaacaaagtcatatcagtaataaaaagtctctcagcaaagaaagggctaggagcagattgattcttggccgaattctaccatatgtataaagaagaactgatactaatcctcttgaaactattccaaaaaattgaagagaaaggaattctccctaactcattctatgagggcagcatcacccttataccaaaaccagacaaggacacacaaaaaaagaaaagtacaggtcattattcttgatgaatatggattcaaaaatcctcgacagaatactggcaaactgattcctactgcacattgaaaagataatacaccacaatcaagtgggctttataccagggctacaaggatggttcaacatatgcaaattaacaaatgtgatacatcacgtaagcagaatgaatgataaaaaacatacgatcatctcaatagttgtagaaaaagcatttgataaaattcagcatcccttcatgataaaaaactctcagcaaatatggcatagaagaaacatacctcaaaatcataaaggacatatatggcaaactcacagctaacatcatactgaatggggaaaagttgaaagtctttgctttaggaacagaaacaataccaggatgcccattttcaccactcctattctacatggcactggaaatcctagcaaatcacacaagattaaaaaataaaatgcatttaaattggtagaaaggaagtcagactgtttacctttgagatgacgtgatcttattagaaaaaaacaagactaccacaaaaaactcttagaactgataaacaaattcagccaagttgcagaatacaaaatgaacatgtaaaaatcagtagtgttcctatayaagtataatgaaatagccaccaaagatatcaagaaggcaattctatttacactagctattaaaaaaacataggaataaatttaaccaaggaggtaaagatttcgacaaagcaaactacaaaagatggatgaacgaaatagaagacaaacaaatgaaaagatatcccatgctcatgaatcaaaagaatttatagcatttgtcaattttggcttttgttgccattgcttttggtgttttagacatgaagtccttgcccatgcgtatgtcctgaatggtattgcctaggttttcttctagggtttttatggctttaggtctaacatttaagtctttaatccatcttgaattaatttttgtataaggtgtaaggaagggatccagtttcagctttctacatacagctagccagttttcccagcaccatttattaaatagggaatcctttccccattgcttatttttgtcaggtttgtcaaagatcagatagttgtagatatgtggcattatttctgagggctctgttctgttccattggtctatatctctgttttggtaccagtaccatgctgttttggttactgtagccttgtagtacagtttgaagtcaggtagcgtgatgcctccagcattattcttttggcttaggattggcttggcaatgtgggctctcttttggttccatatgaactttaaagtagtttttttccaattctgtgaagaaagtcattggtagcttgatggggatggcattgaatctataaattaccttgggcagtatggccattttcacgatattgattcttcctacccatgagcatggaaagttcttccatttgtatgggatctaattaatctaaagagcttctgcacagcaaaagaaactaccatcagagtgaacaggcaacctacagaatgggagaaaatttttgcaatctacgcatctgacaaagggctaatatccagaatctacaaagaactcagacaaatttagaagaaaaaacaaccccatcaacaagtgggcgaaggatatgaacagacacttctcaaaagaagacatttatgcagccaaaagacacatgaaaaaatgctcatcatcactggccatcagagaaatgcaaatcaaaaccacagtgagataccatctcacaccagttagaatggcaatcattaaaaagtcaggaaacaacaggtgctggagaggatgtggagaaataggaacacttttacactgttggtgggactgtgaactagttcaaccattgtggaagtcagtgtggcgatccctcagggatctagaattagaaataccatttgacccagccatcccattactgggtatatacccaaagaattataaatcatgctgctataaagacacatgcacacgtatgtttattgcagcactattcacaatagcaaagacttggaaccaacccaaatgtccaacaatgatagactggattaagaaaatgtggcacatatacaccatggaaaactatgtagccataaaaaatgatgagttcatgtcctttgtaggaacatggatgaagatggaaaccatcattctcagcaaactttcgcaaggacaaaaaccaaacatcgcgtgttctcactcataggtgggaattgaacaatgagaacacttggacacaggaagaggaacatcacacaccagggcctgttgtggggagggatagcattaggaggtatgcctaatgttaaatgacgagttaacgggtgcagcacaccaacatggcacatgtatacatatgtaacaaacctgcacattgtgcacatgtaccctaaaacttaaagtataatttaaaaaatccactttcctgtaaaaaaaaaaaatttatarcattaacatgacaatactgctcaaaggcatctactatatcagtgcagtccctatcaaaatagcaatgtcatttctcacagaaatagaaaaaataattctaatgttgttatggaaccaaagagaacagccaaagaaatcctgagcaaaaggaataaagctggaagcatcacactctctgacctcaaaatatatttcaagactatagtaatcaaaatatcatcatatagctataaaaagttatatagaacagtggaacagaatagagaacccagaaataaatctacatacttataacaactgatttttgacaaagacaccaagagcatacgttagggaaagtacaccctcttcaataaatggttctggggaaaattggatatccacatgcagaagaatgaaactggacctgactttctcccagtataggaagacttaaatgtggtcaggcatggtggctcatgcttgtaatcccagcactttgagaggctgaatcaggagaatttcttgaggccaggagttcaagacccaccttggcaacatagtgagaccctacctttgttaaaaataaataattaattttttaaaagacttaaacgtaagacccaaagctrtaaaactactagaataaaacatagggaaaacacttaaggatgttgttctagacaaagattttatggttaagatctcaaagcacagagaactaaaacaaaaatagacaaatggcactatattaaactaaaaagcatctgcacagcaaaggaaacagtcaaaagaatgaagaaacaacctattgagcggaaaaaaatatttgcaaactattcatccaacaatggactgatatccaaaatgtrcagggtactcaaatagctcaacaataaaaaaaatcccattgaaaagtaggcaaagcccataaatggacaattctccaaagccatgcaagtggccaacaggtatttgaaaagatgctcaagatcactaagtgtcagggaaatgtaaatcaatacaaggatgatatatcatcttaccccagttagaatggttatcattaaaaaggcaaaaaatagcagatgttggcaaggatatagaggaaagggaactcttgtacactggttgtgggaaggtgaattaatacaaccacttatggaaaacagtatggatatttcttagaaaactaaaaatagaactgtcatactgtccatcaattctactattgggcatctatccaaaggaaaggaaattagtatttcaaaggcatacctgcacttgcatgtttattgcagcagtattcacaataggaaagtgaattatggaatcaacctaagtgttcatcggtggacaaatgtataaagaaaatgtggtatatatacatgatggaatattatttggccgtaaaacataatgaaagaatgaaatcatattatttgcagccacatgtatggaactggaggtcattatataacccaggcacagaaagataaattccacatgttgtcactgatatgtgtgagctaaaaaacttacccttgtggcagtaaagagtagaacgatagatgccagagagtgggaaggatgtgtgggtggcaggggttggaggggaacagataaagagagtttggtcaatgagtacaaacatacagttagaagatgtaagttctaatatttggtagcagggtagggtgactgtagttagtgacaatgtgttgtatatttcagagcagctagaagagaggacttgaaatgttcccaacacatagaaatgataaatacccaaggtgatgaataccccaaacaccctaacttgatcattacacattctatacatgtagcaaaatatcacatgtgctctgaaaatatgtaaaatatgtatcaacaaaagtttttgtttgtttttaaagcagcctataaacagagtgtcattttctgaatactaaagatattccttttttatgcatctggtaagtggcttctttttattctgcagactgatgctctgcctttccaggatgccacgatgatgaagagtaaccagatacatttagaaaaggtgcctctccggggcccagagctgttgccaaggcgcactggtgcattcggcacaragcggtgcgggcagaaattaacatggtctgcatcaggtggaggctgtgttaattttccctgtgcactgactgtctaacctaaacatcccatggtggaaacagaaccattagttggtatttctagggaagggacattgagcctcagatgggttaaaacaatatttgcaaaaagaaaatagtctattaatgaagattatctgaacctgagacagagaaaggtcacacactcagcttatttaagcaaatagaaattcacaaatgtgtttgtgattttaccagttatagcaatttcaagtattgaaatggcatttggaacaagaagatggggttcaggttagagcacagtgaataacaaagtgaaaatgttgttattcttgcagcttatagatacctcattgtgtttgcttctgctaaatgctgatgaaatggtcttgaaagagcaatgcctgttgttcttggcttctattgattttgttccatgcagtgtgaaggatctactgcttgtcctaaaatgatgaaattgtaagaagattggttttggatgacagccagtatctttccttaacttcagtttgcagaaattggtcacccaaaaacaaaactgtaactcccagaatccactccctactcctatgaaactaaaacttagagttcatgctcctaatagctttgagagaattggaaattccagcatattttggagcaataatccatgtttgatcagttttatttaaaatgaaaaggataggcaggctgccttcagacatcctaagcctttgtagatatcttacttttcttcaaatattcacgaggagtaactgttggaaccttcatgaattatggtattgaaggtaaaggagatttgctcccctttcttttagaattttgaacattttactggatctcaattgtagaaacaaaagtttttaaatgtaaattaatagtggctttgttctaaggcatacatttcctactgtgtaaaggaaaagttaagcatgtaaattgtatccatggccaaacacctacacagacaaacacagacaagcaacacacagacatgcaatacacacacacatgcacacacgcccctgcctggcaagaaccctcttactcacatgtgggtttcttcgctaataaagaattgttctacgaatgcaaagaaggctttttcatcacttttactcttttttccccccttcgttgctttaatcaaagtgtttccattttagacataaagaaagtgaggtataggtatgtgctgtgaactkcccaagatcacattcaaagtaagaaacattggcataagcagctcgagcttggaccgtcttggaattggtattcagtcttcgcaatcatttgcctttttgctatcttagacacttcaactatggcactacaggtccgtgaatggaggtttggggtttgagggtttagaatttttgttctttttttttttttttaaatgtgaagtatcccgtatgtcattgtttttcatagctttttcagttgttaaatgttgaggaagatgcaatgctttttctttgctagagatgctgcctttgggtacatttttagtgtctttactttgttgttcttgtacacctgtagcatttattgagctcctgttaattaagaggtagccatgtgggatatacaaatgtgtacagcattgtctttgttctcaagaaatttattatctagtacgtcacatgggctcgtggaaaggaataaaggagtgtctcacacaggacaaactcttgtcaccccttatgctaatgggataaaaggaacatttgtgatttcttagttgagaccaattcatcaggataagaagtagaaaaggtatgtagaaagaaaaataaagacagctgaaatgccctgtgcactttatcttaaaaatttctratttgggtttcgtaggtaatttaacagggaatttaggatttgacgtttattattctggttttgatccagttaacatctgggatgtgggttcagtagggaatgcttggtggcaactcatgttcttcagaacagatgtgtatgtggacaagagacagagcaagccattggaaaaagagcactttccctctgcttggtgggaatctcttctgttgtttagggtttctgggtgtcatttctggagcaagggcatgtcttctgtgggtagacaagagtgaggaaatatcactaagagtaaatgtggtgtgtggtagtggcagataaagaccaggagagccmgtcaggaatttactaagcagtgttccacaggatactggttttatgatatacactctgatgggaatcctttggacatatctgtgttcaggaattggaagaactgcagaaggaacagaaatggaaaagtaggagttgcaggtaagcgtgggttcttaggagccatgggtgaggacgtcctgggaccctggagtttcagtgaggtcaagtgcactgggactgaagaaagcttctggatcaggagtatttagagccatcttttgagacatctgacttttgctatatggtggtcttagtattgataatgcctttaaacatatataacatatataaagaagtgttttcagttcatatattttatgacatttccagccccagctcttgtgacctcatccatcagattgctagatcttaaaggatatgtattactatatsataaatttgcttttcagaatattttgataatggtttttcttttttttattattattatactttaggttttacggtacatgtgcacaatgtgcaggttagttacatatgtatacatgtgccatgctggtgcactgcacccactaactcgtcatctagcattaggtatatctcccaatgctatccctcccccctccccccaccccacaacaggccccagagtgtgatgttccccttcttgtgtccatgtgttctcattgttcaattgccacctatgagtgagaatatgtggtgtttggtttcttgttcttgcgatagtttactgagaatgatgatttccaatttcatccatgtccctacaaaggacatgaactcatcatttattatggctgcatagtattccatggtgtatatgtgccacattttcttaatccagtctatcattgttggacatttgggttggttccaagtctttgctattgtgaataatgctgcaataaacatacgtgtgcatgtgtctttatagcagcatgatttataattctttgggtatatacccagtaatgggatggctgggtcaaatggtatttctaattctagatccctgagggatcgccacactgacttccacaatggttgaactagtttacagtcccaccagcagtgtaaaagtgttcctatttctccacatcctctccagcacctgttgtttcttgactttttaatgattgccattctaactggtgtgagatggtatctcattgtggttttgatttgcatttctctgatggccagtgatggtgagcatttcttcatgtgttttttggctgcataaatgtcttcttttgagaagtgtctgttcatgtccttcgcccactttttgatgggattgtttgtttttttcttgtaaatttgtttgagttcattgtagattctggatattagccctttgtcagatgagtaggttgcgaaaattttctcccattctgtaggttgcctgttcactctgatggtagtttcttttgctgtgcagaagctctttagtttaatgagatcccatttgtcaattttggcttttgttgccattgcttttggtgttttagacatgaagtccttgcccatgcctatgtcctgaatggtaaagcctaggttttcttctagggtttttatcgttttagatctaacgtttaagtctttaatccatcttgaattgatttttgtataaggtgtaaggaagggatccagtttcagctttctacatagggctagccagttttcccagcaccatttattaaatagggaatcctttccccattgcttgtttttctcaggtttgtcaaagatcagatagttttagatacgcgacgttattcctgagggctctgttctgttccattgatctatatctctgttttggtaccagtaccatgctgttttggttactgtagccttatagtatagtttgaagtcaggtagtgtgatgcctccagctttgttcttttgacttaggcttgacttggcgatgcaggctgttttttggttccatatgaactttaaagcagttttttccatttctgtgaagagagtcattggtagcttgatggggatggcattgaatctgtaaattaccttgggcagtatggccattttcacgatattgattcttcctacccatgagcatggaatgttcttccatttgtttgtatcctcttttatttccttgagcagtggcttgtagttttccttgaagaggtccttcacatcccttgtaagttggattcctaggtattttattctctttgaagcaattgtgaatgggagttcacccatgatttggctctctgtttgtctgttgttggtgtataagaatgcttgtgatttttgcacattgattttgtatcctgagactttgctgaagttgcttatcagcttaaggagattttgggctgagacaatggggttttctaggtatacaatcatgtcatctgcaaacagggccaatttgacttcctcttttcctaattgaataccctttatttccttctcctgcctaattgccctggtcagaacttccaacactatgttgaataggagtggtgagagagggcatccctgtcttgtgccagttttcaaagggaatgcttccagtttttgcccattcagtatgatattggctgtgggtttgtcatagatagctcttattattttgaaatacgtcccatcaatacctaatttattgggagtttttagcatgaagcgttgttgagttttgtcaaaggccttttctgcatctattgagataatcatgtggtttttgtctttggttctgtttatatgctggattacatttattgatttgtgtatattgaaccagccttgcatcccagggatgaagcccacttgatcatggtggataagctttttgatgtgctgctggattcgttttgccagtattttattgaggatttttgcatcaatgttcatcaaggatattggtctaaaattctctttttttgttgtgtctctgcccggctttggtatcaggatgatgctggcctcataaaatgagttagggaggattccctctttttctattgattggaatagtttcagaaggaatggtagcagttcctcctcgtacctctggtagaattcggctgtgaatccatctggtcctggacactttttggttggtaagctattgattattgccacaatttcggatcctgttattggtctattcagagattcaacttcttcctggtttagtcttgggagagtgtatgtgtcgaggaatttatctgtttcttctagattttctagtttatttgcgtagaggtgtttatagtattctctgatggtagtttgtatttctgtgggatcggtggtgatatcccctttatcattttttattgtgtctatttgattcttctctctttttttctttattagtcttgctagcggtttatcaattttgttgatcctttcaaaaaagcagctcctggattcattaattttttgaagggttttttgtgtctctatttccttcagttctgctctgattttagttatttcttgccttctgctagcttttgaatgtgtttgctcttgcttttctagttcttttaattgtgatgttagggtgtcaattttggatctttcctgctttctcttgtgggcatttagtgctataaatttccctctacatactgctttgcatgcgtcccagagattctggtatgttgtgtctttgttctcattggtttcaaagaacatctttatttctgccttcatttcgttatgtacccagtagtcattcaggagcaggttgttcagtttccatgtagttgagcggttttgagtgagattcttaatcctgagttctaatttgattgcactgtggtctgagagatagtttgttataatttctgttcttttacatttgctgaggagagctttacttccaactatgtggtcaattttggaataggtgtggtgtggtgctgaaaaaaatgtatattctgttgatttggggtggagggttctgtagatgtgtattaggtccgcttggtgcagagctgagttcaattcctgggtatccttgttgactttctgtctcgttgatctgtctaatgttgacagtggggtgttaaagtctcccattattaatgtgtgggagtctaagtctctttgtagttcactcaggacttgctttatgaatctgggtgctcctgtattgggcgcatatatatttaggatagttagctcttcttgttgaattgatccctttaccattaagtaatggcattctttgtctcttttgatctttgttggtttaaagtctgttttatcagagactaggattgcaacccctgcctttttttgttttccatttgcttggtagatcttcatccttttattttgagcctatgtgtgtctctgcacatgagatgggtttcctgaatacagcacactgatgggtcttgactctttatccaatttgccagtctgtgtcttttaattggagcatttagtccatttacatttaaagttaatattgttatgtgtgaatttgatcctgtcattatgatgttagctggttattttgctcrttagttgatgcagtttcttcctagtctcratggtctttacattttggcatgattttgcagtggctggtaccggttgttcctttccatgtttagcgctttcttcaggagctcttttagggcaggcctggtggtgacaaaatctcagcatttgcttgtctgtaaagtattttatttctccttcacttatgaagcttagtttggctggatatgaaattctgggttgaaaattcttttctttaagaatgttgaatattggcccccactctcttctggctggtagagtttctgccgagagatccgcttagtctgatgggcttccctttgagggtaacctgacctttctctctgactgtccttaacattttttccttcatttcaactttggtgaatctgacaattatgtgtcttggagttgctcttcttgagcagtatctttgtggcattctctgtatttcctgaacctgaatgttggcctgccttgctagattggggaagttcttctggataatatcctgcagagtgttttccaacttggttccattctccccgtgactttcaggtacaccaatcagacgtagatttggtcttttcacatagtcccatatttcttggaggctttgctcgtttctttttattcttttttctctaaacttcccttctcgcttcatttcattcatttcatcttccattgctgataccctttcttccagttgatcgcatcagctcctgaggcttctgcattcttcacgtagttctcgagccttggttttcagctccatcagctcctttaagcacttctctgtattggtttattctagttatacattcttctaaatttttttcaaagttttcaacttctttgcctttggtttgaatgtcctcttgtaactcggagtaatttgatcgtctgaagccttctctcagctcgtcaaagtcattctccatccagctttgttccattgctggtgaggaactgcgttcctttggaggaggagaggcgctctgctttttagagtttccagtttttctgctgtgttttttccccgtctttgtggttttatctacttttggtctttgatgatggtgatgtacagatgggtttttggtgtggatgtcctttcagtttgttagttttccctctaacagacaggaccctcagctgcaggtctgttggagtaccaggctgtgtgaggtgtcagtctgcccctgctggggggtgcctcccagttaggctgctcaggggtcaggggtcagggatccacttgaggaggcagtctgcctgtcctcagatctccagctgcatgctgggagaaccactgctctcttcaaagctgtcagacagtaacatttaagtctgcagaggttactgctgtctttttgagccctttctgtgccacatgctgatttttgtgaccttgagcaagctgcttaacttttttgttcccagcttccttatccataacagtactattgggttattgtgaactttataggaatataagtgaaatgcttagaatgacatctccctccccaaaagcactctgtaagtggtctattgtggcatccccaaagaatcagctcatacgaaatcagcctaggttttctgaaaagggcttcctttcttctccccatgccagcttcattaactgaccaggctgccctcacctcaacatcaggccttgtgtcgggaagtgtaactgtcagcaacagggctgcaagagcctgggtgacttggccagagtgggatgaaggggcatgggtaatatagaagaaattgtagggaatcggggaggaggtcctttgggatcctaggtgggggaaaaaacaggttttcccttcacatggacacaatgtctctgtcagcaagccccagggacaaaaacaatgggaaagtattcagtcaagaaggattttgcatcaagtatgtaagcatgattggtcagaatatrctttttctctccctctgctcttcctcctcccacacttcggttttttgtaaaccttctattggccttatttcttattctgatttccaaaataattttactaaatttgataaactgaaaaatatagtaattacatgtataatttgtgattattaacaaagtttaatttttaaaaattctgaagtacttctctaaacttttagtatcacttggatcaatgaaaacataacttatgcagggtctacttttcaggtgatgaaaatatgagatctactctttgtattctgaaagccgttttattgggtgccttttgttggtgttttaaatgtgtgagatctcttttccacatggtctgttattaattattcattcttcctatctttatttgtagatcacctatttagataactcaatttgcccgacacttgggcatgtagttatactagtaacatctgttaattcatgactatttttgactagcagtgttaggggcattaacaagttttatttattgctgttcttttaaactgctcatagtacttctaaccttcaaacagctttttctggctcgttctcactccacatttgacatgcaacaaaagtgacttttgtcttgttatggaagtgggccaaattgtttgacataatgacaggtgggatattatttagggctgccgagaccttgggctccacgaatgctttgttccctctagattgtgttttgacttgcatgtttctgacagccattgtggcattcacctcttttattgagtttggaacatgcctgtgagagctagcctcataaaggttttaactgtagtgttagcagtttcttaaacattttacatattaacatttattatagtttcattttggtgttaatattatacttaccatttattatggtttggtttggtttgtttttacatagtttcccattatgaggaatacagccactgtgtttatggctgtgaatatttgtgctttgtgatttcttggccttttggacacacacagaatgtcttgacatgtatttacttacaaattgaaaaaatacaacagatcttaccgtttcaggtaaatgaattccttaagaaattaaaacttttgctgattagatatcttcagtaccagaagtaccagagtatactattacaacaggaagtgataggccaatcccaaatttgagatttattataatactccacaggggtagtgatttatctttttttcttacttttcaataaaaatatctttatttgatacctttaaagtttcaggcactgtgccatgcatgggggaggtagcaatgaagcagacaaacagaaaccttgtcctgggcttgtgtgccacaatttgtatctctggctcatcatagcaaatgccctgtctataggatctcaccaaaagcaaattctaacacagattggtagcagtaatgctgtagctactgttcactgagagctagatgctttgtgtatgatattgccaacccttacaagtgagaaagagctgttactagcttcattttataggtaaatgaactgaggctcagaaacattaattaatttgtcccaaatcacaggtagtcatgagaattttaaaactccagtctttttgttgccagttgttcctttctattatgatttatctctgaatacaggttttagactaatgctattaacttctttttaagataaaatcaaggcattgacatttaaaacttggtggtttggatcaacaaagaaaatggctatttttgtatcttgacttttgtttttttgaatgaatgaaggaagaatgattggccttaaaattttaccagccacatatttttggatacagtttatgtatatatacattatggcatgaggatttttttttctaattttattgcagagtgacaatatatctgtcacggttcttcttggcatcttcacaaatatccacgtcagtcccagtgatcttaagtgtatgggatccctcttcctagtttttgtcacaaggcacagatgtttcaggtcagcaatgcagaacgatcccttatgcagtctgaattttgtttttgagttggacctacttgtagcgttctgtgagattttgcagtagatagatctatttattgaagggagacaatgccccagaagagcgactgctgcatgcaaccatgcaggactctcaggtgcccatccagcgcctcaggyagatgcttctcttgggccactaagaagcttcccctcctgtgaccacagatgggaaaattgcctcaggacctgctgcagggaatattgctggcaggctttctttggtttcttgtgctgatctaggcataattgtggtcaagaaaatattgagtgaatgattaacatatagttctcaattttattcagctgccgaacttgtagcactaggatataatccaggccaactaccttgctgtggcttaggatttcaggttttaaagtcaaaattcaaagctgtaaaaacatttgaatccttttaatgtattgtaaagataaataatgactaatgagataaaatttatgtcaacacacatatttcttcctctaccctctagtctcctattgttttatttggggctgtaataagcatctgtaatgatcattccaactgaggtagtttcaaataatgagggttggtaaccacttcagattttttttttttttttttttttttttttgagacagagtcttgcactgtcacccaggctggagtgcagtgacacaatctcggctcactgcaacctccgtctccgaggttcaagcatttcttgtgcctctgtctcctgagtagttggggttacaagcgtgcaccaccatgcccggctagtttttttgtatttttagtagagatagggttttgccatgttggccaagttggtctccaagtcctggcctcaagtgatccgaccgcctcaacctcccaaagtgttgggattacgggcatgagccaccatgcctggcccacctcagatctttaatactgattttcatacacctgaggatagatttggggaaactgccaattcatggaaaaatgctttcctctttttttcaaaataccataatgacttcttacttgatttcatctcatctcagatgtgtgaggttcagggagacagggtgtgagtgaggatggtgggtggtaaaggcggtgaacaagcagctggtctgtttgcaagggtttccagggtctggttccaccttcgtttcccgtccttttcctctatgacctcgggtgcagggtgtcagccacactggccttcttgcagacccaggacacagcaaccgtgctcctgcctcacggccttctgctcccagacgccttcacaacttgcttcttttcttttctttccctttccctttctttttttyttttgtttttttagatggagtcttgctctgttgccaggctggagtggcgcgatcttggctcaccgcaacctccatgtcccaggttcaagcgattctcctgcctcagcctcccaggtagctgggattaaaggcgcctgccactacgcccggctaatttttgtatttttggtagagacagggtttcaccatgttggccaggatgttcttgatctcgtgatccacccacctcggcctcccaaagtgctgggattacaggtgtgagtcaccgcgcccggcccccttctttctttttggtcacctctcagtgacgtgttccctcaccttgtttgacatgcagtctgctcatacctcatccttttctctgcttttacatttctccatagcatttatcactatctaacgtactctacatatttcacttatctgttgtttattcttcccacactaaagtataagaggtccattaaggcagagatttttatctgtgtagcacctcctagaatggataagctagaatggtgtctcaaatggtggtggcccatcgtaggtgcccagtcatcatgatttgaatgaatggaaggagattttctgtgtaatcacagcacttcaaagctagcttcattttgttttgctgttttcaagaactttaaaataaaatatgaatattcaagctgtgcttcctgttgtgtatttaaggaaaaaagaaaacaaaaaaacgaaaaacgagcatcatggaggcctcttctggagtcaaagcagcaaggcagtcgtgatgagcagtgtggagcagaggggcagagaatgcagggacccgggaacagtacgccagggtcgccttgcttgggaggctggacaagtgatcccagtcagtttttcacctatcaaacatgggtgtttgtgtcactgatgtcccttctgtggtttaatgactacagagaacagttttgaagaaaggaaaacgtagcttagtgaaaaaatgagggaggtttattatttgcttatgtattttttttaattttgaaaatgtggttatattatttgttgtcatttcgttaataaagcttatttcataaatgtaaagaaattcaaaaggtagattctaataccaatgttgagaatggggcagtcctactttcatttagaagactatatttattactatgcaaatttttgggggccagtgtctctgagcttcgccctgtcagaattatttattatatatttggggttggtaagtttaaaaagtatttaaggattaaatacatttttttttctttaggagttgaacagtagtgcattttttttttttttttttttgagacggagtctcgctctgtcgcccaggctggagtgcagtggtgcgatctcggctcactgcaagctccgcctcccgggttcacgccattctcctgcctcagcctcccgagtagctgggactacaggcgcccgctaccacgcccggctaattttttgtatttttagtagagacggggtttcaccgtgttagccaggatggtctcgatctcctgacctcgtgatccacccgcctcggcctcccaaagtgctgggattacaggcgtgagccaccgcgcccggccagtagtgcatttttaagtcttgctaaataagtgaataattttctaaaacatcacttaagcggatgataatgagctctgtaggcaaaactgtgaaatattttctaatattctaatcagatttttaatatgcctcaaattaaaaaaacaatagttcaaataaattacatattttcaaatatacacctcttttgggttcataaagaaacactggacatgatgactttttttttttttttttttttttttttttgagacagaggatcactctgtcgcccaggctggagtgcagaggcgtgatctcggctcactataacctccacctcccaggttcaagagattctcctggcttagccttccaagtagctgggattacaggcacccgccaccacacccagctaatttttgtgtttttagtagagatggggtttcaccgtgttggccaggctggtgttgaactcctgaactcaggcaatctgctcaccttggccccccaaattgttgggattacaggtgccacccggcctgatgacatgtttaatggacgtcactrccagcaattttagctgaaatctaggaccttttaaacaactttgaagtgtgtgatggatgcccctagtctagtgggcagaatggatcggaggtcggaaggtctggatctccttcgcagccgtcgctctgactcacatgacaatatttagaaaagcagattcttctgtcttgactccgttgatctctgctggacttccacgcttagactttgatggttgctattccacacattgctcccaggctccacatcccttcccaggaatcctgaatatggtagttggagagattcttgaacatcttgggttatatggaactctctacctctcaagatattcttttctaccttcggatagctctacactctcatgagggttttggcttgttttgggggtttggtgttttagtctctttttactcatttttattaaatgtgctagataccgctcgtactggtatcttggcaccagtatcttttttagggacatttttcctccttctaatgcattaacttctcttttcagcttttttttttttttttgagtcttactctgtcacataggctggagtgcagtggtgccatcttggctcactgcaacctctgcctcccaggttcaagtgattctcctcagtagctggaattacaggtacatgccaccacgcctggctgatttttgtatttttagtggagacagggtttcatcatgttggccagaatggtctcggaccctgacctcaagtgatccgcctgccttggccttccaaagtgctgggattataggcatgagccactgtgcctagccccttttcagctttttatcattgaaacacttgatgtgaggtattaatgctaatataaagattgagtgggttgaggctggagatgtttctctgtggtgtaccccgaagtgcctctagacccgtgctgcccaaggtggttgtcatgtgcactattttgatttatattttaattaattaaagccaaatgaaatgaaaaatttagcccttaaacttcactagctacatgttaagtactcattagccacatgtggctattggacagcattgatacagaatatttctattaccacagaaagttctgctggacagtgtggctatagtccgatattgatccccagtactctgaaaaataagaattccatgaattatttctccatacctccctgcatttatttcttcaattttactatagcagatgattaaagtgacactttatttgagggagtcaggcaagtttaaatggaagagatgcagtttaatttgtgttttgaaggaagagtatgattttgagaatagatattggtggaattgttaatttcttggcaagagtgggtaacaaagacatgagtaattcaacattacaggcaattaaagtgtgaggttttcacctagagatgtacttggaaaaagaagaagttggggaaattaagttctattaaaaaatatgtgtgtacatatatgtaaaacagtgatgtaagtgtcaagtatgaattagaggaagaatttgttcattcatttagtaattatttgttgagtttctactctgttctgacactgaactacatgtagaagatattatcatgagacctctccctgggagggtctcatgatagtatcagtgggtgagataaacacagaagaacatcactgtattttgccatgtgctgtggttgagagagggatgatgtccttaggaagtaaggctggtggcctgggaaggcattaccaagcaggcactttcagtgtttgtcaccgaggtggtagtttgacaaacacattgttttattcaaaagcactttgtttcattttcctcatcaggctaggaactgccacattttgatcatttcacagtgtattcatattaaatgggcagtaatgctgtatttatacagaaatggaaattccctttctcagcagtctcaaatataccagtaatacatttttttattttaaaaaatataatgaggttaaattaagatcatattaacatcagaatacttttggttggtgtaaagtgaactttttattacctggttgcagattaatggtagtaagagtaacagagagtataccaatggaaaaaaaattattctaaaacaagattggttggttaagattgattggtcctcaagtccagccatgtggcagagtgacttttggagcattaaagtatgtgcatatctctatattctaatcctggagattttgagttagtaagtctggggttatttcctggcatctgcggtttttttaagcacctgaagtgattctgatgggtagccagggttgaaaaccatggtctcttgtgttgaaatttgtaataaataatagatgtcacattttgtatctcacagcatggaatggccctcttttacatctgtcagagtctgacattattcttgtgcagatttgaggcttatggtattggtgaacattcaaagttaataaaaagatggaactcaagaaaaacagaggtacttacatgtgcastggctaatagcaagagctctgaaaccagtttgcctgtctttgaatcctgccttactgtttaccacctttgtaatttagggacttacttaactttgtggacctcaatttcttcacttgaaaattagggataatagtatctatcttgtagagcttaatttgtgataattgaaggagttatatgtgtcttatttaataagatgtacttgttattacctctggaatcaggagacatatgtttcttatttggtgacatacaagcagtagaatgttttggttcagttggcaacattctttctttctgtgtggtgcataaaataaaatcttatcttacattgatgatgtcttacattcatttatgacatgctaataattagatgtattaattattaaaaataaagtggaatgctttggtcttttctttaaactgaaaaattacaatgatgagtattaatttcaagcgagtattgggcatttctctgtgccagggacagtgctaagcatttaatcttcataacaggaatcatagtaggtattttggggcatgattttgaggcagctaagaaaatcacaaaactaagatttaaacacacttgactctaaaccccagcctaataaccactgtgctatactgactatcctgatatttaatctacagttctgtgcctaatccgcagagttagttagtcctttttaggtaatgtggcaaggaatataaaccaaggggagtccaatttagtgttttctccgttaaccactcagccctaaatgctaacctatgaggttaagggaaaaattggttaagaaagagaatacagtaatttgacatccttagggcaagattctggactgtacaaataccagaagcatcatggccagacatgatagtaagtaggaagactgtgaatgtcatatagtaaatagtggascagccaacgattaggtgattttcttcattgttgatggtcatttgactgacatgcctatgtgtggctttctttgtatttatcctgtttgggatttgctgacctttatgaatctgtagatttatgacttatatccttttagggaaatatatgtcttctgcctcattctctctctctctctctttttttttcttctctgggagcccaattacaagaatgttataatattgtcccacaggttcttaagatctcttcattttgtttgatacattttctctctattcctcagattcagtagtttttatcgctctatctttacaggaaagtctttactgactctgtcatcaccaatctgctaaacccatttgctgcttaacaatgtcgattttatatccgtatgatgttgtttagttttagaatttttattagattcttttttacaacagatttttttctgatgatattcctttcattcatcatgggcatatttttctgtataaccttgatgaaacttatagcagctggttgaagatccttctctgctaatttcaacatctgggtctactcagggtcaggggtcagtcttcattgattttcttctgaaaatggatcatgtggttttttttgttttgttttgtttttgttttcctggattctgttacatttgttccaacaatgttttttttttccccccctgggtaaaaaattaattttggtgactcaaactgcaaactcagactcatgggtggtaactgaaatcatacttcgtttgttttagtcttagtctggtttaaatgtcagccagagatttgggcagagtttatacacagaayttatgcatcgtcttctctaggtctgtctctttgctgggattcactgttattgccaacctcatttccaatagctatggttgccttaaactctgtcctttggttcttcaagccagtaagacaatgggttttctattggagattttggtatctgtggagcttgcaaattcataaaaattaggaaattcactagagctattcctttatctttattgcaagtgtcacttcccttccagaatcttcccacttttgatgatctcagatgcccttagctagttttgttattgttgtttgtttgtttttagatgtcattcatggtttatagttactatatgtgggcaatttaaaaataggtcttttaaaatttcttctggagaggactcttctggatatcttcctttttaatacccgcagatgtttcttgtgaagaagacatctataaaggttacatttcgggctgaagaactaatgaaatttctgcttcctaacaccctgcagtggaggtttacaactcttgcttcattttccctgataaatgaatgtattcttttgtaactttagtgtctttcatgaatataatttattctgaattttcagtgagcacatttgatgtggtttttataggaattagaatgctttcttttatatattgaaacatttgacctgctaacaactcttgtgttatataattgtgtatgtaataggaggaaaagtaaactctgcttaatttgcctagagaattgcccaactatttacttagttaacataatgttaacctagttagcaatgcctatccattattagaaatattttatctttattttcttgattatagtttaaaaaatcaaaggtttctgcttgatcatataggaactggaaaaaatttttctcagtgtgtttaatcccttatttctcaaaattatgtactgtgaaattttagtatgttgaataagtaccttattagataatgtatgtctcactcttctacaattttctcatttgaactattatgatgcaaaatttgataggacaactataaaaagttaataagtgtaggtttcaatgtggaaaataatgaaaaatgtaaaaatttaatttctttttatacttgctaatttgtttaaaaatctcagaaaagccataagagctttaattttgaaatgtctcattctaggctgcattgtgtatatgccatttgtgtggttgtttttctgggatttagttaaattcatttttatgtcttatttcttaatttattgtactttccctttgtcaagaccagacatggaaactgtactttcaaatagaatcactgtaagactattaatttttaaggattatagaatggttatatatttgaccatttacaaatcgttatatatttaccatttacattttatataaggcctattttttgataatgtaaaatttacatttctaaatattttgggcaattatgtaatatgcatgtatcaatggatggggaaacagtaaaaatatatattttcttgtgtagattatacaatttgggaaatattcttcagcaatctcttattatttaacattgggaattttaaaaaacaatcaaaaagtggtatgtaaggatcttgcatcagttgcaaggagcagaaaaaacttagctaaaagtttcctaacgatgagaagtttataagcttataaagcagaaagttggacacaggtctaggtcagcagtgttagtgtagacagaggctctttctattgtttgggcctgacagtcttattgtattatcttggtcctagggctagtttcctcattcttataaagtggttgctacagctccagatatctggattttttccccatgatggtattagaggagaaaacctcttttaaaagtttctcctgtattctattccactggctgggggaagagaattcttacaattgtcttgcaaccataataatctatgctcttggtctagaccatgtgtttcctgaccacctggaagagtgaataccagaacaaaattaggactctggctgttaccaaggaagraatgtaaggtggagactgttgttcttactcacagattttagatggcaaagatatttcagttccatgaaagagccatattctctttgccttcaggaccttgtcaggaccaagcacaccttgctgtgtggaggtttttctctctgtttacccaacagacttcttcccatcctttaactttcagcttagagataacttcttttccgaagtcttaaatatcagaaaatacagggactttaaagctaaaagtactactaccggtaaagaaagatactttgtaatataaaggttcaattcttaggaagagataacaattctaaatttgtctccatttaacctagcatcaaaccatataaagcagaagttgactgaactaaaaggtgaagtagacaaattacaaacatagcaggagattttagcctatttttcttttccggtttttttttttttttttttttttttttttttttgagacagagtcttgctctgtcacccaggctggagtgcagtggtgcaatcttggctcactgcaacctccacctcccaggttcaagcgattctcctgcctcagcctcccatgtagctgggattacaggtgcttgccaccacgcccgactaatttttgtatttttagtagggatggggtttcaccgtgttggccaggctggtcttgaactcctgacctcgtgatctgcccgcctaggcctcccaaagtgctggcattacaggcgtgagccactgcacccagccagcccacttttcttaatacctgctagaagcagatggaaaagaaggaagatttaaacaacacaattatcactttagctaagggccaaatcatgtggtttaatatatgcttagattagggtatatggcaccagacttaaacatattcttccaaagaatacaaaaatagggaatacttctcaacttcctttataaagtggtacarcttagtgagaatagttagagaaaggaacattacagaccaatctcacttatgaaccttcataccaaaaaaccccacaaaaaatcctgcaaataaaagccagttatatataataagcctaacataatattagccaattgagtttattcccggaatatatagatggtttaacattttaaaatcaattagtgtattttaccatgttatctaaataaagatgaaaaattatatggtgcttttaccagaagcagaaaattgataataaaggaacttaaaaaatctgccatatctatgttttctactgctgctctaccaaataactacaaacctagtggcttaaaacaacaaaaacttactgycttrtggttcttacaggagacctgaagccaacataggtgacactggcaggcggtgtccttctagaggctccaggggagaatgtatttcattgcctattgaagctttagaggctgcctacattcctcggctcatggcccctgcatcactctaaccttttttgttttttttaaattgtattttaagttctagggtacatgtgtacaacgtacaggtttgttacctaggtatacatgtgccatgttggtttgttacacccatcaactcattatttacattagatatttctcctaatactatccctcccccagccccacaccccctgacaggctccggtgtgtgatgttccccgccctgtgtccaagtgttctcattcatttcccacctatgagtgagaaaatgcagtgttttccatcaatacctagtttattgatagtttttaggatgaagggatgttcaattttgttgaaggccttttttgcatctattgagataatcatgtggtttttgttgttggttctgtttatgtgatggattacgtttattgatttgcgtatgttgaaccagccttgcatcccagggatgaagccgacttgattgtggtggataaactttttgatgtgctactggattcggtttgccagtattttattgaggtttttcacatcgatgttcatcagggatattggtctaaaattctcttttttcgttgtgtctctgctaygctttggtattaggatgatgctggcctcataaaatgagttagggaggattccctctttttctaatcattggaatagtttcagaaggaatggtaccagctcctccttgtacctctggtagaattcggctgtgaatctatctggtcctggactttttttggttggtagtctattaattattgcctcaatttcagagcctgttattggtctattcagagattcaacttcttcctggtttggtcttaggagggtgtatgtgtccaggaatttatgctatttcttctacatgttccagtttatttgtgtagaggtgttgatagtattctctgatggtagtttgtatttctgtgagatcggtggtgatatcccctctatcatttttttattgcgtctattcgattcttctctcttttcttctttattagccttgctagcagtctatcaattttgatcttttccaaaaaccagctcctggttttagtgattttttraagggttttttgtgtctctatgtctttcagttttgctctgatcttagttatttcttgctttctgctagcttttgaatttgtttgctcttgcttctctagttctgttaattgtgatgttagggtgttgattttagatgttttctgctttctcttgtgggcatttagtgctataaatttccctctacacactgctttacatgtgtcccagagattctggtacattgtgtctttgttctcattggtttcaaagaacatctttatttctgccttcatttcgttatgtacccagtggtcattcaggagcaggttgttcagtctccatgttgttgtgcggttttgaggcatcgctctaacctttttatctgtcatcacagcatcttccctgactctggccctactacctccctcttttccttaaaaggaccctagtgattccactgggcccatctgggtaataatccagggcaagctcaccatcttaagatccttaccttgatcacatatgtagagtcccttttgctttgaggtataacatagtcacaggttctgaggactagaacatgaacatttgtgttgggggagattattctgcttagtactgcagtgctaagaatgtgtgtaaagaatattctacttaattataaaaatctttctgatacagcaaatgagacagcgttgccctctaacaccatatgtatttgacattggaatggaggacatacccaatacatttaggcatataagtaaacaaaatatgatctcaggaagaaatctctcatatttgcagataaatatgattgtaaacaaaggaaattcctaatgaatctatagataaattactggaataatacataatttttggcattaatcttagctcaggttgccataacaaaatactgcacactgggtgtcttcaacaacagaagtttttacttttgcagttctggaggccgggaagtcacaagatcaaggcaaattcagttcttgttgagggctcgcttccttccttgtcgtgtccccatgtggcagggagagagagggagtaagctctctggtgtgtcttctcataagggcacgaatcccatgtggagtcccccaccctcatgcctcatctaaccctgcttacctcccaaaggcccatctccatccccatattggtattttgggaggggaaacaaacattcagtccttaatagaaatattgctggatgcaaagtcaatacagtggataaaatcagttgtatttctatagaataacaacaaacagaaaagaaaaatttgaaaatatgctgtttatgatagcataaaatatcaattagaagcagtaaaaaatatgcaagatcacaagaagaaaaacattattgagaggaaattatagaagacttaagagaaagtaggtaatatgatggtgatcagtgggaagactcaatatcactaatatgtagctcccctaattcatctgtagatttataagcagttcagcagatgcatatgtgaatatgtaaattgataagttgattacaaaatatatatgtaaatgcaaagggacaagaattgtcaatacagtcttgaaggaaaacatagcatgggggaagaactgctcaggtggttagtaaaatttattttaagtcatattaattaaaacagtgaggcattggcctgagagtaacatatagaccagtggaacagagtattaaggactttgtgtagtgccttgrgaaggacttatctttttaataattgatgctggccatatggaaaaaattcttataccatctataacatttctacatggattatagaatgtgaaagaaaaaataattagccttctaaaacatgatagagtagaatattttcataaccttaaggtagggaaagatctctcatacaggacataaaaagcttaaccagttttttgatctttgcagtttgaatgatgaggttcctcttggtcatcagagactgttagcaygtgagaatgtgtacacatgaataatggctgttgacttcttgaacgctagttttcagagtgattgcaccatacattttttagtgctgttactcagtatgaacccaggggtatagcattatggaaacattgatatagcttcatctaaaagtatctggaatccaaaatctagttatcaaactttgccaagttttctaacactacatgtaatttccttgtggaatttcctttaaatggtgacagtgcatttaaaaaaatatttaatatgtttattctttatgtaattttatgcttaaaaattgtgtgaacgggctgagtgcagtggctcatgcctgtaatcccagcactttgggagactgaggctggtggatcacctgaggtcaggagtttgagaccagcctggctaacatggcgagaccccatctctactaaaatgacgaaaattagatggggaaggtggtgcacacctgtaatcccagctactcaggaggctgaggcaggagaatcgctggaacccaggaggcggaggttgcagcgagctgagatcacaccactgcactgcccagcctgggcaacaagagcgaaactccgtctcaaaaaaaagaaaaaacaaaattatgtgaattatttgaatataattcaggttttagaagtcatgtgactttctcaggaggaattccgtactaaatttgctttgcacagccacagactcctcagtgaccccagtagtcacactttcttttccactgcccttgttcgttgttaaggtaaaattacattggtgaatccacttcacaaggatattgccagagttgtgtgctcacaactcttaatataacttgaactatgcagggcagtacaaagagaatggccaaaagatttgtgttccagtggattatatcaagtgtcagctacaatacaactataatctagaatgtgaattgggtattgactttagtatatagtcaagctgcttctgattttttagtgtctggaatttttccaaacaaaactaaaaagtaaaatttgtactcaatatagtcagaatttctagtaattgctttgtgtgtatgaatctgcttctgtgctgcacaaattcatgagtatacatgagtagaaaaagaaaactaattcctgaattcaccatttcatgtaaggattatgatggagttgggggatacttttagtcttccaatcactgcccatatttctttatcgctgcccccaacagtttgaaaaatgtgtcagaaaatgagcaaattaatgttactttattcaagtaatatataaatataggaaacctggacattggtttagccagggaacatggatgatgtgcaaattcaagaaacattgtagcttgtaatcccagcacactgggaggccaggcaggtggattgcatgagctcagcagtttgagatcagtctgggcaacgtgacaaaacctcatctccacaaaaaaatacaaaaaattaaccgggggtagtggcacctgcttgtagtcccagctactctggaggctgaggtgggaggatcacttgagcctgagacgtgaaggttgcagtgagcaaagatcgcataactgccctccaacctaggtgacagagtgagaccctgtgtccaaaaaagaaaaaacaaaaggaaacatcatagaaggaaggttttgcctgtgtaattaatactgtgatttgtaaatgtgttactttttaggtttgattaatgggtatttcctatgataatctagttatttcatatgaggaccaaaaaagagatttcactaaacaatgtgctttcagaaatctgtcagcttttgaatcctataaagttttacaaaacacattggtttgtctaattttctttagtctatgattttattttacttttttgagacaggctcttgctctgttgcccaggctggagtgcagtggcatgatcttggctcactgtagactctgctccctgggctcaagcgatcctcccacctcagcctcctgagtagctgggactacaggtgtgtgtgtgtgaccactcctggcttgtttttacatttttgtagagacaggtcttgctatattgcctaggctggtcttgaattcctgagctcaagtgatcctcctgccttggcctcccaaaattctgggattacaggtgtaagccactgcacccagctgagcttatgattttaaaaactaagctgtctcatatatgcatattgtttttagtgacccgtagccttcatccatgtctagtggtgttatagttattacttacaaatgggattgttgaaattaagctcatagtaaaatatatttaatttgattttttttttgactggggctagctcttttttatttcagtgctagtttaagaactccattgtcatgacatttaggattactccaggaaaggttgataatctcctccctgcacccttaccaccactgtcaccatgcaaccctacctcttgtagaaacaagcaaacatacaaacaaaacccccaaaaccaattatggtgaaatataaaacacaacaacatgatgccttttaactttttgtattaaaaaaataaactgaaactttgagaatggattattttgaccttagcaatagtattacaattataaatcatgttgaaattttgtccttaagcaagaaagaaaaaaacagctaattattcaattctttctcaggaaaaaaaaaagaacctgaaaaaatagaggaaggaattaataaatataagaacattaagcagtaatatataaacaatataattaatgaatttaaaatatggttattgattgccagtgctaatcaagaataaaggagagaagaaagacacgcctaaaaatgtaagaaatgagagatgaaatatcttttagagaggagatttttccttaaatttaagactttttaacatgataaaagatatgggaaaaataatgaaatgaattttataggaaaatataaattattaaaattaattcaagaaaatctaaataggctagtgaccacagaaataacagttacaaaacattagtaacaattgtgaaaacaaagttctgaaaggctctttttcttcatcattttataagcctttagtgaatggatgatttttgtgccatttaattttcggagtgctttgaaaaaggtgagatagttcctaatcgaattgtaaagttatcaaaggcctgaaaaaaacacacacacacacacacagaaaagaaaaaattatagattgaacaagtgccaggcatwaataaaattctacctggaaccattaacagacatatttagctgtgaaacacttgaagtgttccaattaataatggcatttcctgtattcactttgaaactatgctgtacttaaaaacattttttttaacttttaaaagttcaggggtacacgtgcaggtttgttatatgggtgaactcacgccacggggtttgttgttcggattatttcatcatccaggtattaagcctagtacccatgagttatttttcctgatcttctccctcctctcaccctccaccctctgggaagccccagtgtctgttgttttcctctgtatgtccatgtgttctcatcatttagcttgcactttcaagtgagaacatgcagtatttggttttcctgttcctccagtagtttgctaaggataatggccttcagctccatccatgtccccaccaagaatatgatcttgttcttttttacggctgcatagtattccacggtgtatacatagcacatttttaaaaacccagtctactattgatggacatttaggttgatttcatgtcttctattgcgaatagtgctgcagtgaacatatgcgtgcatgtgtctttatgatagagttatttacatttctttgggtatataccctgtaatgggattgctgggttgaatgttagttctgtttttagttctttgaggaattgccatactgcttttcacagtgtttgaacaatttatatgcccaccagcagtgtgtaagcattcttttttctccacaaccttgccagcatgttttattttgactttttaataatagccattctgactggtgtgagatgatatctcactgtattttgatgtgcatttctctaatgatcagtgatgttgagcttttttctcatatgcttgttggccacacgtatgtcttcttttataaagtgtctgttcatgtcctttgcccacttttaatggggttgttgttgtttttttttctgcaaatttgtagatttaagttactaatatgtgttggatattagaccattgttagatgtatagtttgcaaaaactttctcccatcctgtaagtttgtctgtctactctgttgatagtttattttgctgtgcagaagctcaaaaacaagtttattttttatctcacaggtaagagtgcaagctagcactgtctcacagaaatatagtgtgagtatcacgtgcactttcaaattttataatagccacatttaaaaaacttaaacagataaattagtgttaataatatgttttatttaattcaaaatatccaaatgagtgcttaccatatggtagtggccctcttccaagtgtttctgtgccaggggctgctgtggtcagacaggtgggagctgtggagacagggctgtgctgctggctctgcccgctgtggctcccagtgctctggctttgcttctctctagctccatccagcttatgaaggtgttgagactgctgagatgaaatcaggaaagcaactaggatcttatgaggtatattcgagtgcttttcctacaagattgcttgaatagtaaagatttgcaggagccctgttaagggacaggaaaactgaggatttttcaacagtgatgtaaccttgctttgaacagagaggtctgacttgtgaagccatgtaagctagctgcagaggacagctgtcactgtgggcaaaccatctctgcctcctcgagctgaggtgctgagtgacggcaggaaccttctgcttgctgcaggacccctttgtcttcacatcactcttttagactcatgaggcttgatgaaaccccagagacgtccacagatgtctttctagccatagtgctgtctttattagtactttattagaaccaagggaactttagaaagtgtcatatggatgcttatgaatatttaggtcatagtcagtcttcactttacctaaacattttggagggtgtttgtgaatcataccataatttatttagtgtcttaatttaaggaaacgagtccgagtggaaagtaattatagtcatcagcaggctttgttagttgttactgggtctttaaaaaatattaagtttcatgtgtttttgatttcttttgaaaatgataaagggtttgaatctaataagagcacttctcaagataggttctaaagactacatacatcaaaattgtctggactccatgttgaaaattcaggttccttggtactaagccacaacttaaaaaaaattttttaagctacaactttttaaattggaatttaaaaattggactgtcaatagatgagccctgtaaatgtgttttggaacaattttcccatgtaattctttcgctgtaagctttggagagaggtgtatagcctgtaaaggtgactctggccacactacggagggtgcccagggtatggggtggggacgagtttgagtgcaggtggggttgggaggaagtgaatttgagagatactgggaagtagaacagaggagacctgctgatgggtcagccattgggcattaggagaagaaaagaggccaggaaatttccttagccgttgtggataatttttaatagtctttcctttttcttaactgttgaatactttaaggtattcactgttaaaggcaatgcttgttaaagttaagtacaatcagtggaacacccgtaaatgcaagttcatgtagctttcaagcaagcaaacttaaaatgtttttctttactgccttttctaaaattatatgtcattttgtcatgatttcccacagttatctcagggttatctccttcagacccaaagtctcacttattgatcagggcgtttgacccaaattttaagtgatatcttttccattaaagcgatttccttggatgggatggaatattacacagtccatgtgcataggcatgtgggaaatggtcacatttgtgggtggcattgtcacctctgctcttggacacatatcttctttttaaaaaggtatttgtttactttatctccacttctgtccatgctgctatttgtaatagwctttctaccatttttacctgaaacttttctaggagtttccaaatttatgtgtttttacaatgtcatatggtataaaattgatgtttaaaaaatgtatcaagcagtatgttcagcagacacccctgagccctactgcactcctgacctccacctccccatgaccccacctccccttgaccctcacctcagcctgctccccacctcttcttcaggcccaggatgggagggtgaggatcagggattaggtcagctgtctgtagcacatgttagtggataatgttttaaaagtcgaaacagttcaatggtttgttttctttaagcccagtcaaaatggccttggtgtcagaatggctctgtaaaaaatgtctcatgccatatagtttaattaaatggtctgagataaatgtcatgggtgttactatcattacctgtggtccattagtgaacacaccactctccaggtgactgaaatagtcacattctcttgcatttcagttttttcatttattaccattttttgggcatacctataacaagtactgccttaggcatttatttatctaatctttttttcaccttttactgcaggctttgcagttattagaaattctgtttatatatatgtcggcatatgtgcatttttgtatacatatttacatgcatttgtacatggatgtaatatccttttgagtattagttagctttctaccttagaaccacagagcaagaattctgcaagtaaagttgtctctgtaggggagaaaaagtaatgtcctttctcatctattacaaggttcattgctaaggcccctaaaataaaagattaataaaagaaaagtgtagacgtttatttgctgtcaattttaagttacacggcagtcttcagaaatgaagacccaaagaaacagggaaacctgtgtatttttgtgctgtgtttgatgaagaaatagacagtctacacaagtgtgattggaggataacagggtttgatctctttgatcagagataagggtgttcttttcctctgggtattgggaggacacctctggaaggagagttttatgacctgcttcgggggagaagggtgaggagaaggtgagagtgaccttcctgcttctgctgttttctcaaatgtcagtgtgccatatttttgggcaatgtgtcctaaacctcatcatctcctattgcctctactttctcttcataaagtcctctacagctcttacaggctgatatattttactttaaaaattaatgtacattgctgctggaaaggaacatatgaataatgaatacaaagataatgttattaatgtgctttctataaagagccatcctttctgatagcaagtaagccatgtagatcatataactgtttcctaacccatgttctggatagtaactagcctctaatttcccacagtcactgattctttctctaaaaagcatgatcataaaattgtgttttattacacagggtttaagccaaatttatgatatgcccaccacctggtgctgatcaacattgatgaatgttcttattggcccagtgttgcattgagcccctactttaaatgcatctgtggacatagcagcctacctgccctttgccactcccccttctttgtagagaggtacaagggtggtctggtgtgctctctcacttgggcaatgaggagccattgggcttagaggaagtacagttatgtgctgcataaccgcattttggtcaatgaaggactggatatacagtggcaccataagattatagtggtgctgaaaagtttctatcacctagtgatgttgccattgtaatattgtagcacaacrtgttacgcaggtgtttgtgacgctggtgtaaacaaacctactgcactgccagtggtatagaagtctagcgcatacagttatgtactgtacataatacttgataataaatgactatactactagtttatgtgcttattatactttttcatcattattttagactgtgcttctgcttatattaaaagttaactataaaacagctttaggcgggtctttcaaaagggatttcagaagaaggtgttatcataggagacgacagctccttgcatatcactgcccctgaagaccttccagcaggagaagacgtggaggtaacagacagtgatattgatgttcctgaccctatgtaagcctagggtaatgtgtgtgctcgtgtcttcatttctaacaaaaaatctaaaaagttcataaaaattagaaaaaaaaccttatagaataaggatataaagaaagaaaatattttttgtttaactgtatagtgtgtttacattttcagctatgtaatattacaaaggaatcaaaaaattaaaaatactaaaaagtttataaagtaaaaaatttatggtgagctaaggttaattatatttttgtgactttaatatagcctaagtgtacagtgctcataaagtccatattagtccataaagttcatgaagtccatattagtgtggattaatgtcctaggccttcacatcaactcaccactcactcactctcacccagagcaacttccagtcctgcaagctccattcatgggaagtaccttatacggatgtaccatttttcatctcttgtactgtacttttactgtacttttcgtgtttataaacacacatacttaccattgtgtcacagttgcctacagtattcagtacagcagcctgctgtacaggttgggagcctaggagcaataggctctaccatacagcctakgcgtatagtaggctgtaccatccaggtttatgtaaattcactccatgatgtttgcacgatgaaattgcctagtgacacatttctcagaatgtatccccgctgttatgtgatacatggctgtatgttagcggaattcaarcactccagtccacaaatctaaatgagggacatattcccaaagaaaaacattakttaaggttagtgtgccttcacgttgcccctgccttctgccattaatgagcaactatatgtccagagtgcacagcagttgaaactccaaataaccctcatgttttttaacttcaaatttcattttgttaataaaagttggagaaaaaatttatgtgcttatgttactcagcagtcactgatccaaggagcatatttcgggaggaattaatgctttgcttctcataggagtctgaattgggaagaatacttttgagaaaagttatatgaagagctgtttttttttgcagtgttttaaaatatatatttgtttttctgtatgagcaggatattgatttgacatatcaaagaatgggtcttgctgctagctgaaggaacactgaagtgtgcgggcccagtggaggtggggaccaggagtgaaggctaaagtcgacagtgtgaaagcataagctccctcaaaacaagcctgcattcattcttgagcgcggcttttctggcagtctttccagcttttaccagtatagtttgcttatcaaagcactttatcagtggggaagggatgtgggttaaccacttcacttagctctagctagctgtcccagttcgcagtctgtcagcaaacagctgcttttcagcatgtacaccctgtactgtgcagctgatgcaaggctgggacaaaaccagctttgtgtcaggaggtggggatggcaaaggggggcgatcttcaatgaaaagggaccgagcccaacttcaggctttaatttataagggcgctttggtgagctagttttttcaccaccacctcccccccaaccctctttatttcaaggttcaaggttaactttaaaagtatggtgtaccaaggcaggtaaactggagatattgtggcagggaatagttaaaatgtttatctttggaaacaaccattatactagtactacttacagtacttrtttatctatttatttatttatttttaccgcttttctctttcccctgctctcttgtcttcatttgctccttgtctttatgtcttcctttcaggctcctttagaaaccatgtgcaggttgccaacacctttgagaccttagtgctaaggaaagtgcggcttgagcggttgtaaacactagagagcagcagaaccaaatcccaagcaaccacttctttctattcacagcatccaggcgctttgttatgttacagcataatttgtagaattttcccctcccaaagacataatttgaggtgaactatgacgtagacattgatgccatcaccgatgtttggtttcttgttctgggcacaagataggattgtacttctcgtctgtttgaactcagacttaccaaaccagagttttctttcctgctactccctcccccattgtgagggacatgtgtcagatgctgcttctctgtcctgggagtccagaatgagcaggacccccatgcacagctgactagtgagggaactgcagtgtgaaccagcgtacttcagtgggaatggtttatttggaggctctggttacaacaacgtcgtgtagttttttgactgattctacagtgtgagaacttaatctagtttacctcctttttggaccatttgtaactctccactaagatttttatctgtttcccaccttcttttacttgtacaagaagcagttctcattgagggtgaagttgaaggggcattgtcagttcacgggagagctccaagtgtatgaagtgttgatacccagacagtttgcctgactgaaccatttcttcagctccctaagtgcagttacctttattagagaaatgtcatttataatcatgatgctaccaagggctccctccttttatctcacaagttcaggctgttcctacctcattacctttcgcctccaaaagataactccaggtacaacaggartagaaattagratgtatctactgagcacttatttaaaaccttacttacgaaagtgtgttttatggttcaggatagcataaggtgagctacgccacgttaatttggagaatactgcttaccatgcagatttcacagtacatatcagcatgccataggctctgaagtctttccgtgcagcttgttttatcttgtttatggtttacttttcccatagaatatgcttcgtgaggataactgcttattctcagtatatcctatatttactttctgacatttataggaagagaattatcattaatcagcatatatggtcttactgtttaacactgtcttggcattttgcctggagccccatttatttgggacacacaagtatgataatgggtaacgccaggaatttctatatgccttgtatggattgctaaagcctagaacagttgatgtactaagtgatccctgggacagaccttcctgggaagaagcattgattactaggtgccaacaagcagtaaggctctgaaaatcagtgattttttttttccagttagcaaacctattaatgaatcaataactcagtttattcccgagatctgcgtttatgaaagacaacttcataatctgttatactgatgtgtttagatctttatccagccaagacctaatttatcaacaccttgttatcttaaatactttacacagaagggtcataaatcctccttaaaagggctttatttcaccatttaattaagtctcccgatttccttcattgacttgaaaagggagttcagggttgagttgattttcattaggcacacaaattcttacattaaattaaagttaggtgaaaggagaacactgtcatctaattcttagaggtgcaataaatgacggctgagacagtcgcccaggccaggctgccctgcgacatgagattacttgtggagaggattttaaagtactcttttggctgggcgcggtggctcatacctgtaatcccagcactttaggaggccaaggtggttggatcacttgaggtcagtagttcaagaccagcctggccaacatggtgaaaccccgtttttactaaaaatataaaaattagccgggcatggtggtgcacacctgtaatcctagctgctcaggaggctgaggtgggagaatcacttgaacttgggaggtagaggttgcagtgaattaagattgcaccattgcactccagcctgggtgacagagcgagactccatctcaaaaaataaataaataaataaatataaataaataagttactcttttactctgttgttctgtgttattttctgcttcctaaataacttgaccataggtaataatattgatataattgacacaaatttgagcttttatttaggagagaagtctcttggtatgtatgatgggggatacagaaatgaatgataagacagagaaataggtcaaatgccaaatagaaagtaagtgccatttgagacacaagatgtgggagatgtatagtggtgaatccttggaaaatcagggaagacatatcctgatatcatgaggagctgactcatgagttgggttggccttgaagaatggataagctttgagctctgggaaatggagagaagggcatctaggcaggtcaggcacagcattcaacataccgaggagagaaaacttggcacatgaggggagaacagttaatttgacatctttgttaatgattaacacctttcataatgaagccttccctccacatggtgtagcctggcttgaggccatctgagaggagacagtgttcagggggagggttctgtttatgaattgtggagcaatgtgatgttgtgtgtgtgaagaattttattcagctataagttagaggcctgaaaacagcttaaatcattttttcttatgtggtaagaaggctagagaaggtagactagagatggtgtagcagttccatagggctagcaggggtggcagcttcttctttttccccccaaccatcctcagsctgggtttcttcctcatggtctcaaaagtggttgcttgaccttgggaatgatgcctaccttccaggccagaaacggattggctggcttctcctatctgcttctgcatttggtgtgttttaatacgtatcaggtaagctctggacaacttcactgtatacgtgtgagaatataagaacaaaaaaggcaaatgatgtgtttgtattttttgataatagttttggcttcgcagacaccccagaagtgtcttggacactctctggacttccagaccgtactttgagaactgttgttctagatcactgttggcctgtgagccagttgcaacccagaggtaaaaaggaatgttacgttttttaataacagcgttgttgacattaaaatccacataccataaattcaactatttaaagtacaacattcagtagtttttagtttattcctagagttgcgtaactatcatcacagtgaattttagagcattgtcatcaccccgaacagaaagctcatacccattggcaccaacattccttttctctcctaccgccccagcccctggcaaccacaaatgtactttgtctctgtagatttgctcattctagacgtttcatgtaaatggaataatacagtatgtaatctttttttaataggagttgttacatttttaaatgtttgtaaaagaaaaacagcaaagatgattatacracagagatgatatgtggcctggaaagtttaaaatagttactgtctgtccgtaaactaaagaagtttactgacccctgttatagaagataagtgcacatatttaatatttttgtacgtgtcccttatatacacacacatatatgcatatacatatatctatttatcattaaatacctttaatcctgtaccagtatattctgtgtgttagaaatcatgtgactaaaaaattgaaatggatgacataacaatgactatgaaagttttaatatttttttcagtatccccatgggttcttttatatgcctccggactggtacacagtctccttcggatctgattccagaatatttacaaataggccatattagaaacattttggcaattgtgaaaagtacagtttcaacacctccatcttagagctactgaaacatgttctctggaggttaaacccaagaatctgcattttagaaagtacctccagtgattctttgtgcaacttagtttaggaacgactcatctgtactgttaggatctaagctcatcacagggcaaaaggggcaataaaagcaatggcggtgaacacctgatagtttaatccttaagtaactaatttccagaagccttcttatatyctgaaagcattcttttaagaaataaatttattcttataaatcaaacattgttaattttttccttaggaagttacttacaaaaggtttaagaagacagaagactatttggttcagtgataaagtgaaggatttgtcctatgcctgaccagtttcagtatacaactttttcagaaagtctggaaagatttccttaggcccttggtcaaaaataattgagaaccctcccaatcaattaatatgatagatgtttaagggaaatattgctctagctttttaatttaagagcagtataacatgatactttggaaacttcttgctgccttctttactcctaaccacatgattgggtttgtggtgtctttcagcaattattatgcattggttaatgaatcattgcattattgattcagtgattatgcaattattatttcattggtcatatggtttggctcaaactataaatgaaggaagtatcaatttaaaataatctgggattggaaactacttgaattgcaaagacttcattttccttcatgataattcattcaactgtttgcatgatttaacatactttttcctttgaaaagataatttaactacatgttacatgtttatttgcattttatgctttcaatttagaatttttaaaaatgaaatttgagaagttccagattggtgttagaagttttctttgcatcctctccttagaggaattagtaagttacatggcaaatcagtaagaggaactgtattgtatctatcaccacaggttgtattccaaatgctacctctgttttatatggtgactttctggaagacgttttagctacctgtgaattagcagttttataatgatgaatggagatactactgctaccagttaggttactggttaaatcagactccttgtaagcaaattacctttttgttttatgcctctctctatattttcataagctttctaagggccgacatctttgttttgttttctgatatatacccaagaacctaaaacaatacttgttgtgtagtaggcatcagtaaatatttaataaatgaatggattccagatctcattttgaaagggatttaaggagacttaaggattgtgcaaatacatacaatatgccaagagaaaataaatttaatattgtggtaccaaaaatgagattagtacacatacaaattatatccatgaaattctgtagatttcctgagaaggcttgcagatttggccctgagatttccagctgtataggattccataagaagaagataaaagacaaatttgatttattgtctcttaaggcatccttgacctgggctactttcctttcaaatgcttgacattgattacagagagactgaggaatagctgtatgtctccagttcaaacctatcaccagcaccagaaaaacagttcacagtatatgtcttcccgatgatgaactagcaactgttgatgggcaactggatactatcttttgctgggattttattccaccctttggtcattgagaggttctaacttctacacttgttctttatggatctttgtgtgtgcccattttcaataataarttctgattatacaattataaatttttaatatagtttaagacttaggagaaattaggcagtaataaaaatggctaatgttttcataaggcatttcactaaaatgttaattgtattttcaaacttttaaaactatagaggccagaaagtggtgaccatgggcctaaaatattttctaaagttacaacttagttgttagcatttagaaatcagaagaaagtacaggaaacatttaggctttaaggtacccgccaggcttgcccacagtcactctgctcctcagctgcctggcctctggggcagttcagtttcacacaccaggaatgccctgagcccagatttcctacctstgttttttacttstgtttttgcttstgtttctttccccagatgtcctcatagctttcttcttcactttcttccagggactcaaatatcacattttcagtgagaccatctctggtcaccctatctcagattgtatccccatccccaccctgacacacacacccttttcaacttgatttttttttttttctctaagcacttacactggtctatacattttacttatttatcttgttgggtgtctctcctctcctgttatccaggtaactctgtgagggcatccatttgtagttgtttggttcactgctacatctttagtatctaggatacctagaacacagaagaggttgggaaactgattgaatgagtgaatttccagcttttgagaaatcaccagcaccaagcccagtggcactcctgtgtggaggcctcagcctgggcaaaacagctgaaagggaaaagagctctctagttctttgcttttctgaggagcttgtttgaaattcaaaatccatggctccaccccagaactactgcatcaggatgtgcgtgttaacagggcgatttctgtatgcacattaaagtgtgagaaccattgtttgagtttaccgtagctgcacctggcctgctttatgtatttatactacatgcttgcatttgaatttgtgaccctggtgtagagagtaatgtgatcatctttacgtgtgagagagttgatacagtaataatttattttgtttataaaaggaattggagaaaatccttgttattgtattggtgttgagtcacaaagataatacttgtgttctaggctttttcacattttagtgaaacatatgctatatatcactatgtcccaagcaatacattttgagctacagtatagctacaatttagcgaaccactttataacagttttactatgtttatctagcgcacacggccttgtttggagccaatgcatagtttgtcaactgtactacttaaaaaaaatctgttaccttcaccctcagaaagtaatagttccaaaggaactgttatagagtgagtcttataaattcttctgtgtgcacatgtcattcatccccagaggtcatttagagccctgagacttactgtggccaaatgtgttgtacaaactgctgcaaatccttgggaaatttaaataagaaagggttttatatgcattttatgtagggagcaaggtccatgtaaaatagaagttgggacaacattggaagttgtgtgctccctcttaacctcgtcctacaaattcgcagatgctggagaaagaacagcaaaatttcctccaggtgctttacaaccaccagattcagatttgcctcccttatctttttcttggctctccagcatcacaaatttgacacaggtgttcccatgcaccacccccacacatactttaagaagatgtgggcatatattatctttgtccacttttaatttcgaaatgatcttgcaaagaccaaacccacagactcttgtggaggagatggacagtaaccagcagtgatggatctgtctggttgtgcagagcatgctgtgggaaccacatgggctgtgtgttgatctctgtgtgggcacccgcttccctcctcctccaacctgcccccttctctggactgtcttcatatcactgggagaaaggcagttcacgagttggatgtaatgcatgctatctgtttttattgtagaggtttgactaggaccgagtaaaatccttaggaggcccccagcacagaagatagtattacatgctgctcctgtacaccccaatatataattcaaaatgacacaaaatttaaatttatatttaaattaaagtaccttcttcaaaatatttctttggaatattttgatgtcaaaattttaaataaatttgttaaagataagcttttcttttggggtgacacatggaatccaagcatacacttagtaagacttatgtgatccagcatggggttggccccagatccctccagaacacaattcaagattatttcataatagaagtgatgcctgacacaagtcttgtaaaatgagcaaagtgtttccagcctttttaagtttgccacttatactgggaggagaggttgggctggactgcaggtgcagttggcaaaactgtcctgtcaatgcagacataattctgggaaattaccaataccctggacaatttgcagtaaatttttgccaggtagataatttatctgcttttaatatctcttagttgaggtgttaagaaatagcagaatgccccaaggattactgataggtggtgagaaggaatttgaggggagtcagagacagggcaggttgacaaaccggacagtcacctgctgagtaattaaataaaggttatgatttattttaatgtagttgcaaaatatctggttagggtgtgtgtgtaaatatatgtgtgtgagagacagacacacacasacacaggcagagatggaagaagccaaaaggtgatgtccacaattaaatttagattaatatttgctgggattttgattggatttactttctgtcttgaaagagattaaactttaacaaaatgctttccagttcttaaacatatataattatctattttttaaaaaaggtatggtaaaggtcttaatttctgccatctcattccctctggttaaaaaaaaaaaaaagaaagaaaaaaaatcacccagcagagccatctatcttgtataatcatcctcataaacccctaaagtatgctttgctcccaaaacattattggcatggatcctggcatacaatcatcacaccagtaattacagctgttaactggaatatagtcgttagtatttactagcctctattatgaacacataaatcatttcataaaacggtgagtggacacattacttgtcgttttgtttatgttagacattctctgcaggtattctacatgaaagttaaagcattctgaggctctttttgtagactgtgcttatcattaatagaaagcagcatgtgtgcatcctgcaagcccatttccttatttaaagtgggcatccttcctctgctgagatgtgcttcctctttcgttacaagactgaagatcaagcctttgtaaacccttaaaggtacatcccttccaaatgaccttttgtcctgagcgacgaagatgtattgtttagtccactcagaattacatggggtgtcctaagaatttttgttttggttaattaaatttggaaatgtgtcattttttcctattataaagcataaatgaaagtccagtcaaattgattttagagttctggtagatgagataattgcagaagctaaatgatttagggtttaaaaatgtgtttagcttttcttcacttagagaaacttaaaacatatttaacttaagtgaacttgtctgtgcttcttttaatcttataaggtgagtttatatcaatgtcatatgctaagcagtcttatgaattaaactaaatggaatgaggcgctgtttgtgtgaacaaaagtattcattttacacataaagatgtttgttcaaagaagctaaaatggagatctaaatcagaattcattgaaatatgtaagatattgttttacaagctagatttttttaaggcgggccctttaatagtagctttcgccaagagttctgtttttctttaaagttttgaagctttttttaaacctttgttcaaagaactatagacactagaatttttttaagagtccaaaagtgtagaagaacaggactctgcagtggcaatgagtttatatattgtatcatgatagaaagccaatttgattaatatgacaaaacctccattttcttctactgtacatgttcaaattttgcagatcattttgtgaagtttttactttccgttaaaaatatatttttaataaaaacttttcataaactttatgaaatgtaaatttatggcttcttgctgtgtctgtattattacatgctatttaccctgttttctaataactgtcttgtactctgctatttccttacatttgtttctggaagaatcttccttgcctttagctgccatgttcatagagcagtaagttctgctgttgtttctcactcctgccaaatatgcttatcattatgttgatgatttctcttcctattccaaaccctaacacttttctcctggacttgcaagaatttctccctccatctctgcatattttatatattcaaataaaaatctttcaaattccctgctttaaaataaaatcaccttagcccctttctgagcatgctaaactcaaaggaaaagaaaatattaattaagccctgggttgcagagctttctacctgtgaatctctctatatctggctgccttttttctcccattaccttcacttgttctgcccatgcagccagtctcacacagagaatgtccttgcccaaaatgtgttcgctccttcctctggctgtgtccacctgttccacgtttttctccaaggacttcattctccctcgcttcataagatcagaatgctacaacttccagagtaccagccagggtcctcttcttcatggagccatttagacacaatgatcttgtttcaaactatattctctggttcctgttcttagtttaccattatgcttttgattatgtacatgctaaaatgtattccataatttctgggggattttttggtatattttctttgatattattatttcttatatgatctgtgttccttggaaaatgtatttacctcatttcctatttcttggtaacatctcagaattagtacaaaggtcttcatgtgggcaatattcaataaactaatgaagctgtaatagtcaagttacaaagtatataatttcggcttgattaatatgcactgacatcccacttctctattgctctggcagctggctgcctcatccacagacactgggttctatgaagttcactttgctctgtatccatcagcattatccaaaccaggcactgggaggaattcccaggaagttttgagagtggctgtgagcactttaggaaatgttcatgctaaaattaaaacaatttttctgataacatgtacaaattacaaaactgagattcacaacaagtttctgtctatggccagtgacgtagaaaataaaaatgtcgattcagctgctggtggttttgaatatcatgctaagagaaacgatgtgtgcgttaacccttctctttatgtctcgtgtaaattgcaaagatctttctgcatgacttggtgttattattatccttattttccacgtcattaagtccatgacacattctgaagatacttgtgtgaggactgggaaagcagaacaaatggaacctcatgaatggagagtgaaggtgtgtgcttgggaactaagactagatggagctttttgagtttgaagtgagagaagctgggaggctttccacaccttgagataaagagcgagccacatggccagaaagcccagggggtctctggcctaggaccaggtggtggcctttgacctccctttgccttttgagcaccgtttttggtgggtatctgttgaactaaagtaattgttcttagagttaaacctcttacattaaaaatatagtgaaacttgagtatttgagtacaatgtgctaaggaaccttaaaattaatttaaaaagttatttggtaatgtaaaaaagttctaaggactatgtggccatgtagcagttaaaaatcttttttttaacaaaaaagatgtaacatcttagagaaaggcagacatgataatttgccatgtgactgttagaataatctaatttacagagctgattattcaggcaatttcctatgtcggttttttaggattaagaaagaacttgccctctttgtttccattttgtattctgtacatactgagttgagcttgaagcatgtattcagattgctggagaacatactgacttagcagctggctacatggtatatacatctttattcattcatttatagacccaaaggttaaggtacaagtattaggaaatactttctttttattactcatgcagtatgttagtttaatttacttggataataatagctgtataatgttaagtgaatgcttgatttgatttttttttcaattacaaggagaaagaaatcttccactgtgcatgtatgtgtgtgcgtgtgtgcatgtgtattggttctaaatatttattttcttgacatgaacattttatcctgaccatttaataggcacttaataaatatttaccaaaacacacacacacacacacacacacacacacacacacacacacacacacaccccaccatcagatttacagaactaatagttttgatttttgaattattccagtatatttaataatatataagatcttaatggcattaacaacatgtgaatacaaatggaaacaaatttgatgtctttacaaaataaaaataaaaatcaactttaatgtcttctttctttgagttgttttcttctgttccttcttttattgaatgttaggttcatttattttagtatcttttcctaaatgattgcattgaagactataatattcctacaaagtatcaaaatctctcactgccattatagttttatctgtttctccttgttgtatgattatcatatccttttggtggatacttttactagtatatggtatacttttttattcttattagtattagaatttaaaagaagaaaggattaatgctaaatcaactttctttttgtgactagttgcctgagatttctttttctactaatattttcaattaattgtcctttttgctttcagtgtatttgagtgataattaggtattttttttaacttaggagttgtctttcccttttataggtaataatgcacttatacttattgctgttattgatataaagatgagttctatcttgttaatttatgttttgtcctttttctttgcttctcttttctttcttgcttttggctagtctgatagaattttcttcatttccttttccatggctgttggttacaaatttatactttctctttgtattctttttgcttttatagttaactttaacatgcatacttgatgaagtctaaatctaattaatagttcccattgcctactgagaacactttaaccctgaactgctacttcccatgtttcgatttattgctttccagtaatttcattctctcttgtttgcctttctttccaattaatcattgttatttttgttatttttaaataaggctggtaattctttagatgtatccatatgttcaccagtttctttactcactgttatttctgccatcttgctgctgcattgtgagttcatcttccttcttgataaagtctgtcctttgatgatagtttctgtgaaggcgtgtgagttataaactctctgtcttgtctgaaaaaaatctctattttgcttttacttttgaatagtattttggctagttacaaaattctaaactggcagtaattttctcttggcaatatgaaaatatcctattatctcttactatctatttttgctattggtgtaattgttactctttcaagattcttttctcctcaattttttttctttttttgattattagaaagtgaaaagcaattctccctgattgtgtttctcagttgtattacagtatatctggatgtgggttaatcttgtcttttaacctgagaatttgtggttttctttgattattgaaaattctcaaccatgtctccttgcttcactcacatattatctatttctttcctatgtaacctttattaggcacattttggagcatctcagcctctcttccatatctttaagattctctttcatctatttttaactttttggtttttgtgcagcattttggatgatgttctcatctctgtcttttagagcatgatgtctcctactcaccttacccatttggggataatttttgtgaccattttactaaatatatgaaaaatcagtttagtgcttacttcaaatctaccttttcttgcctgtggctttacttccttcttgtacctctttgaacatttcaaatacagttattttagagagtcttttgtattctgtgtttagttcttggcgtgcacatgctcctgtgtgtcacatctctgccctccgtggaatgctgtccacttggcctgcagaagggcccctgaagggggtctcacctttgcttgtgccaagactcctcaggtttcacctgtttcaaacaagttttcttatgttttgaattctgaaaattgtggcacagaacagtttatccaacccatagttgttacgaggaagagacacaagtcctgtccttttgtagcttatggccatcatcattaatgaaagaggttcgagtatatgtaaagatggcaggggaagctttattctgaagtcaaactataaataagtttaatttgacagtacatatctaggtaattactagtgttttaaaagtcagtgtcatttacatgtgaatttgaatatagttttcctatagtgtaaaatgaaattcaagccagctatttgaaaaatgcccagaacatctctggagacacagtttgatgaccatttacctagattctaggtcctacgtcagtattagctgacattatttgccaagaagttccaggatctgtgtatttaatgaaataaattagagaggaaattataagtaattaaaaaaaccctctaattacataaatttagatttaacacacaattcttaaaagacacatgcctgaacagtttttattattcctcagacagagggcttattggagttttggaagttctctgtctgtgttctaaatgttcactattattggctgaggtgctttctaattaactgatttccaactgtgttttacatataaagtaaaatctctgctcttttgggaatgctcttttcctgtttcatcaaatatgcagtcaatagaatgaaattcaaaaatacagattttagtagtctaaaattctgtgcactagaaccttgggtatagataataacaaatcttgtgcagctaagttcagttttgtactgttaaatgtggtggtgctttttatttcataatgtgcattatcgcgagcagattgaacaggtgatctcatttctgatattttccactccttttcttttaaaatttgaattttaaaaatcattgaattcgtgttattttaaatattttgtagcatcactatggtcctcttaatctcatgaatctcacgaatgcaaaaaataccagaaaagtgccacaaaattgtcacttgtctttcagagcatggattttatgccagttagggattaagagctactgcttctatgtgtggatcctatatccacccatttacaattagtaccttgaaggtttgcccttcctaccctggctgatrtatttgctttaaatttttctttaccctcctatgagattttctttagattttgctccactttggtttttttagaccctgttccctgtccttctggttttgcatcttctacttttggtacagcttataagagttgcctgtgtcgtctttccataccctgttgycttgttaggsttaggcagcctgtcaggctataaaactcaggcttcaatgaaaagcattccctcatcctcaagtccagcttttctcatcctttggcttattaggattacacaaaggccatttgatgttgggcctgctgtgttagcaatttaatgatgttgagaaagagacagtggccaagtcttaatgagactgccatttcacaacctctaaatcaagactatccagctgaggaagcctggctccttgccaccccaccagctgggtggtgcatgcattgttagtatcgccttacagagcgattggagcccaggagtgcagggtgtgtggtgtggtggagagtcatttccacagttgggtggggacgggaacttggaatgctgtcgttagtggatataactgctatgttttacctgtccaagatgctgcccacttgcaaaactgggattagagttttaggaactgaggttaacacaagacctggagactaagagagccacaaatattttacttattatattaatttttggctttttttccaccttgtatctttacttatgcatttattgtttctagtgattgaatgcttaagtttttggactaagcctttaaacactcaytttatgtctctttattattaggaaaaaggcacctagatctcttagtctgttaatcgactatcttaagggtctagagaccactacaactagtgtctcatctgttgatctctgctgtttttatttcagaatcaggtgactatccattctttgtttcattcctaacttctaggttccagtagataaagatgatcagcatttggctccttagaatggctggttataaatagaccagaaaatagcaacaagctgggctgctccttcactaatggcccttttcaaatacttaaaagcaaatgattcatcaaatagaatcactacaggcagaaacctgccaatttgtagaatttgactcctcctaatcagagtaaggcaacaggatgtggagttcctgctctgcacctgattaaagccaaatgcaggagaagcagctgggagaaggaggaagctcaagaccatctcagctgggggtagaactgctgcagaaatttagaggaagatgatgttacaaaacctttcacatttgttttatttttccagtatagtagtagataagcacatatgcagcgctggggtttaaagtttttaaagtaaccctgcatgtgctgtttaagcagaaacaataaatctaatgatgtatggtttaagcaacattcttccttatgagtagctgtattatttttaggtaattctgttgtcctaaatttgcctaatttcctctttcagtgtttattttgactattaacagaatcactgtcttcacttacattaaatattaatttcccccactggatttctatttcagtaagcatttttttttgccattaaggggctctctgattttgattttttaaaaaaaatatgcctctggatgcattgtagtgttttctcatgatgtattaaagcatgcaaaatgtattatctgtagtaattttacaacttttacaaaggtaaactaaaactccgtttccataaaaataaattttaaagaagttggaagcattctgcctctgctaaagtagaaccaataaaatattaagacatttcagattctttttatataatcttagtttctaaatcttgctgtttaggattctctatgtgatctctcataactgatatgtacattgtttttattttttaatttatttaatttattttatttatttatataggcataacatatgcctaagttatgacctttaggcatacatattcaatgttgacaatttcaatttttatgcatacttttattgttctcaaggctagccttaaaatattattttcttggaacaaatatgaatatatgcagcatcagtcatacatatataaactcctaaggctcatagcagttttctggatgtttgacagtttaagactttaggttaaacatatggtttcaaatatcaagaagcagtcaaagacatcacaagaaaacaatatactaatatcttttctgaatagatgcaaaaatccaaaacaaaatattaacagattgaatcaagcaacatataaaaaggattatacaccatgaccaagtgggatttatctcaggaatgcaaggttggtttcatatacaaaatttggctactgtaatatagcatatcagtagaacaaagggcaaacaccacataatggtcttagtagatgctgaaaaatttgacatttgaaaaaataaaacaccctttcatgataatagccaccaaactaggaataaaagaacttctggcaggaagaggtggctcatgcctgtaatctcaggactttgggaggccgaggcaggtggatcacctgaggtcaagggttcgagaccagcctggccaacatggtgaaactccgtctctactaaaaatacaaaaattagccgggcatgatggtgggtgcctgtaatcccaactacttcggaggctgaggcaggagaatcacttgaacctggaagtgagctgagatcatgccattgcactccagcctgggcaacagagtgagactaaaaaaggaaaaggagaacttctgcaacctgaaaaagaggatctagaaaaaactcacaggtaatatcatacttaatagtgaaagataggatgcttgccctctaagatgagtaacaagaggagattatgggctgtctctgcttcattcaacattgcatggaggctggagctagagcagttaggcaagaaaaagaaacaaaagacatccacattggaaaggaagaagttaaactatttctatttggagatgacatcatcttatattgtatatagatgatcctaaggaatccactaaaaattatttcagctgataattcagcaaagattcaggatactagatcaatatataaaaatcatttgtatttctatacactctcagtggtcaataagcacataaaaacattattaaccatcagggaaatgcaaatcaagaccacagtgaggtgacatttcacatctactggggtggctataataaaaaagacagtaccaagcgttgatgaggttgtggaaaaatgggaactttcatacactgctggtgtgaatgtaaagtgatgtagccactttaaaaaatagatgggcagttccttgaaaggttaaatgtcaagttaccatgtaccccagcaattccatccctagatatataccccaaagaaattaaaatgcatattcatagaaaaacctgtacatgaatgttcacagcagcattattcataatagccaaaagatgaaaacaacacaaatgttcatttattgatggataaatggaatgtaatttatctatacaatgaaatattttcagccacttaaagtcaatgaagtacttatgctacaacttggatgaaccttgaaaacattatggtaagtgaaaaagccagttagtaaaaaccaccacgtattatgattccattaatatgaagagtttggaatagataaatctataggcatagaaggctgactagtggttgtctagggttgagggattgggaacaaatggccagtgactgctaaaaggggtgtaaggtttcttttgagagtgttagaaatgttctgaagttgactatgttgatggttgctcaacaaccatcagtgtattactgaaaaccattgaactgtacactttatatgggtgaattacgtggtatgttaattatatctcaacaaaaccactgtctagaacttgacataactccttattgtttcactaagtgaagctatgtatgtttagatacgatttgagtcatagcatcagcgtaattctattctataatcattatagaccttaaagtttaaggcagattatatgtcaggttgttgccagtagatagagaaggttcaaattaatactctgagaaaataaaagttatacagaactgtagctgaagatttcaatgaagaaacaaaaattgtaaaggtttttgtggatgacaagtagggtgaggaagactatggatggcagaatattttgaattaagttgaacattttaaatttaaaaattatttctatttttaaaaaacaagataagcttaattctttaccaagtatacctgcagcgtatgcagctttcttcagtagtgttagaatggtgacctggtgacaatatggcttaattttagatttgacttttttggaaatgtaatgttttttccttctttacaattttcttaacattttcttttctctggcttactttgttgttaagaatgcagtatataatacatataacatatgaaatatatattaatccatgattaagacttcagtcaacagtaagtagttagcaattaagtttcagggcagtaaaaatttataaatggatttttgactgcaatgggggttggcactcctaattcctatgttgttaaaagggtcaattgtgggctggacacggtagctcacacctgtaattccagcactttgggagactgaagcaggcagatcacctgaggtagggagtacgagaccagcctggacaacatggtgaaaccctgtctctactaaaaatacaaaaattagctgggtgcagtggcacgcgcctgtaatcccagttactcaggaggctgaggcaggagaattgctggaacccaggaggcggaggttgcagtgagyggagatagcgccactgcactcctgcctggcaaacagagtgagactctgtctcagggggaaaaaaaaaaataaaaagaatcaactgtggttgtttatggcatttctttttaatatttgtaagatctgcagataatttgctgtctttcattcctggcatgaaaattttgtgtcttgtgtccacgctcctctcctccaccctcgccacccccaccacctttcagtgctacctggaaatatttcttcattttattgatcttttcagcaaattacctttggcttcattgatttttctctgttgttttttcctttccagttcattactttcagcttttatgtttatttcttttcttctgcttacttggggatcgatttgtctttttttttagcttctcaagatgaaatttagattatgtgttttagatctttctgctctttctataagtgtttaaaaccataattagcctcccagcactgcctttgctgactgatttttgatatgttttaattttcaatcaattaaaatacatattctaatttctcttgtgacttctttgacccatgggttatttagaaatatgctctttctaaatatttgcatattttctagaagtcgtttttattgatttatagtttgattctattgttgttgagagtattttctttgttatttcgatccttttaaatttgtggaaacatggttttggtccattttatagtcttattacatgagcattttggaaagaatatataatcatctgctcttagatatagtgttcattaatcgtccattagttcaagttagttgatagtgttatttctcgatttcctgttctctagtttcagcaatcactgataaaactgttgaaatatccaataatagttctgaatttgattctgtctccttttggttgtggtagcttttgagtcatatatcttgtagctctattattgggtccatgtacatttaggatggttatgccttctttattaattgaccacttttttattgcgatagcttcccctttatttctggaagtactccttgattctctgttgtttgtttgttttctggacaattgtctgttttttcatcgtctgctttctgcttttttttttttttgagaccgagccttgctctgttgcctaggctagagtgcagtggcgcaatcacagctcactgcagcctcaacttcccaggctcaagcagtccttccacctcagcctcccaagtagctgggactacagttgtgtgccaccatgcccagataatttttctgttttttttttttttaatttattttttttttttttaraaacagggttttgttgcctaggctggtctctatttcctgggctcaagcaatctgcctgcctcggcctcccaaagtgctgggattacagacctgtgctgctacatctagccttcctttaaggkgaaatctcccaacaaggaaagaaaaaaaccataaactgaggttgctaagaatgaatcttctattcttaaaatgggaaagaaaaagtcatgctagttttgctgttttgctagttttgctgaactgcaaaatttgggccacattgcatgataaatgtccagttaagatggaaaggcattaaatttgtgggtagaagacatgaacaaacgtgtgttccaattcatagtagttggatttggtactgtctgcagtttcaggcatccagtggagatcttggaaaatacaccttacagataagggggactgctctattttctttatttggcttgctttaggtttatattgcccttctttctctagtttcctaagattattgatttgagaactttcctctttcctaatgttgcattcaatactatacattttcctctaagcactgcttttcctgcaccccacacattttgataaattgtagttttacttttattagttaaaaatatttaaacatttatcttgatacttctctgatctattttttatttgaaagtatgctatttaatctccaagtattttctaaatttaattttgttgtgatctgggggcacagtttaatttctgttttttgaattttgttactgtgtgttttatggtcccatccatggtctatcttagtaaatgttttatgtgacagtgaagagaatgtgtactctgaagtaatcagtaaatatcaattaagtctttttagcagattgatggcgtttttcacttcagctatgtccttgctgattttctgccagttggatctgtgaattactgatagagggaggtgtatagtctccatctctaataatggctttatttccccttgcattattagtcatgtctgatgaattttgttgttcttttgtagggtgcttacttcttaaggattattatgttttcttggagaaatgacccctttatcattacataatgtcttccttattcctgataattttctttgttctctctgagattaatatacctattataactttcttttgattagtgttggcatgatatacacttatccatccctttacttttgatctacctgtgactttatacttaaaagtgagtttcttatagacaacatatagtcaggtcttattttttatccactgtgtcactctttgttttctaattagtatatttagactatttacattgcaaataattattgatatggtagaattaatatctgtgatatttgcatcagttttctattttttgcagttatattttattcttcatcttcctctctattcttgccttctctgattttcattaaacattttatattctattttttctcctgtcttaaccaaaaaacttattggaaaaaattttcagtggttgccctaaagtttgggatatacattagtagctaatttaaattcacttttaaataacggtatgctgcttaacagatagttcatgtactttataacagagtattttgaacatctcccttccacctcttataacattgctgtccttcttttcacttatccatatactataatcacccatatgttgtttcgtttctgttatcactttgaacagttatatattaaatcagttaagaataaaaacgatttcattttacccttgtttctttctttttttttatggttgttgtttttgtttcctgagtttttgacctatataattttccttctcgctgaagaatttctttcagcatttcttgccaggcaggtctcctggcaatacattccctcagttttatttgccttagaaagtttttatttttatttttttgggggggggggataattttgttgtatataaaattttagtttgttgggtgtttttcttttaatacttttaaatatttcatacagttgtcttttggcttgcttgttttttgacaagcttctttcaaaatactctctttctctttggttttttgcagttatgatatgcatatatatatatatatggtttttatcctctctsgtgttctctgagcttccttgacttttgatttgttatttgttgctagatttgggaaattctcagccattattactttaaatatttcttcctttctttgctctttttctggcattctcattacatgttggttacaccttttgtaatggtatcacagttcttggacattgtttcatttcttttattctcttttctctgcattgkagtttgcgatgcatctattgatatatcttcaagctcactgactttttctgtggtcatrccaggggaactcatttctgtcagtgttttcatttctatcattttcttttggttctttttcccacctcttttcttgcattacgcatatcttcttgtatgttgtctactttttccattaagtttcctaaaatattaatcataattattttaacttccctatctgataatttaaaaatctgttatatgtgaatctgtttctaatgctcactttgtttttttagatggtgctttttcttgtttttcttttgtcatgaccttgtcattttttttgttgaaagctggacttgacttgtcaagtaataggaactgagatagtaagcttttagtgtgaggttttatgttaatctgacaatgagctgggttttgtttagtatttgctatagctgtaagtgccacaggttttagttttccatagttgacttgtgatgttgtttcttcactctcttgtctaggataccttgagaactatttcctaaatagagtctgtggcttactgctctctcagttgtaatccactcttactatatggaagccctgttgatgaatgttggtaaggtcctatttttaaaatraggctgaatttctggcctgtgrccagaattgtttcttagcagttttttttctttctctttcaaaggagacaggacagatagatgcggccagagttgagtgtctgcttttcccctaggtcagagaagactttgtcgaagcattttccctgagaaggcaagtttttgttagggagaccagaacacccttggtgtatttcaaaactgttactgcaacaggagggggttttctctgatgttcaccgtaaagactgtcttggagctcttgaaggtaaaattcttaaaagtgtggggactcctctaagttggggctcctgggactttttttaactcccaagctagtgcatattcattctgcaggaattcactgaagttaccattttgattttcctggcggtttctccttcagataagccaatctcaaccgccattctctatattcacctgtctctccagaaaaaaaataaaaaagaataattttaatgtggttgtttgccctgtgacctaaattctcacatggacctaagaaaagtcatcggttttccatttcctcagcatttttcttgttgtgaggactagtggtaaacccaatttctttatattttgtagctgaaaccacccagctttcttttcattagtgtttgcatgataaaactgtccgtccttttaaccaatctgtcttcatacttatatttcacataaaaaacatattattgagtcttacaacaattttatctagtgtgaaaatctctattaattagaatattcagaccatttcacttaatgtaattattcatctaattagattacagtcttttaattttatttcatttgtatttctataaatttagggggtgtgagtgcggtttggatccgtggatatattgtgtggtggcgaaatctgggtttttagtgtaatcatcacccaaatagagtacattatacccaccaygtaatttctcatccctcacccccctcctgcccttccaagtctgtgatatcttttattccactctctatgtccatgtgtacacattatttaactcccatttataagtgaggatatacagtatttgactttctgtttctgagctatttcacttaagataatggcctcttgtttcatacacattgcyagaaaagacatgattttgttcttrttttattttactttttatttttgaagacagagtcttgctgtagacaagaatgcaatggcataatcatagctgattgcagcctcaagttctaggctcaggggttttcccatctcagcctcccacgtagccaggactataggtaatgcgcgaccacgcttagctaatttctaatttttaatttttttctagagactgagtgtcattatgttgcccaggatggtcacgaactccttgcctcaggcaaatccttccacctcagcctttcaaagtgttgggattacaggcatgagtcaccgtacccggccctgattttgttcttttttatgactgagtagtattccatggtatatatgccacatttttaatccagtcttccaatgatggacatgtatgttgtttccacatctttactattgtgaatagttcygtgataaacatataattggaggtatcttttttatrtaattgtttcttttcctctggatagataccaagtagtgggattgctagatcgaatgatagttctattttyagttctttgagaaatctctatactgtttttcatataagttgtattaatttacattcccaccaacagcgtatgtgtttccttctctttgcatcctcaccaacatcttctatttttagactttttagtaatagtcatttggactgttgtaagatgatacttcattgtggttttaatttgcatttccctgattagagatgttgtgatcattttttcttatgctttttggccatttgtatgtcttcttttgaaaaatatctgttcatgtcctttgctgagttaagcccttttaatgttttggtttttatttgtcacatttgttcttggatcctttcccccgtcttttcttgccttatttgggttgaatttggtatttttaaagcattcttttaartctttatcttatttgtttatacctgtttgattttttaaaaaataatttctctagattttgtaataagcacctgtatcttatctctctctatttgtagacagtattatatcacttcccatataatgtaagaggttgacaataatatacttccatttcctcatttggtctttgttctattgttttcatagattttatttccccatgtttttaaccctgcaatatatttttattattttgactttaaacaatttttaaaacaatttttaaatgaataaaaggcttatttacccacatctttatcacttctgatgttcttcatttctttacatagatggaagtttttatttggtatagtttttgtttagtctgatttacatttcatgtagtttctgtttgctctcagtgaattttttcagctcttgtttgtgtcagccaacatcttcattttaccttattgagtgttattttcatagatatagaatgctagtgacttttagcactttaaaactctttttagattagattctgtttaacattttgacaagtaatctcatcatccttgtgttcatttctctatgggtctttttcactctgtttgcaacatttttgctatatcactagcttagggtaatttgattttgatgtgctatgtgtttttttttttctttctttcttttttttttttttgagatggagtcttgctatgtcacccaggctggagtgcaatggcacgatctcggctccctgcaacctctgcctctcrggttcaagcgattctcttgcctcatcctcccgagtagctgggactacaggtgaccaccaccacacctggctaatttttgtatttttagtggagacggggtttcaccatgttggccaggctggccttgaactcctgatgttgtgatccacccacctcggcctcccaaagtgctgggattacaggtgtgagccaccgtgcccagcctgatgtgctgtgtgtttttcttgtgtttatcctgctcagggttcgttgggtttcttggatcagaaggattacagtctttatcaatttatgacagttttcagccattatatcttcaagtatttttcttgtatttcaatagcatgttagaccactttttccaactggtcattgaggctatgttcaaaataaatataagcaatctgttttggagagtacagtaacgtgttttttgatactttgtagaattctgctgatagagatgaagatcctatttgtcattgacattggcagcttttatcacattctgtaataataatcattttccctttccattttttagtatctttaccagttttcatctcctttgttcctgatgttttgggttcacattaaatctttgctgcttgatttattccttgcttagacttatctgtgctgctttaaacgaaccaaggattgaatggttttctgtgctcagatctaacatatttgtgaaagagaccctcctgccttttaaaaagcatatctttgtggcattgtgaaaagttcccagctgggaatcttggattctagtctgcttttgacagcaattacaggacctaagatctctgaggtgtagtttactaaaccaytggttcctgaatctggccatgtacctaaagataacgttctgaattcccattcctcaagtgtctgatatcatagatgtagtatgggatttgggaagctatctgtataaaaagtcacctaaatggagcctgtttcactgttgagagttggttggtcactacttcttcatggtttaaccaaatgtcaatcaggaaatacagaatgtagaggcatcaggatgtgtgaatgttcgtatcttgagtttagtttgggaacaaagagcctaaaatgtgttcccaaatgtgactggtcagtcaagaagtggcactaaatacaaacctagccacttttctcctttaaattagaataaaaatacctagctcattggattgttacaaagattaaatgaaatgctgaatataaaatactgacagtaataacagcacttaacatcttgcttcctgtttttatttttataaactcagttaccaatctagcaacttgcttttcatagagtaattggcaaagtaagtaagagagaaagctgaaacttaaacacaaaaccaaaaaatgaggtatgttacgtacctgctagggcatgtaacaaactaagatcagtgctgtggagcacatgtctacaccaccttgggagcaaaggaacttccagcaggactcayaggacaagtatgaagcactagttaatctctgagattcatttaagatataaaatatttttctaaatgagtcattttctacagtcttggcctattgatatggtttaggtacatgcaagctaagctccttaattgtctgttatctacaagaatgcttctctttttgcccagcaatatagagtatcagcatttctatcagtcatcaacaagcttgatagtgaactgtcagctgctcagctcaggggtagaagagctgagtagttatgaaagaggcagccaagggacacactgctgagtccatccactagatcagccagtcctgacatgtatgccataacagccataacatattaactccacagtcagtgaagaaaaacgcatcatatgtaagtgtgacaagtattggtttaaatatgtataaatcaaagccatatattttgtttttcatcaagaataaataraagaaacaatcctaacaagaaattttacatttaaaacgatgttaaaaatgctttcctactgaaatttagtgctaagaaaatgttgctgtcttgggaagaactaatatggatactcttaatcaaatgatgagaaagatatgatttttaacctacttatattttatttctaaagtattttgaatgtaaatagactataaattgcaattttagaagtattttggaaataaatggagtagaaaagataaattttaaaatgttctgaaattacacaaaatagtaacatgaggtcatagtatattttctttgtaatacatggtgataagcacttaagttttgatatttagtttacagttgaccctgaaaaaacttgtggaaccaaatactcaagaaaaaagaatataccctttagcactgctgactcaactgctgtgctgagaatccttctattatttgaacatttttcccctgaaatataccactttataatatcagccattcagttttgaagaactataagattgttttcaacagtgcaaaagcccttaagctttggaagccaggaaattaaaacatcaggctcttttatgagaaaaccaagtaaatttgagaacatagtgaggaaacagtgtcaagctatgtaatattcttgaatgtagaagaactggaaggttgcacatgtatcccctgaacgtaaaataaaagttggaaagaaataaaattaaataaactaaaaaaaaaagaaaaaagaaaaaactgaaagtaacaagagaaaactaattaaaggctaaatttcttacagaatttttcgttataaaagcctggacagataatgttctctggaagtgtagacgcttagaattgtgaaagagtggcatgttttaccagaagtgtacatgcttagaattgtgaaagagtggcatgttttaccggaagtgtacacgcttagaattgtgaaagaatggcatgttttaattaggggaatgcttatggtgtgctgtaatggtattacttgcattggtcctgttagttcattcagtaacacactttgtgttacacagatgcacacacacacacagctcctaaagttgtggtttcatgggataattgcatgcctgacagaatctgaggtacttttctgtattttatgccttgaagctacctaaggatgagatctttgtacaattattccacctcatcaaaatctgttcaaaactgtgttttctagagtaatttgttatcttctattgtgtttataagagtactgtatatgaaactttctttaatcttttgtcactttttctctattcctagggaaagttataagaaaagaaattatatgacagatgggcatttttcttctgcataagcatttactaagcgtattgctcaaaacacatctgcatttgagggcaaattatttgccgtgtgtcctgcaaataattctcccagttgctttgaacactgtgtttgcaaaacttcgtatattttgtattcatataaattaatttaaagrtcagaatgttgtgaagtaattttgtgtgattaatttatttaggggaaagctaaatgccttgctagctttttggttacagaatggaaaaggtggtagaaattattgagagggagacacaggaaaatgatgttgaaaagtgtgttttcagctaatatagaaacataaaacaatacacatagtatataaaatattaatttgtaggttttcctagaaattagtaaaaattgtattttgtggcagttgttaagaaatgcatagtaattatgagcagagatttagaacccagcgctttttycttcatgccagaaaccagtggatttgatgatgtctrtacttgtcttatctttctttttccttttctggagacaggatcttgctgtgtggttcaggcagaggtgcagtggcatgatcatagctcactgcaacgtcaatatcctaggctcaagcgatcttcccacctcagcctcctgagttgctgggactacagacatgggccactacwcttggctatttttttttttttaattgtttgcagagtcaaattctccctgtgtttcccaggccagtctcaaactcctggggtcaagtgatcctcccacctcggcctcctaaagtgctgtgattgcaggcgtgaaccaccgtgcctggccaatttttatgtttctgttggtgccactgagtgaatggaggtgagggcattcaggtggaggaagctggacatgcttgtctggaactcagaaggtgattgaattagaaatgaggatttggaggtcattagtgtataaaatggtaggtgactgtgaggaaatcagtctgacaaaatgagttctgtaggggamagagacagacattgggaacaccaagtgtcaagggtgtcgagtgaaaagagcctggttaggagtgattagaaaagtagcaggagaattaggaggtggtgatatataaagaccaagggaagggaacatatttcaagaagcatggcacagcctccttgagtcaaatgttgtcacctgtcccaggtggtctggagggtctagctgagtctggaagttggatatctgaggtgtgtgccagttggcagacctctgtggttttctctttgaggtcgaacacactgggtgtagaagtggagaagacaaatgggtaggttgtactggattaatggaagatcaagaaggtaagatattggtcctgatagagtgagtcgagtgacagactatggggtctagacttttttctgctgtaccaagatttctgatggaaaatgagccagcagaaacgaaaactgttaaagtagattttacatgtcaaaatgccagttgatttaggatgcaactccaggctctgtccattccaagacacataaatttgtctctgctttcccctgaaagagttgaaatcataaagcggcaattgtttcctgaggggtaaatggccattatgcactggcttcgactaggattttcttacctctagcttggaccatacagttgaattccctgaatcctagtgatacttaacatattgcacgaggccttgtattttgaggtaatttaaaacgttattaatccaggccccattgagtaaggacttgagctattccagacacaagccttattaaaactcacagtaacagtctctgaaaaaagttccactaagcaaactaatagtgcaaacaagattttagcaagaatgtttgaactacttacaacaggactttgtttataagcacccttaagtacttcttaagtacttgagaagctctgacttacctataaactgtctatatactcattgcaaatcacccttatctggttattaaatctgtggattgatactgtgtaagattttattagtttaattccagttgctgtattttatagatttcagccgctaatgtcaaacattcgctcaaataattttctaacgagcattattaaatccaaacatcagaaacccactgaaagctttcttaaaattagggtctgtctttgtactccttgctcctgtatcccacaatccttattttgatcacttctgctgtctcctcacacaattttgggaaatgtcattggatgaagtgttcaggatttctttcctgtktccagaagtctcaagttgtggtatcacccgctaagttcagtgatagttcagaaggcttctgtcagtaagaatattgagccaagcccaggggatgtgtctttgtatcaagctcccctgtgttaagcaactatgagctgtcagacttccctggtataatatctggtatcatctggaaggacttaagaggagaaatacctttaatgtttttaaaattagttaatatcatagtaaattactgagttgtaaaattcaaaaaatggctacattttactctcaaattttgagttgttttgaaatattaatagtaataggtagctatttcatggtgagggataataaatagcggcgtcttgatggcctccataggtcatgatctccacaaagcactatatccagaaaaagtcctttaaagactatgctgctttaaatctgtatcactccttttaggctgtaggcgttgtatgaccaataagtactttcaaattgtcagtctaatggaagggcttgccctagagccatttggcaatgaacatactctaaaagcttgaataaataattttaaatgtagagatatatgtccagatgacttatttcattgatctctgactattttgtatatttcaaagagaagaagagccttgtcacaagctgaatcatagccatggaagagtttaactctgtggcatatagttcaggatgctatgtgaacatgatatcaatcttaatttaatgtgtggtagatgtctaatgccagaatgtaattacctacattggatctttaccagaaatttagtgcaaaatagctgtcttgggcaaagacagcattggaaaagggacataataaacaggagtttggtgcagtagtaacttaatggccctgaccctagctcagggcagttgtttccttgacctttgaaaggtgtcagtttatttctgagacgattttatccttccttattgcacagcaagttgtttcaaaacacaagaatttgctactccaaatttaactgttttgtactccaatttaactgctttgagattgtaaggcaaatactttatgattaaggaaattggtaggtcctgtgcagctcttcagtcgtagcaagtcttactctaggtaatccctttggaatttgatgctggtgctgccacttggacatttctgctttaatttttgtcacagattcttttggggagtgggtgggatataaatgacaagtgcttgctaaawttatggtttaatgggcagattgtttacactagtcatttcgcttggcagtgctttgatttgttggaattttaagtaaattattttacttatggtttcctaatttgcaaaattgaaatacgtggtctctcyttacctcaaagagatacaaagaatattaataaggtaacattcccaacctcagtgggattctgatgccacataaatatatggtatcatcatcytcctgctcgttatcatccattagcaacattgtcgtcaaggttttctctgtatctagattaattatgactaaggagtaaattattccatatatggaatctgattttcactctgacactcttttacaagtatgttagcttaggtaacatatactttattatcaggtactctattatagaagatgatcttgtggtagccagtgttctatatgttcaaacagggattcttcatgttaaatgtatttttttttctgacttttggtagttggaaaaaaggtttataaaagctcaaattttcaaaataacctgtccacaagaacttttccacacccatgtaagagtggtagatatttctggcatgattttaaagtacatctaatttgtgaagataagaatactctattaagtatgggattttttacaggtgtaacactttgaaggtactagagatttaacagtagatgttgaatttatttctaggggtagtatttgtgatttctgttacagtgtctttaaaaagttgtctcatgcatggattttcagctcagaagtctatcatgcttatctctgatgtggtttgaaattattatgaaatggagctgtatggcctagaaccttcttcaatatttaagttcttgaaattagcacagggtaggatttcatagaagcatattttcagtttaaggaataaatagtgacattgaaagaactcctcaacttcagattaattccttttcattagattaatatttgacattagttcctaaaagatcctcaacagtaaaggtaagaaaggattatgaaaaacagaagttgacacattttttgacagtatgtttacatttataattcagtctctaactatatccctcattcatcctgccttatctctgtagtgtttgccaccacctgatacataacttttgttgattatttccttccaataggataaaggagccctgagggcagagacactgtctttcgccactaccgtctgacatgcggtaggcacgcaacaatgtttgttaaatgaataaatgaatgaataagttcttggtcttagaagatggtggaacaaaggaaatgtgattccagaactttatataaatccaattttcccttcaagaccattttaaaacaaacttttaaaaacgaatattaaacaattgtgattattcagcacctatgcacttctacttggaaaccatctgagagtataattcagccagcaaattgatgaagcaaaataaaattggaatagtaaagccacagtaamaggaattggtggcaaatagtgaatgtatttaaatataaaactgagactgctacatttaggtcttagatccatttgagttaagttttatatatgctatgaagtaaggrcaaacttcattcttttacatgtagctctccagttgtcygtgcaccatttgttgaaaagactactctttcccactgaatggtcmtagcaactcttgtcgaaatcagtcgatcctagacacatgggtttttttctggactcatgtttctagtccattgatttgtgcatctattcttatgccagyacagcactttctttattactgttgcttgtattataagtttggaatttagraagtgtgagtcctccaactttgttctttttctggttattctggatcctttgctatttcatatggtttttaaaatcagtgcatcagtttcaaaaacctaatgtaagagctaaaagcataaaactcttaaaagaaaaaaattagaaacctttgtgtttcaaaagataccatgaagaaagagaatggcaacccacagaatgagagaaactatttgcaaatcatgtatctgataagggatagagatttagaatatctaaaaactcttacaactcagtaataaaaagacaacccaattaaaaagtgggcaaaggaactgagtaaacatttctccaaaaaagatttacaaatgaccaataagcatgtgaaaagatgcttgacatcattagtcattagggaaatgcaaatcaaaaccataatgaaataccagtccatatctattatgatgagtggaatcaaaagtcagatcataacaggtgttggtgaagaaattagagaattggaaayctcgtacactactgatgaaaatgtaaattagtgtagccacttctgcaaacagtctgtagttcttcacattgttaaccgtagaactaccacttgatgatctagcaattctactctacccaagagaaatgaaagcataggtccacacaaaaacttaaacaagaatgtttatagcagtgctactcatagcagctaaaatatagaaacaatccgaatgtccatcggctggttaatggataaacaaatgtattatacattgggtatacaaaggaatagtatttcttagaaaggaatgaaggctgggcatggtggtgtatgcctatagttccagttacttgggaggctaaggtgggagaaccacttgagcccatgagttccaggctgcagtaagctatgattgtgccactgcacttcaacctgagcaaaagagcgagaccctgtctctcaaagaaccactaaaacaaaaaaagagacttcatacacaagtgagattgacagtttctttttaaggtaataaagtagtgatacatgctccaatatagatgaaccttaaaaatattatgctaatcgaaagaggtagcttacaaaagaccacatttacatgaaatgtccaaaataggtaatagagacataaaatagttgagtgggttttagggattggggagggttgaagggacaggggttggggaggtgactgctaatgaatacatagtttcttttggaatgattaaaatgctctgaaatggactatggtgatagttgtagaaaccagttaatatagtaaatactgtccgggagtggtggctcacgcctgtaatcccagcattttgggaggccaaggcgggtggatcacaaggtcaggagatggagaccatcctggctaacacggtgaaaccccatctctaccaaaaatacaaaaaattagccgggcatggtggcgggcgcctgtagtcccagctacttggggaggctgaggcaggagaatggcgtgaacctgggaagtggagcttgcagtgagctgagatcatgccactgcactccagcctgggcgacagaatgagactccatctcaaaaaaaaaaaaaaaaagatatagatatatatatatataaaaaatatatatatataatatatatatataaaatatatatataatatatatataatatacatattatatattatatataataatatataatatgtatataatatatatattatatatatcgttatgtctcaataaaactggtatttttgaaaagtaagaccaaacagctgtgtgaactatggcaacagataagaatgtcagtgttaactatgtttttaagaaaggggagtaatatcatctagcaaaattgggagaggagatttccttatctttcacagcatattacccttgtcctaattcctgtcattcatttttgtttgtttttaaaatttatgttctcattttatttttttttatgtttctgatgtctctaatggatctaatttttttaaaactatattctacctccagttgagtccaactatattttgttggttgttcctcattagaatatttgaacttgtaaattccaagactgtagcaaaatcttcatgccactgtatccttgccaaggatcaaaggaaatcttgtgcaaacttttaagctagtctgccatcttctacctgaaattctaggttttgtagaaataacttatattttaaatactagatcagcttgtttttacatcttttaatatctttctgaacaattgcagttaattcattatctgcagttttttttttttttttttttgagacagagtctcgctctgtcaccaggctgtagtacagtggtgcagtctcggctcactgcagcctccaactccctggttcaagcgattctcctgcctcagcctcccaagtagctggaattacaggcatgcaccaccacgccctgctaatttttgtatttttagtagagacggggtttcaccatgttggccaggctggtctcgatytcctgacctcatgatatggccgccttggcctcccaaagtgctgggattacaggcrtgagccaccgcacctggcctattatctgcattatttaaaatggtttgggataattagaattattatctttattacttattgcttgttgcatgtcttatctatttgtacttttttggctgaagtatttcccaagtaatatcttgcattggttgtataatttctgagtctttttgttttaaaaaaaaaamagttttcctttatttttatgcttaatacagctgtcccttggcatccatgggggattgcttccaggagccttcttggataccaaaatccatggatgcccaagttgcttatgtaaaatgatgtgatatttgcaaacagcatatatacatcctgctgtatttttcaaatcgtcttagataacttataatacctaatacattataaatgctatgtaaataattggtacactgtagttttaaaaagtaatactttttattcttgtatgttattaaaatttttttctgaatattttgaattgtggttgattgaatctgcagctgctgaacctatggatacgaagggctgactgttaatattttgtttccattctggggttataatccttttcctcagatttgtgtaattattgctctatactttttagcatttagaattgccttccctgtccctttcttcctcttcttttcttccctccttttccttcctttccttatttcttactagggagctcatagtgactttctttttattattttatttagaaactctaccaggagtttgtgcgtagatgatctgtcaatattcttatctggtatttcatgggctgtttatcctcttggaagtttttcgttaggttgatgattctttctctttcattcaattgttttcacagctatgataactcctggatatgacatttatgtttctcatttgttctttcattatttttcctttacattctggaaggtcactttcagatcattttctaaatcaagatttgatcttccccgatgtttatttgtttgcctaaggtctccagtgagtagcttccctaagtaactggtttttcatttcctggagctctttcttggtactcatttgctcttccttcttcataggcttcttgtactgcctctgagaggcagtatctttgcatttcccagaagatacagaggaaaggccgtttcccctgcctactcagcttggctcctatcccatttttggtcttcttccagtgttcattgacccttcatagcctgcttgtttttatagagaggtataaactgatcaatgtgggtagttggcaggtgcccctcgatgcacttgtggaagtctctgtttgctgtctcccaggggtctctgctcaccaaattggccagtggagatgaacctcactagggtccacaggccaaaagttggccttcccttccaggtgtatttcctgggaacagacaagaatcatgatccctttaggaagccaccacaggggttgaggaggagttttctgcacactgatgatttctgtccaaagcagaggtcttagagatgtgatgtgaagtcctcacatcttttttttttttttttttttgagacagagtctcactctgtctcccaggctggagtgcagtggcgcgatctcagctcactacagcctccgcctcccaggttcaaacaaatctcctgcctcagcctcctgagtagctgggactacaggcgtgtgccaccacgcctggctaatttttgtatttttagtagagatggtgtttcaccatgttggccaggatggtttccgtctcctgacctcgtgatttgcccaccttggcctmccaaagtgctgtgattacaggcatgagccaccgtgcccagccagtcttcactttctcaagaaaaccatcaataactgagacctattccttcctcaggtcttaagaagcagttatcagaaccaactttgctatctgccagcaccttccctctttaccccatcccttcctctgcctggctgtcagagcacattgagtagaaggagggggctgagaatcatcagcccactaggaaataccatggccgttccctcctctcaccaagctaagtgaggtgggcatcagaagacttacttggaaaattcgatggtgctttaaaaacaaaaaaaaagactagggtcttactccttagttggaaatctgtttaggtagtatggaaaacactgttggttgtctgtcaatttctgtttttctcttctgagtagtggaattctcaatttttgtctgagtacatgtcctcagacatgaagaactacattttttagctccccttatacctaggtgtggtcatgtgacccccttctaagaaatcacttttaggtagaaatgatgtgtgcagcttcctagaagaatccataaagtagaagggaaataatcctcttgatgggaaggtgcatgtgatggcaggaattctgccaaccattttgtaccaagagttggaagccatatgatgcagagagtggagaaatatatagaaaaaaataacgtccctagtaattgttaggatactacgctagcccttcctgtctaccagcagacttatgtaagtgaaagagaaataaaccttcatcttatttaaacttctctagcttttctatcactgttacatgagcttagttctaatagaggtagtctactaaagcagggaagaagagaatgggaagagaaatggcagggcagagagaaaggacagcagtggaatagccaccccctgtctcttaaaaaggtacactacccagaagatgcactcccagtgaggaaaccccagcagctggacactgtaagctgtggtgttgttggctgtgcttgaagcagttgttgggggcagggagtgtgtgagaagaggctgtcccttggtaccatagttatagaagaatgagaaagaggaaggaggaaggaagaggaaggaggaagaagaggaaggaggaaggaggaggaaggagaaggagaaggaagaaggagaagaagaaaagaaggaaagaaagaaaagaaaagaagaggctatcccaaagccatgtttctccctccctcagggaactgtgcagtggtatagccttcccctccacccccaggcttttgcagatccaacttcagcaaagcatgcttgagttagcatgtgtctatttgccacctagcgacccagctggrcattgttaaacaaagaagtagagatcaccaaaaagaaggaaatgtaacctcaggcagttaagcaggaccagaaagagggaggtgttcccagaaccaggttcagcttctcttcccagtcagtggagagcctggcccttcccaagccacgtgccctgagccataggactggcttgcattagagtggtgatgtcagaaagtaaccaggaatgtcttggatctgcctgcatgtggttgaaggttcttcttaggagaaagagtatttgacagtgcagctgggggcagtggtggaagattaaatgcttcatgtgtttatctccctaagtgcaggatctctagtaaacctaacgcaggtacccatggaaatgttagtgcggatggagttgattttgttgttgttgatgttctctctgagacaacacagggatggaatactgtggacagccactctctattggagtttttgatagaatccctaagtgtgttggtttgcttcccatcttctccttcttccttactctttttggtagagcccgtgcactggttagggctggggtcacaggcagcctgtgtccagtcagagctgtagctagcagaggagtagacctggaggtgtggtgcaagactggtcttyccattccctctctgtcactgtggtcctcccttgtaccccactgtaaacgatctgtggcacaacacctaccctcccaattacatggtgagccgtgttctccaggcattgccatggtggcccctcagtttctgctgccccatttctccctggctgtggtgtacagccaggttgctgcttacggcttgcaggtttttaggggtttgtaaggtgccttcgtataaggttactgcctctgtgttgtgttgatgctaactaagcatggattatttttgtgtgatccaatcatacatgctttatagtgttcaaaaaagttctttagtttttcctttgttgggtgttcccttttctgtttcctagagctgctattgatatttttcttaattttatattgctttagtgatttccatatgacttttttaagtaggagaaataaatgtgagttatcagtttttcttcttaaaagtgggactatgttgtgtctttgcaggccatgtatcccctgtgtgcccttcctcccaacctatccagtgaaactcagcttaatgccacctccttctggaggccccaggctcccagagcatatatacacatacttgctaaagtcctttttctstgcgtaccatatgcccatacttctgattgtgcagtaaacagattttaatgttattattgctttgcatctatgagacccagatatatcatgggttcctcaatgacaaagtttgcgcctcatttatctttstgttcccaaactcagcacagtgcctggcctgagtaaatggttcataaatgtttgctgaagggttatttatggcctgccttcttgatgctttgtgaaaattaaaagcttgcaaattatggaatatagcatatcatttccctcatgggaaaactgaaatactaagaattagtttcaggagtgatgttaatatcacctaagagtgtagccttctactttcacatactaactttctatcatgattgtatatttgttttggttgagagaattggaaaggggtttgtgtctgtgtgttttgttgataaaatattctaaatgttttttagcataaaaagaacaagaaaataaaggagacaatgtgactttatcttgggagccacatctaagtacaaatacaaggaataagaaaattattcagattcttaactattctatgaacttataaaaccagttcttaaatgcctcctttgcaggcttccttgtaagtcactacaccaaagcagttgctgtaatggaacatgttaaaggctactgtcttcacttccttcaagcactagaaaagtgtggtgggaggtgtggagtgggtgagcagaggtgggcagagccccatggagtgggagacctctcatcaccgtcccgtggcactgggagaatataggaaatttgcagctagagctagctttttaggcaagaatccactcacattccatacgtggctgatgataagtctttgtctggatttttaagtttcttttgaacttatataaatctttactttttctgccttttttttttttagagaaggagtcattaaagattgagggctggagagtaaatgttaggattaacttaaagctctgcaaacatttataaaatagagctttgtgaggaattggagaatgaggaaataataatgaagcacggccctgaagagatagaaacagagcttccgtcgcacttttttgtttcttgcctgaggatcatcttttactttccgtagtaagattttcttttttcttttagcagctgccttcggcagaggtttattgagcatctagcagctgccaggccctctgcagaggtgttgtccatacacatgtggaataatcacagaccttgctctcaggagtccacaagtcagaagtgtagggtcttctattgcagctgataatgtaatgttgaaagtgatagaggaaaagttacctaattcaggattgagggattaaaaagaaggatgaattggtcaggaattcccccacatgactaaggcagcaatgaaactaacaaaaccacgagccagcatagaagcgagaatacccataccctccgagaaggaagagaagtttggtggactggatatacagtgcagtgtgggctgggcaaggctggggcaagggagaggagatgggactgcatccaggtgacagagcactgtgagcgttcccgagagaatctagtatttattctgtaggaaaagcagctggacgatctactcacatctgtggtgctgcatcattttccctttaatagttctttcttttcattcataaactatttcaaatatagtcctattgaaatgtcactgtgctttttgtgggaagtgcaggggatgtgttggttgggacagagctggtcattggaataccagaggaagcctgttcatctcctgtagatcaacacactcagcaggaaagtaaagagcagcttctctttgccaggcactggccctcagtgtttgggacctgttggggaacaaggtaagccctggtggggagtacattcatgactgaagacagtaatactgagtaaataagccaacaggccagcaagttatatattcttttagaagatgatgaatcctgtaggccaaggattgggagtgctagggcggaggcagtgtgggcatgggtcacagagacctcatgtggaaggcaacatttgagtgaaaagctgagtaaagttgggggtggtagccatgcagatttctaggggaaacattttaggcagtaggaacaggtgctgcaaagcccctaggtcgggaacatgcctggtgtgttgaggaacagcctggacgctgatgtgggtgaataggcaagaggattggcctgggaaaatggcagtggagcagagaagacctgaggttagcctgaagaaggggagggaggagtggatgatcaccagccttgcttcaggtgaggtggtggccatgaacagcgaaggccagagagatcaccaggttagtgaggagattttagacagggtgagatggagaggctcgcagagtgcccagttaagggccaattcgttgtgtagtgtgagtctggagctcagcgggggtactgggctagaaataccccttggggaatactcagaaactcagaatatatgctcaggtacagctgccctaacaaaggcccacacactgtgtggcttaaacaaaaggcatttattgtctcaccattctggaggctaatgtccaaaactaaggtgtcagcagggctgtgctccctttgaagcaggtgggggactccttccatgcctcttcctcgcatctagggatttgcagcgatttggccttccttgccgtggagctgcgtaactccgatctgtcctcatcatcacacgacatctccctgtgtctttgtgtctgtgtcttctctcctcacaaggacaccagtcacggtggactgtgtgccaaccctacccctgtatgacttcatcttatcaaattacatcggcaggtactctaattacaaatgagatcacattctgagttgccagggattaggacttacacatgtcttttctggggggacactgttcaatcccacactaggcaacatgaacgaagccctggatccagaaaagccagtaaagaaaacagagaaagaacaaccatagggatcagaggagaatttgggcaaaatgaagtgatcaaagtcctggggagagagagaagtcaacactcaggaaagtcaggagcacatagtcctagaaagggtattggacttggcagtcaagcctatcattggccaccctcctaagagcctggtcacaggagaccagcggttactggtggtaaagaagggaagcagccaagcaggctgttctttctaaggtgtttgacaatgaagtgaagtggggtgggtgacgatgtggggagtaggccaggtgcgggaaaggagatggagctttttaggggggcccttgagcacttatatgagaccagaagaagaagttgaaaatgccggagctgtggaagagcctgggagtcggggcctgggagaagattggtcctggaaaggaatagggacatctctcccactaagaggcagaaagaagggaagactggtggagttatccaagtacagcatttgagaaaacttacactccagtgacttgtctgttttctgggtgaggtaaggggatagtctgctggagaataagaggaataggaaggggtaggaacattgagaggaggggtagagaacccaaaagggagctaattaaaaatatgtgacatgactgaacactatactgactaatattacaacatccttactaatattaacatccacaagttgataatgcccacttaacacccattttttggcagccagagagttagagtagaaggaaaaacaaacagttggccgggcacggaggcttatgcctgtaatctcagcactttgggaggccaagatggaaggatcacttgaacccaggagttcgagaccaacttgggcagcaacatggtgaaaccctgcctctacccccccmaaaaaaaaaaaattagctgggtgtgctgatctgcgcctgtagtcccagctactctggaggctaaggtgggaggattgctttagcctgggaggcggagattagaatgagccgaggttgtgtcactgcactggagcctaggtgacaagagaccctgtctcaacaaaaaaagaataaaacagaaacaattgataaggggttgacatttgtcagggggtatgttccactatgtattagtaagaatacaggttaattgactgatcaacagagaaccagccagattactgaaagaaagtggagacaacatctgagcagaaggtgaagtcaatggagaatttcctttacaccagaatgtggctttaagaggtcacagtggaaggccaaagggacagggacttgttaggatgggatggtggtggtggtggcgctggctaacatttctttctttctttctttttcttttgagacagtctcgctctgtctcccaggctggagtgcagtggtgccatctcggctcactgcaaactccgcctcccgggttcaagcgattctcctgcctcagtctcctgggtagctgggactacaggcacgtgccaccatgcctggctaattttttatatttttagtagagacggggtttcactgtattagccaagatggtctcgatctcctgacctcatgatccacccgccttggcctcccaaagtgctgggattacaggcgtgagccattgcgcccagcctatggctaacatttcttaagcacctacgtggaaaatcttcacagttgccttgtagggtgaataatatttgtatccatcttctacatatgaagaaaccaaagtactaaaaggttcagtaccatgtccaaaattgcactcctgctaaaaagtagagctgggcctggccccaagggcgtatcttcagcccctcacattggatgtgctccagaccagggaaggcagggccaggctggacaggggtcacagagagcagctagccaggagtgtgattgtgaatctccagatgagggtcaggccgaggggtagcatcagagaggagtgtttggaagggagtgtaccagtcttggtttgttgtggcaggggaccctaggaggagttagtcatctagtgcccacagtgttctaggtactcagagcttttktgcgtttcaaagattaaacaaagtcttttggatttytcctyacaaatctgcagagtgaattttctgcctcttgaatttaaatgtgaagtgtcacgctgggtgaaaatatgaacatgtgaacacaaagcctttcttagcctttcttctttggggatctcagggttaccctctcccctcagagcaaactctttatctctctctcttttttccctgaccttgaccacataccagcctagctgttctgatgtaggaatttgcacatgtaaccttctcttccattaacagcctttttaccaactctctgcttctcttcctcacaccaagagtatgcccatttcttagctctcggattctaaagtacttagccctatctacttcttttcttggccttaaatgtcttggaaagtattgcattaaccaccagattgtaacttgtaggactttcctaaattcccatacccccatgaccttccactatgccagttctgtcatgtggaataaacttgtgtcaacgttctccgttcccattgtcaggatcattactgtaagaaaaaatgagcatgggctcatgccccctgcagctctgagtccttgctgactcttggaagtcctctgtaatccaagagggccagcctttctgctcttactgctcactgctcccggcataactcttgacaagtgcagcttgcccagatcaacctggggttttcttaagctttttttttttggttctcacctgtgtttttttccaaaccatttatctatatcctattcatctctcaaagctagctaacaaacattcaaaatatttcaaaatccacttctcattttaaaatattgatttattttcttttgttattttttaaaaacactgtttttaaatattgtttttaaacattgacaatacttaagcctatcaggccctgattgcctgtttctacagttcaaaataattctttcttgttaaatacacaggacatggcattattacagatggcatgcatgttccaaaattcacatggagggttattctaccgggaagaacgtgcagttggggtgagctggatagggagcccaaattggagcacactctggagcaccctgggtttggagcccccctcgcccccaccgccaagaaggagctctttcatcccaaagggaggagatgagggtgggattgggctggagaaggggtacagttgcagggaggatatattatcacattcttttttttttttaacttgtatatttatttagcttcagcctgaatcacgtaggcttatatgaagttaagccactatttactatattgtatctaagagaaaatatactctgaattatgaaaaaccatcatgaaaatatactcttagaggcaacctgattctaaatcacaaccaccttgtttttagaaaaagtgaagcatcatcttggtgttaaattgcacagaaaattaggctaccaattctgtatctagcttgtagttaaagaaaatagtatatgttatagaaaatagtaaagaatgcatatgggggctgtgcatatgcatgtatgtgtatgtgttgttggtggtttggttgttttccttatgttattattttttccttggtgttaatcccagttctgttgcttactaactgtgaccataagcaagctccttaattgctctgagctttagttttttttcgagaggtaaaataaatataatagtagtccctgactcacagacttgtcataatacttaaatggcagagtgcatgtaaagcacttggcctagtgcctggcacatggcaaatttcaaacttaaattactatgaagtagactacaactgcttcttcagtgcctactacatttccatttttatgtttcattcttttgcttagaaaagctttaccatatttaaaagtacaacccaacgtcctctccctttccwgcttttttcccccatagttcttatcactattgaacttactatatatttcacctctttatattgtcagttttcttctcctctcactagaatgtaagctctaaaaggcagggatttttgcttgttcccttcacgattgtgtcctggtgcctagaacagttccagggccttaggtgttgcgctataaatatttgttgaatgaacaaaaatacgactgtcaagtgatagttttgcaaatactcaatgtgtcttaagcaaaaactgaaaagagtaaaatgagagaaaattccataccaattgagagacacagcaattttcagtagattttaaacttcgagtgtgttttaaatgtatgtatataaatagaaaggaagaaaaaaaaagttgaaaaaaggttttaaaaattcctttcccacatttagactcagtcttttttcccttgacacaaataaggaaaatatgaatgggctatctttttacatcttcatactaatgttctctggtggtttctcaagtcccttttctgcccctaacttctgtgtagtagggaagcttctagcacagctggctctggcttgtgtaagcaaactcacagagcactaccatgtcactcatcacagagggtacaacgttgcctcaaacaacaaaacctcttctggctcaactactggtttattgtgcttttgcagtgtgaaataaagagaatagtgtttacaatatctcctttgaaaaaatgttgtctcttgcttcttagcttatttaccatccttcttacctcccttccctacccagcccccttactctcattctgtgtagcttaaagctaaaaaaattttgaataatgggctggagattatcctggaagagaaattgctcttaccaaatatccctgacagctccccagaccattaaattaatagcaatgagtggagagataagcaaaactaatggcatgcttwaagctttgtgacagaggtttggagtcatcatgattctcagggtctcctgagatcactcctacagccctcctttcattttcatactgtagtgtttgattatgtaaagtctrccttcacagagaagtctgaagattagctattaatacagctttgtgataatgtagcaccacattcttagaaacttaagacaactttcttaggtatttaattcttaatatattttctgccctctttaaggtagtgaaagactaggtttcatagggaattcacagatgcaagttctgggtctttgttgatggtaagtttagaagccttatcagttttttccctgccrttgtaccacgtatcagcctccagcattgagggaagcacactgttttcgtattatacttgtccagacggcactggtacttccctggatagttaacctggaaagaagcaagagtaatttgaggtagggaaagcaggtaacatctcacctgactttagaaaactcccctgggaagctccttttctcatttgtttttaagaacacgtttacagattacctgtgattcaagaccttgtcttattaaaataaatcttcaaggaaagcaatgttattttgagtaaaagaaatgttgaaacttaaaattatggtccctcactagttttctaggtcatccatttttcaaagggtcataaatatgccagtgtaccaagctaaggtttgtgcatcttgaagctgtggaaaaataaagtggttcttgtattatggaaatgaaccatttcccaaataccactagtgccaggggcaaattctgacttgcccattttcctctaagctagattttaagaccagtaaacttctgccacctttcagttcttgaagatctcggttttagtagcccgcctcttccttgtgtggtcaccaatcacccttctcttgctccctcttttcactgaactgggatgttttctgcctgtgtgtcttcttgtggtgtctgttcttgctatgagttttctaggtgtattttccaaaggcttgcacctttctatatttttagttttgttgtttgaatgttttatttccagaattttgattccttttcaaatctgttgtttcattttagcctgcttataaaaatgctttcttgtttttagctgattttttttcttggtttaagatatatttaaaagtcattgttaaagagagatgtttcaaagtcattttcagaatgctatcttattttcatgttctctgtagtaaatgttctcttcagttacattaaatagttcttattggttctttcttgacattaatgttctttttaaaaaaaaatcggtttgcaagcctgtattgaataggacccctacccctcttgtattcttatcccgtatggttaatggttgtgtggctgccaccattcagcctctaggatgctctggtccagaactagttctatattggtggcatagagcttcatccagctctgatattggaaatctaacagctctgttcagtggaaaagccagcaggcatctggagcagacccttgtgtaaagctttgtctgttgccatgtgcctctttttttagacacttaactttatgttaaataaaaaagaaacaacttctttgatctttttttcatgggctggaaaattctgcctctgcattggattttaagcaacaagcctgactgaattccctcttcactaggtgcttttagctgttaccctgttactcatgggggctgaaatcccacctttgccttgaactcccaacagacttgcagcttcagccttactttctgctttgtttttcagtagctttgtgttgttttgggccattcctacccagtcatgcctttttaattttctaatttaaaatttcatcattgctgtacagagagtggcagcagtgggaattgtggcctactggaattatttaagctaagctgttgaacttcacccgaaagctctgggagccattatactttagaagggtgtgacctgagtaggttttacaatttagaaagataattttggtagcatggaggatggattgtagaaatgccagatagagaccaggaaacctgtttgaagaattttgcctataggccaatgagtcatgagagatccaaggtgttaagggggtagatttataaaggacattagggtcactaggagcagctgtagtgtactggcctggatattcagtgatgcccagatgtcttgttttcaccctcagggccagccctgtttcttaattatacctctcattagattactcactggctatttctcttgtttttggaggcgggggcggggatttctaacttttattttaagttcagaggtacatgtgcaggatgtgcaggtttgttacatatgtaaacatatgccatggtggttgtctgcagagatcatctcatcatctaggtattaagcccagaattcattagctattcttcccgatgctctccctcctctcattctccaccctctgacaggccccagtgtgtgttagtccctgcagtgtgtccatatgttctcatcattcacctcccacttataagtgagaacacacagtatttggttttctgttctgttctgttagtttgctgaagataatggcttccagctccatccatgtcccacaaaggacattatctcattccttttcatggctgcatagtatcccatggtgtatatgtaccacattttttaattcagtctatcattgatgggcatttaggttgattccatgcctttactaatatgaatagtgctgcactgaacatacgsatgcwtgtatcttcataatagaatgatttatattcttttgaatgtatacccagtaatgggattgctggataaaatggtatttctgcctctgggtctttgaggaattaccacactgtcttccacaatggttgaactaatttacactccaaccaacagtgtaaaaccatttctttttctccacaaccttgccagcatctgttgttttttgacattttaaatagccttttggactggcatgagatggtatctcattgtggttttgatttgcatttttctaatgatcagtgatgttgagcttttttttcaaatgcttgttggccacatgtgtgtcttctttagagaaatgtctgttcatgttctttgcccactttttaatggtttatttttttcttgtagatttaagttcctaatggatgatggatgttagacctttgtcagatggatagattggaaaawtttttttccattctgtaggttgtctgtttactctgttgatcgtttcttttgctgtacagaagctcttctgtttaattagatacaatttctcaacttttgcttttgttgcaattgcttttggtgccttggtcatgaaatctttacctgtgcctatgtcctgaatggtattgcctagattttcttctagggattttttagttttgggttttacatttaagtctttagtccgtgttgagttgatgtttgtatatggtgtraggaaggaatccagtttcagttttctgcatayggctagcaagttctctcatcaccatttattaactaaggaatcctttccccattgcttgtttttgtcaggtttgtcaaagatcagttggttgtgggtgtgcggtctcatttttgggttctctattctgtttcattggtctatgtgtctgttcttataccagtaccrtgctgttttgattactgtagccttgtagtgtagtttgaattcaggtagcatgatgcctccagttttgttctttttgcttaacattgtcttggctgtttggaatctttttttggttccatatgaattttaaagtagtctttttctaattccattaagaatgtcaatggtagtttaatgggaatagcattgaatatataaattgctttgggcaatgtggccattttcatgatattgattcttcctatccatgagcatttgatgtttttccatttgtttttgtcatctctgatttctttgagcagtggtttgtagttctccttgaaggggtcctttacttcccttgttagctgtattcctgggtattttattctttttgtggcaattgtgaatgggagttcattcatgattttgctctcagcctgcgtgtggttggtgtacaggaatgctagtagtttttgcacagtgatcctgagacttggccaaagttgcttatcarcttcagaagtttttgggctgagacaatggggttttctagatacaggatcatgtcatctgcaaacaaagatagtttgatttcatctcttcctgtttgaataccttatatttctttcccttgcctgattgtcctggccagaacttccaatatatgttgaataggagtggtgagagagggcatccttgtcttgtgctggttttcaaggggaatgcttccagcttttgctcattcagtatgataatggctgtgagtttatcatattcactgcaacctctgcctcccagattcaagtgattctcctgcctcagcctaccaagtagctaggattacagacacctaccaccacgcctggctaatttttgtatttttagtagagatggggtttcaccatgycagccaggctggtcttgggactcctgacctcaggtgatccaccygcctcagcctcccaaagtgcctggattacaggtgtgagccaccgcacctggccaaagtattttctgttaatacctagtttactgagagtttttacatgaggggatgttgaattttatggaaggccttttctcatctattgagataatcatgtgttttgtgtctttagttctgtttatgtgatgaatcacatttattgatttgtgtatgttaaaccaaccttgcatcctgggcatgaagccaacttgattgtagtggataaactttctgatgtgctgccagattcggtttgccagtatttggttgaggatttttgcactgatgttcatcaaggatattggcctgaagtttttcttttttttgttgtacctctgctaggttttggtgtcagcatgatgctggtttcatagaatgagttaggaaggagtccctcatcctcaattttttggaatagtttcagtaaaaatggtaccagctcctctttgtacctctggtagaattcaactgtgaatctatctggtcctgggctttctttggtttgacctcctcaatttcagactcattattggtctattcagggattcagttgcttcctggttcagtcttgggagagtgtatgtgtccaggaatttatccatttcttgtagattttctagtttatgtgcttataggtgtttgtagtattctttgatggttgcttgtatttctgtgggaacagtggtgatatcccccttatcatttctgattgtgtttatttgaatcttctctcttttcttcttgattagtctagctagcagtctattttattaatttttttccaaaaaccagcctgaattttttttttttgcaggttttttcatgtctctgtcttctttagttcagctctgatcttggttatttcttgtcttctgctagctttggggtttgtttgctcttggttctctagttctattaattctgatgttaggttgttaatttgagatctttctagctttttgatgtgggcatttagtgctatgaatttttcttttaacacagctttagccgtgtcccagagattgtggtatgttgtctctttgttctgattagtttcaaagaacttcttgatttctgtcttcatttcattatttatccaagagtcattaaggagcaggtgttcaatttccatgtattaatagttgtgtagttttgagtgagtttattagtcttgagttctaatttgattgggctgtagtctgagaaactgttatgatttcagttcttttacatttcctgaggagtgtttttcctctgattatgtgattaattttagagtaagtctcacgtggctatgagaagaatgtttctgggtggacagttctgtaaatatctatcagatcctcktgatccagagctgagttcaggtccaaaatatcttggttaattttctgttttgatgatctgtctaatattatcagtggagtgttaaagtctcccactattattgttgggagtctaagtctttttttgaaggtctctaagaacttgctttatgaacttggcrgtgcttttttattgagtgtttgtatatgtaagacagttagctcttcttgttgaattgagccctttaccattatgtatgcccttctttgtcttttttttttttaatctttgttggtttaaagtctgttttgtcagaaactaggattgcaacccctgcttttttctgttttccatttgcttggtaacttttctttcatttctttattttgagcctatgtgtgtccttgcatgtgagatgagtctcttgaacacagcataccaatgggtcttgtttttttatccagcttgccattctgtgtcttttaattggagcatttagcccatttacatttaaggttagtattgttatgtgtggattaaatcctgtcatgatactagctggttattgtgcagacttgtttatgtggttacttcatagtgtcactggtctgtgtacttcagtatgtctttgtagtgactggtaacaggttttccttttcatatttagtgcttccttcaggagctcttgcaagacaggtctggtggtgaccaattttctcagcatttgtttgtctgaaaaggatcttaaatctccttcacttatgaagcttagtttggacagatatgaaattctagataggaaattcttttctttaagaatgttgaatattggccaccaatctcttccagctggtagggtttccactgagaggtctgctgttagtctgacgygcttccctttgtaggtgatctggcctttctctctggctgccctcaacattttttcttttatttcgaccttggagaatctgatgattatgtgtcttggggatcatcttcttatgaagtatttcacagggattctctgcatttcctgaatttgaatgttggcctatcttgctaggctgaggaagttctcctagatgataacctgaagtatattttccaacttggttccattctccccatattgttcaagtatcccagtcagttgtagattcattctctttacataatcccatatttctcagaggttttgtttatttcttttcattcttttttctctattcttttttgcctgtcttatttcagaaagacagtcttcaagctctaagattcttttctccacttggtctattctgctgttaatatttgtgattgcattgtaaagttcttgtagcatgttttttagcttagctctatcaggttggttctgttcctctagactggctattttggctgtcagctcccatatgtattgttttagcktcttcgctttgggttacaacatgctcccttagctcagcaaagttcattattacccacattctgaagtctccttctgttatttcagccatctcatcctcaacccagttctgagcccttgctggagttactgcagtcatttggaggaaaaggggcactccagattattgagttttcagagtttttgtgttgattttttttctcatctttgtgggcttatttacaaatgagttgctgacctttggatggagttcttgtggttttgtttttgttgttttgtgtttgtatgtttgtttgtttttaatagtctggccactccagaccctagttgcctcagtttttccagtacctrtcaccagtgaaggctgtgatatagcaaagatggcagcttgccccttcctctggaagcttcatcccacaagggtactgacctattgctggcctgaacgcacctggaggaggtggctggagaccctggttggaagtcacacccactcaggaggaacaagatcagagacccacttaaaaaaacaatctggctgctttttggtagagcagctatgctgtgttggggatcccttcagcccctgattggtttgggctctccatggcccacaggcagcccaaacaggcaaggtgatgacctgccccaccactcaggcgctctgccccagggtgaaattagagctctttaggccccaaagaacatggggtgggagggggtggctggaggccccagctgggaggacccgccccacaaggaggagtataacggagtcctgcttaaagaagcagtctggccacacctctacaaaacagccttcatggtggggaaccccctttgcctcagtcggctwggactctccaaagctggcaggctggaatggctgagttatccaaccaacccaggtggtggccctttcctcttccaggcactccatcccagggagacatcagagctctgtccctaatacatgcgcttgggcatggctggtgggcccaccaggtrggtcccgtccagtgaggaggaatggattgatgtcctgcctaaagtagcagtctggcctttaactgacaaagctgctttggttcactgctggggggacccttcctcgttgggaccctttggactctccaaagcccgcaggttggaacagctgagttatccagcaatccaggtggcagcctgcccctctctccgtgggctccgtctggtctcaggcagtctccactctgttgctggtggccagctggaattccaagacagtaggtcttatcttgtgaagtgcagtggaagtggggcccgcagaatgatgctgcctggttccctggattcagcccctttcctagggtatgtgcagacctcttgccttgcctgagctgtagacatatttgctggatatcctggggctggagtatgtaaagcttctgggtctgtgtctgtgcctgagcagctgttctgccaagactccacacagctctgtgtgtcagactcaaggccctggtagcatgggctcacgaggggatctcctgatccgtgggttgcaaagatctgtgggagaagcatgctttcccagtgtcacacaatcactcatcacttcccttggctgggggtgggggttcccttgcctccatgatgcccctaggtgggccattgccccaccctgcttttcttcattctccatgggttgagttgttttcctagtccgttccaatgcgataacctaggtatttcagctaagggtgctgtattcactcacccctttcactcctctccatgagtgccatggactgcagctgcttctaattggtgcctctccctcactggctattttgaattgaacattgaatgttggttttccttgcttcttctgaacttcaaatttatgtttgctagatacttgtgtggcatcctgaattccatagaagagtcagggtatggtatttaggagaaagaagctgaggcttagagaggctcatttmtttgcctgttggttattggcaaaatatggatttttagttaaktgtcataagtaactttmtatgtcaatttcttcttgtttctcattcatcattcatacryacacaagcatcttttcacttacccaatggaattacttttcatagcaaattagtatttttcttcctctgctttgtgattcttttgctgaactccaacttggatagtgatttttttcccctttactttgaactaatttctatttctcaattcctctgctttcctacagtaccataggtacaggcatcattctcttccagcctcttgtcttcaggtgctttgcttgtttctcatcagcccgcagatcccaaggaaacagacattgacctgcgttgtagtagaataatcatgagcaatattcaaaagaaaataagatatatctcctgttcagtgtagggtgtgttttcccrtaaaatctaaatactgtattgcacagcaatttaaatatgaaaaagttgaaaacacagcattcatgtttttccattttggaaactatgtggtgaataccttttgtttctattaraaagatgctagttttaaagtaatgtttaatactactaaacattaataccagaagtattaataccagtatactattatcattaattttttcctcttrkagtatctgttgctgaatttcctaatcatatgcttatatcaggtttgttacatcattgttattattgaaattattctccattagaagcttaaacatggaatttagaaaaaggcatctacagaggaagaagccttttggaaatactgtcttctctgaggatctytgccatattggatgatattggaacaccctgstcctattcattcattccctcaagaaacattgctgtgttcccgttatgtgccaggcactgggttaggcacatactggtgaacaagacagaggtagttcctgttattaaatttgcctctaaaattcatggttttatgtatgtatgatttgcttctcaagagattggcctcctccaaatggagcagaataagcrcattgttcttcaaatattggtcagttgaagacaaccttcttttctattaatttaatcagacttaaacaaagagtataccctcattcaggtcttctggactcataatgggctgatctatgatctctatccatattctttattattttacaaagcctaaatcattgtactacttcctgacctagagttcacaagccaaagaagtctaatttttttggtgacattcttcatatactagccactgtatttcctggaacatttttcttgagttgtgtagatatttttcgagttccaggtgaccatctcaaagtgtggttaccaggacttcacagcctcctaggggtgcaggaacstcaggcttctgcagagggactctgctttctactctgcttattctttgttgagactacattttcttggcttgttagtgtcaaaccaaagcctggtgtctttaggaaactgaggatattcagtactctgagactatgggtacagttttctttgttcccctcctgtttgaaatgcattgtcttcaaatggtccaatttgaatgttcttcccatttttcaagtcctttaggtagccccaagagatcttgcagtttcctattcctaatgtgactttctacttttctggaaaaacattagagccttaggagattttcatagtgtattccctttcctagattgtttttaaaacattaagtaagaataatctctaaactggccattgacaggatctactttgtatattttgctttttcagcttgtatgttttactcctacttttagttttctgtccgaagtttcctgattatagtggggtgggaggtgctggagatgcagcagagtctgctgttggtgactgggagctggaacattctcccagtcccagagtcagtgttactgctttctgaaatgcactttgttacagtatttgtcaaggcctatgacagtctaggtgaattatgtccatgggtttccccctcattcttccttgcccatatgcttatttatcccttaaagaattttgtaaaaatcgtgaggcggtattgattctcacaaagccactttactttctgccatgggattatctttattcctttatgtggtgtgctgccatagacgttgctagatttttcactatgaaaatgatatctaacaatatcctggcagtttgagttcatctgcagtgtgaccattggttaccctgttttgttttgtttttttttttgagacagagtctcactctgttgcccaggctggagtgcagtggcataatctcagctcactgcaacctctgcctcctgggttcaagcaattctcctgcctcagcctcccaagtagctaggattacaggcgcccaccatcgtgcctggctaatttttttttyttttttttttaatagagacgggatttcaccatgttggccaggctggtcttgaactcctgacctcaggtgatctgcccgcctcggcctcccaaagtgctgggattgcaggcatgarccaccgtgmccagcccattggttacctttttatgggcattagtaatctgttggcattttcatcatagtgcatgtagttctacagtatcactcctgacttcttgaatgccagtcattcttagcaatttgtcgacattttagtttgtctgttagatcaagaggctccttgatatttaccagtgttcctacctgcctgtctcaaacatcagtttgagacttggaacctgccttgtgtcttccacagcaaatagagagaaaacgtgtggctgttcctttcccggacctctgcatccctcctgtgcctacttctctagcagccttctctctgtatctggttgctgttcttatttattttgcatttctgtgcttgaaccccactctgttctttcttgagcattattttaattttactccattttgttaaaggcaccttttcccattttccttttgcttgccagtgtatcacacagttcttgttggttttgagcttctggccctcctttccaagtctttcaataaaatgtttctagtgaaacatgtaggtatctcatgagggcttacttattttaaaaaggctcttttacatttctctcacagcttaggttttttttttttaatattccttctaaaattaatttactatctgctatttttggaggagagaggtcaagagaaatcgaggtgaggaaggagggaaaacagcttattatccacataatatgatgttgctttggcctctcttgttttgtgacttacaaagacttggatataccacttgccagtgggattgaaggctcccaacactgagttatttgtcctgcctagaagccttagctctacttcttgtcttaaatgaactctcccatatggatagttgagacttacattgttgtaaccacaggccatgttgtggcrtctcagtcattgaagcatttcagtaagttctcttttttttgttgttgttctgtcattttatctattaactaaagaattattagctatttagatgccaaggttattgctctcttcctactttaatgttatagtagtgaccattttaaatgtaattatagtattcataaaaggaaagtaaaactttataataatattataataatgaagactgtatgttgtttactgtgtttcagtctctttatwtgcagctgaagtgacttttcattatttgtccccaaattactataatctgggtggtaactggcagcaaacattaaatcttctatttatctcttgattatcttccaacaaatatttttaatcccctgatttttaatccccaggggtacaggccattggctaaatacccctcatataatcagtccctttattcactcctgtgctatcactctctgccaacagagcttggggatgttaactcatcttggtagatatatgatcaaartaactcagattaaagttataaacattacaaaatgcattcaaaagctaatktaattgtttaatttttgattgtgtgtacatctctagtgtcatgttaatgccttagtgtatttatgtacttttggagctttgtcattgaggtcaggaacctattgaatgacccaaaccattgagcaattggttatgtagcaatgatgcttttaggtcacacacgtgcagatttcaaaatggctgatgagagcttatttatctggctggatataggtggtaagagagatttagtgactttttttctttaagcacattctaaaatactgaaattttgtcactaccacttgatttacaggggacgttttaacctttcttacgccatggactccttcagcaatctggtgaagtgtatggatattctcagaataatgtttttagaggtataaaaccaaatgtgtagaattgccaaggaaactgactcttaatctgttaatatacttaaaaaccaggtttgtgattatagcacaagacctggcagtgggcctggtaaacattggaacttaagcagtgatgggcagaagtgatgcctccaggcatctgcggcgactgtatagtcgtgttgaaatggctgttgtccctattgatggaaaggtcacaagtactattactactgaggattgtggcttacattcaaaatagaagggaactctaaatttcagatagaatttagtgaaaataaagacatgcattttaaaattttttaatccaaatctgtgtgctctcctgagttttatccatggaccctgtgaatccttggttaagtattcctgctataataaattccattaagtaagttgatttgttatttctgtttatctgtaaagaatctcagtgagtttttctctagaaaagacccggatagttacttctggtgccattttcttatacagaaatcatgacagatttttctgtatttatcagyarctgataaactgtaaaatgacagagaaaaggcatctaatatggctaatttctgataattggggtcacaaagtatttttaaattaagattttctaaaaaaaaaaaaaaaacaaaaacccaggagacttagtttaatatttgttttaaataattttaactaattagaacaaattagaatttattttaaaattatatattttttaattgaaaaagaatgaaaggctttcaggaatggcaccagaggttctcagaggttgtggaagtggcaaagaattgtgaccacggagttataactgaagtcagggtgcggggtgcagaactcaacattttagaaatgaagattctcaaactcaaggaatgttgctggggcagctgttcttcgttttggagtaagtcagaagagctggcagacttggtgaggttgttaaagcacggtcagtcttccagagcagtggctgagtccttagaaaaaaagcaagagctggagggtgctgtgagaacagagccctgcatatgctttctactctgacttgtgagagctccaattcgcctctgtggctaaaatgtaaacayatgacaaaaatcaataccattatttcaacaaatattttccagccctcctgtgtgctaagcagtaggggtgagagatggaaagccatggcccccacagtgtggagagtggacggacagacagaagcagtgtgtgcagccttgcctctcatcagagtcactgggagcagggtgcgtttggggattgttaccttgtcatgtgtaatcagtgttctgattccctgtgagagcccttagtctactttgagcatttcaaaactctagtggaactataccttaatatgccttgagcatacaaaggcaaacaaagatgtcacatttgtttagtctggttagcatttgtcactctggagtaacaaccctgtgactgtatgatgttccaaattgtaattataaacatttttgaagaaaaatataattgcaacagaataaggaaaaatcatacaaaattggggttatgagtgtgaggaagaatagtttctgaactatagagctgggccttgggctgggctggaggcaaatagaagaggctgggagtatagcactggtgaaagggcccagataaagtgatgctgtcctctgctccagagccactgctggctccccagtgcccactgaacaaactatagactggcatatataatttgctccagaatagcttctacttacattacataaatatagcactttattccccaaacattgccggtgcatttrtctctccttttgctcatgctgatgatcmctgccccctttagaatgtctcatcctcacctttccaaacccccactcccccagtccctatcccccacccctgcccacccccatggaccctactttttctctttaagtctgggatacgtgtgtaggacatgcaggtatgttacacaggtaaacacgtgccatgctggttggctgcacctatcatcccatcacctaggtattaagccctgcatggattagctatttatcctgatgctctccctccttccacctccctgacaggtcccagtgtgtgttgttcccctccctgtgcctgcggaccctactttgatctgtccatgtcatctgtccctcctttggatctctatcctcccaccccacactttgtmaccatctcaggatgccyttcttaatccctgtggcctcccttttgtagcctcttcaaacctctgtctactcgacacccataaggcaggctacaggctacaggagggcaaggcaaggccctgtctctgtcgcctttggatttcctggaatcacagcctgcggcctgctcctggtcgggtagcgccttctctccattccttccctgcccactgagccgcagtgcttctaggtctgcacctgcctgactcctatccagctctggagcggggcgggggcgggggaaagatctgcatctggccccagctgctaagtcaatgtcagctctgctgagctgctaactgggaaaaactggttcatgatggaacgtaaggttttattgttgctgtccttgattaataactttcacttacagagaagcagtaaacagtgcagctgcttgtgtggtcttaggcatttccagctcactggtatcatgagcctcctcttgtgtctgtgaaatcaaatgttagaggaaaagatttcctgttctctggttatcttttaccacatgtagttcttttgcagacagatctctttttccgacaccacatttgtagtcaggaaactttggctcrttcattgagattttttaaatggaatttgctccatatataaagtttgttccattcttaattgtgtactgaaatcattggggaattatatgcctaaacttcagactgaatgttgtcttatttattcaagtaatattcctgagtactctccatgtggcaggtattctttaagtggtgggagcaatgagaaaaaacaaacagagcccttaacctcatggagcttacaagctcactaaaccagtgaagatgctttctctgtacttagagtccaatggactgagaactccgaggtgaagcacgccaggggaggatgaggtgaaggtagagatggccaggtccaggaaggcctcttgggggaaggaagggaggagtgaaccctggggaaaatgttctgagtagagggaaagggcaacacccagactctgagatgggaggaagtcaaactggaaaggacaaatcacttggaacttagaggccgccccactgaaccatacgggactgaagaggcaaacaacgtatgttacaagcaattttgcctgtcttcacattcctacatatattcttcttcttgtttcagctgaaaagcctgtaatgtgttcagccttactcattaatgtgttatggacttctcttctgctgtgtttgaaatgtttttccttactaaaattgttattcaaataccttcccttaattcatttacactttagaagataatagttctattaacatttacaggataattaaatatataaatatatatttcatctaatttctttttttctttctttctctcttttttttttttttttttttttttttttgagatggagcctcactctgtcacccaggctgsagtgcagtggcacaatctcagctcactgcaagcgccgcctcccgggttcacaccattctcctgcctcagcctcccaagyagctgggactacaggcacctgccaccatgcccagctaatttttttgtatttttagtagagatggggtttcaccgtgttagccaggatggtcttgatctcctgacctcgtgatccgcccgcctcggcctcccaaagtgctgggattacaggtgtgagccaccgcaccaggccaatttcttataaataaatgaactttctcttcacgtggctttctgttttaaaattacagatatatttttacctctgtatgattcttggggatttaatggtgaacagagtcaagggccctgctgctgtagagtttacagtctagtggggtaggggctgtttgtgatctttttcatttaccccagcttttgcgttcagtagatttcagaattttaaaaatgtgtgctctttaattgtattaatattttgaagtaagagtacagtatgtggggaggaaatatgagggagaygcagtgggtcagtgttggcagaccactcacactagactcctgatgactatagccgcctctctccctgaacctgaaatttacccctcccagactaccatttgaggaagagagctagtccattatgagagactcaggaccaaggcgaggaattggaacactrtaaaccccscaagaggggagtgggccttgcagagagttccagaatagtgcctgatcagcagtstctcaggatcatcaaagatcctggcttcaggagctggaatgttacttgctgtgcttcttggaaaaagagtcacaatgtgtgacatttctgacctcaaggattcagttttggtggtcattttaaatatgtaaaattgtgagcactgtagttaccaacacatgacaaccactccactaatcagacacactgtattttctcttgtaatcatctaatataagtgatagtttgtcattattatgactagtcaatatattatatgtgaatagtggcatttatcttatcctacttggttagcatgccctctttcatctctgttcagtttcacatagttataaaattaacatttagttataatgagtttggaggggtaaaagggcttcagtgatcctggaatgattgttgtcatttgttttatttgctgtgaggtctagcacagtgaactcaggccttccctgatgcagctttaaaagcacatgggatttacattccattttgtagactacagaattgacacgtgaactttcagcatctatatctggtccctttcagcccatttaaaggactaattctaattttctgtttcctttaagaaaggctatgatttaccactcacaaataaatgtggacaattctttgggtatctgtttgtatctttgaatgttgataaattaactttatgtttgaacttaaatttcctgcttcctatgactttaaatctttctctcatttctctggctttgctactcgcccctgaggctgccctgactgcgccttaagaatgatatcccatcgcagtgtctttgcgcattttcctaactatctcctcctgcctgcacttcgagtatgtctaagattcttcttctgcactctgagttctgactctttatatagcgtaactgtgaaaactattgttattgttatgctagagctttggaatttatagagagttttatctgtcttgccctttgaaattttaccttttatttcagtaatattarattatcaaacttgttttatcattctcatagctcattttctttcctactggtttttgtgtttttgtgttgatgtttgtatatttgacatttagatttctcattagtttactcactgtcttcattcactcagcaaatactgtgccaaggcgtgcttccggcatgggagacactgcggagaacaagatgaaacccagctctcayggagcttaccttttaattggggagatagatcataaataagtaaacagataaaagtttaaagttaacgtgaaatgaagcaggataaagacgggtggataaggatagaayggcaaggacgggatgtttttagcgagggaggcagggcagtggtgaggggcacagcatacagaggggtcagcagcgtgaaggctccaggcaggaccagctgacgccagactaggacmgcagggtggccggagaggctgcatcgtcgtagtgggggatragtgtggtaggttatgaggtcaagtgccagggtgccaggtgggggaggactcaaattgaactagttagaggttcctgcagtggttcccatgaaaggtgatgccagactaaattaaggtgtgggctaagtggtgggaactggttaaatttcagtgaactgtgcagggaaggaagtgttagggaagatttctaggttttgcttggaatgggtgctatttacagacagggaggggccatgggaaagaagagctttggagacagcttcaggaaccctrtttggggccatctcagtgtgacatgtgaacatatgagaggctgttgctccaagaggtgccctggaggtgggcctttgggcccatttggacagatggtgaattgagacctcggactgagtgatgacacagctggagggtgggtcggggagaaaaccctcagcactgagcccagggctagagtcggggtgcaggggacctggtagacctgcaggcactggcacaagaaagagcctggagacttgatgccaatcgagtggaaagaaaattggaagaatatgcgatgtgggagcccactgaagaaaatctttcaagaaagcgagtttgggcagtattttgtaggcttggttttttttttttttcatcagtctgattttttgttctccttattaggtgaaataagatttttactgttaacttggtctgcatgcctctgaaaatgcaactctctttgtgattggatgcatacttcataatcatcccatagtattgagaagatagagaaaaagataatgatagaaaccaaccacaaccaaaaccctactcattttggctcccagttataactatggtttagttttgggggtttggaagcttcttctgtaaaggtccagatcgtaaatattttctgcttcatgggaaataactctgttgcagctattcaagcctgctgtcatagtgtggaaacaagcatagaagacctgtaaacaaatgaatgtttatagggctatgacctataaaacttaattacaaaagcagatggtaggtcggatttggcctgtgggctgtagctctctggaccttccatgttttcgtgtgtttcagaatcacacttctaacctttagttttacttaaaaataatctctctctctctctttctttttttaacctacgtttcattttgagacagtcttgctctgttgcccaggctggagtgcagtgtcatgatcatggctcactggagcctcaacctcctgggttygagtaatccttctgcttcagcctcttgagtagctgggaccactggtatgtgccaccacagccggctaattttttttacttttaattttttttgtagacataggaccttgctgtgtttcccaggctggtcttgctctctggggctcaactgatcctctggcctcagcctcccaaagtgtcgggaccacaggtgtgagccactgtgcctggccaacacttctaagctttaggaattgatcagycacaatgtactgttcagattttctttttttaaggaaaccacttaatttgttactttatattgtaaaacactttgtaaccaattagattttatcagctaatcttatcctgtagcatgttgaatatcaaacacatatgcttaattttctctgcagttacctaaaaatctgcaaacacacaaccatcctttcccccatgctcccctatcttatttactatctttagtctaacagtgcttaattcttttccatgagttatgtgctctaggcgattcctcagggatctagaactagaaataccatttgacccagccatcccattactgggtatatacccaaaggattataaatcatgctgctataaagacacatgcacacatatgtttattgcagcactattcacaatagcaaagacctggaactaacccaaagwcctggaacaacgatagactggattaagaaaatgtggcacatatacaccatggaatactatgcagccataaaaaatgatgagttcatgtcctttgtagggacatggatgaagctggaaaccatcattctcagcaaactattacaaggacaaaaaaccaaacaccacatgttctcattcataggtggcaattgaacaatgagaacacatggacacaggaaggggaacatcacacaccggggcctgttgtggggtagggggagggatagctttaggagatatacctaatgctaaatgacgagttactgggtgcagcacaccaacatggcacatgtatacatatgtaacctgcgcactgtgcacatgtaccccaaaacttaaagtataataaaaaaattaataatgacctattagtgatctaaattggattccctagcataagtgaaaactttcatgttgtacagcttccttattctatgttctaatggttaaggtgcttatgcaaggatgtgtggttcacggtgaatgtaacatatccacatataatctattcaatgtatatagaacgttcaccacgaatataacatttagtgccaccacttgctgtagcttctctgtgtcagtggaaatacttacctgttcttaggattaaataatatatactcgcaaaatgcctaggatgatatgcatgtgtctggtactgagtacttaacaaatactagctattccttcttggagctgtttaggcggcatgtctataaatgaaaaactagtcaaggaaagagaaaaaactcacaacattctcattgttgttcaaawttgactggtcccttgaaaaagactgcaaataccatgggataagaacttatacctaaaaatattttgagtacagacacttgatgtcagagaagatcttcagaaagatctagtttaaggtttcttaatctgcaatccacaaatctctggaaagcgtaggcaattgtttgtgtctgtgtgtgcgtatgtgtttctcctcagagcatctggcttttatgagaccctcacggagggagtggctgaatcctgcttytgtggtgagcctcatccagggactcacttggagtcctggttctgctgctcctaggcagtgtggcttttagcacctccatctttctgaacctcagtacctagtttctgtttctcctaggattgttacaaagcttgaacaaaagcacttttgaattgtaaagtgtcaaataaattacagttgtggccctgctgtggtgaggaaactacggccaggggaagtggttgagtgatctgctcagtggccactaccagtggtcccagagccctgacacccgctctyccaaggccttctcaatgcactgtttcctcaaaataaggccrtggcttttcctgataacaaaaagacccagtgcaaaaaccattcaacagggaaaaactggccttttcaacaaatggtgctgggacaactagatatccatctgcaaaaaatgaagttggacccctaaccatacacaaaatttaactcaaaatggatcatagaattaagtacatgaaacaaaactataaaactcttggaataaaacattaggagtaaatcttcctgatcttgggttaagtaaagtattcttagatataacattgaaagcacacacaacaaaagaaaaagtagataaatgggacttctgtgcttcataagacacctgtaagaagtgaaaagacattagcccagcactgtaccacatgcctgtattcccagctattcagcaagaggctgaggtaggagaatcacttgagcaggttttgaggctatagtttgctatgattatgcctgtgaatagccactgcactccagcctgggcaacatagtgagaccctgtctttaaaaaaaaaaaaggaagtaggctgggcgtggtggctcatgtctgtaattccagcactttgggaggctgaggtgggtggatcatgagatcaggagtttgagaccaccctagtcaacatggtgaaaccacgtctctactaagaatacaaaaattagctgggcgtggtggtgcatgcctgtaatcccagctactcaggaggctgaggcaggaaaatcacttgaacccgggaggcagaggttgcagtgagtccagatcgcgccattgcactccagcctgggtgacagagcaagactccatcttaaaaaaaaaaaaaagaaagaaaaaaaagaaaagaaaaagacaaccctgataatgggaggaaagattgcaagtcatatatttgataagggacttgtattcagaatatatatatatgtatgtatatgcatatgtatatatatataaacttttacagctcaacaaatgacccaatttaaaaatggctaacggattcaaatacacatttctacaaaaacaagatacaaatggctgataagcatatgaaaagatgctgaacattatttattaggaaaaagaaaaaccacaacaagatagcacttcacaccactaggatggatataacaaaaaagaccacagcaagtctatgtaggatgtggagaaattgraactcttgttcattgatggtgagaaggtgaaatgacgcaggcattttggaaaatggtctggtagttcttcaaaatgttaaatatagtgttactgtatgacccagcaactacattcctaggtatatactcaaccaaagtgaaaacatggtaagcgaaggaagccagtcactaaaaaccacctattgtatgattccatttgtatgaaacatccacagtaggcaaatatatagtgacagggctgttggggtcagagtgagagytggggaccagrgagtggctgctgatactaggttctgaggtactgagtactaggtacggagtttctttttggggtgatgaaaatgttctgggcttagatggtgatgatggcatctactgctgtgaatgtactagaaaccactgaactgtaaactgttaaaagggtgaattttatgggtgtgaattatatcttaatgaactgttattagaaaagaataaaaataacagacttccaaatttgctttcttacctttgaaagactgtggatgaaacatactttttttcttttgatttcccggcagccacatgacctttactcacaggcctaaatgacatgagtttagtggtctaaatagggtccctggtgagcagttgcctgaataccatttgcatgtgccaggggacagcttctgctccagggcacacatgcaggacccagcagtgacgaagaccagtgaccttacccctcaaaggggtttttccagttgaggattcacgaggcagcaggggaagcctgtttgcactgtgcccagctatattagcctacgaataaaccagtgacaaagattttgagccttattattttaggggacttaatattagattattttgttcattatgcataaatagaataatttcagaaagcatatcagtcacacttgtttttaaaaagtgctctaaagaactgcaaaatatcgaattattcctcagcattcgcttagaaattggttcatatatacattagcatcttgctgtatgctctgtgtctcaaattaaaaaaagattatgcattcgtgtaatagattacaaatttattattgtacctttagaatagaaaataaaacaaccctttttaaattcagctgtgttctaaagcacatgttccaaaacttctctgtacataaaaatcaactggggctcattaaaaatgtaaatttcctaggtccctaccccycaaagagattggttcagactgaatttttaaggaagatcccagataattctgaggaatagggtttgccctataataacccatgccctaggaactccagcctagaattacgagtagtagaagggcggttaaagtgttcttcacattaccataggtaattaataggaattaagatatttttagcaatttgatactgtatgtagatgacatccacgttcttattgtgctgttagaaaataatattttctcaccaacatttcacagtgtgtgaaattgtagtctttgttcctgctgacagcacckttgtgctatgaagctattaatgcagccctgtctccgcctgctttttcyagatttcctttgacctcgctgagtacactgcggacgttgacggagttggcactctacgacttctagatgcagttaagacttgtggccttatcaactctgtgaagttctaccaagcctcaacaagtgaactttatgggaaagtgcaggaaataccccagaaggagaccacccctttctatccccggtcaccctatggtgagaacatgcgtgcacaccggagcacatgtgtggcgttatctgtggrtgtggggggtgtgtgtttttcctttcattctgttcatgtctcacagctgaagtcatttgggtgtgaggttaacattaaggtagactaaagtgactgaacttgttgagaagcatacctttatacgttgctaactacaagtatttgctgccattgccttcggggtgaaattaccrcctcacttcaccaacccatgttcattcagcccttccatacagatcacttgaaatggaaaatcagacccaatgtgattctttttctaaactgttatgagattatactgaagtgataaggtttcatgtttttttttattttccatgaaatttccttgagctcaaaaccttcaaaaaaaaagactattgygtctaatatgtttgtaaggagaatattaaygaaagacttcagtgataaaatttcaaagcagttggaatgttaagatcctcatttttttccattctaattcctcaaaagttagagagagagaatgagagagaaaaagatctaagaaagattcaatcaattcgattgtcaaataatgcactgttggcattacaaaagtaagaaattcttaaaatatttcctggtgaacatgattgacaggtgtaataacctttatttcgtctttgsgttttgatacttttttgtatttggatgcattacaagttattatttcggccaagatgttactgttgaagatggtgagaatcactgtcttttacaacaaacttcattgcttaaaaaaaattattccaacaggggcagcaaaactctatgcctaytggattgtggtgaacttccgtgaggcgtataatctctttgcagtgaacggcattctcttcaatcatgagagtcccagaagaggtcagtaaatatattaactgaaaagagaatttcagacttgaacaacaacaacaagttgcatgtctatttggtgtatgtactacagagactgaaaaatttcctatctgtatctaattatgatgaatgtcagagcagcaaatgaagaaatgtatacccagccttagttttttgtaattttattttgagtttgtgggattttaaattttaacattaaaaactggacagtgttccagttttaccattttaattagtagatcttatcaagcttgttttcaacctgagtattaggaagctactatatgaatgcaaaggaataagtagtaaactaatgattgtttttagaaattactcctattcaaatagactcaatctgtaggatctatgttattttttgactttgaatggttagatatttggtattctttctttacatttcattaaatagacgtccagaaattactatgcttctaaattattttaaaataaagttgaaatcagttttttaacaagattttaaaaaattgacacatttttatggagtacatagtaatgttttgaaacaatgtgtagtgatcaaatcagagtaattagcatatctgtcacctcagacatttattgtatgtttgtgttaggaacatttaaaaacctcttttctagctaattgaraaatacttaatatgataaactatagagcactccacagaacactagaatttaatgtgtctgtctagctataattttatattctttaagaaatctccccttattccccactcccttgaagtcagctcttaatttagaagtattatcaggtatttttggaaaactgtatttgtttgtattggcttgttgccttttcagagttgttgatgagactgtagcaacgtgctagttctcttgttcccagtattaagttttaagtaagaaaatgtgtacccccatcattacttctgatttactgaagcatgagaaagctttacaaagcatgcacatgctttacaaagtaaaarttatctgtaagccttccaagaagttttattaaatttcgctatcatttagatttttagtctgagaataaacgtgaagtccaatgttataagttgtttcatgaccaacaactagtaagcatataatttttccgtgaaattttatgtgactrtatagctgcctaattacaccaacaagtcatgaagaaagattaaagcgacaggtttataaatgaatctttagcgtcagtacatttttattttataattgcttaagttaaaaattcccatgatgggctgttaaagcataagaacctagcctgtcatcacattgcctgaaaggaaaacaaattcacaagcagtgagaaacatttctttaatgaattttgtggtcctgggtgccagcggtaagggagaaaggaaaaggaagatcctagctgtggttgcctgcagcatgtggtatgagggcgcccacagagtctgctcagtcgtggtaatccctgcctctttctcacaaacatgttcatacacattgtttgggtttctgtgttcttcctccctcaacttttccacctgcaaaaaaaaaataaaagttaattgttgtgaatcaggtcaggatagggaaaaacattcctgggttgcaaagtaaaaaaagataaatttgaatataactccccctaattctctctttgtgtacctcctaatgagaacttattttttgtctttgtagatgttaaccactaactaaaaaaaaaaaaaaaaaaacrtattttaaggccaggcacagtgccccacatctgtaatcccagaactctgggaagctawgktsgggggatcacttgagcccaggagtttgggaccagcctgggcaacatagtaagatcctgtctctcaaaaaaataaaaaacgaatcagccaggtgtggtcatgggtgcctgaagtcctagctactcgggaagctgagttgggaagattctttgagcccaggagttcgaggctgcagtgggttataattgtgccactgcactctagcctgggcaacatagtgagacccctgtctctaaaaaaattgttttaaagtaataaaaaatgttctaaaagtaacacgtcttcatttaaaataaaattttaaagtaaaagttcccaccctcgtgataactgccagccctatcctcagacccactgttaacattccttcagaaaagttctctctttaaacatacaaagagggttctgctctacatattgttctgyagcgtcaggcttctattaaatctctttaggaacttgacctcaactgtagcatacaccattttgttttgttttattatatgcctggaaatcagtggtaccacatttttaactatatgatcaaataatgagaaaaagagatgtacgtgaaaatgatattaatactttgatatgtaatgcctactatttacagcatttcttaaaacttgatcattaattttcagattaaattaatctgacagtaatgttgttttccaaggagatttctttcccagactgaaaattccataatggcaggactgtgttgtattcatacatctccagcttccaggcaatgcctaattgctaataagcattcagtaaatatttttaaatgaatgaataagttaatatctcatgtttcaggaacagcttactgacttgaaagctaggtggtctgaattacagaaaagtagaaattatatcgatatttataaatatatacatattgttgattttactcatatagtaattaaagctaataaatgggccgggcgcgatggctcatgcctgtaattccagcactttgggaggccgaggcaggtgaatcacttaaggtcaggagtttgagaccagcctggccaacatggtgaaaccccgtctctactaaaaatacaaaaaattagctgagtgtggtggtgggtgcctgtaatcccagctactcgggaggctgaggcaggagaatggtgtgaacccaggaggcagaggttgcaatgagccgagattgtgccagcccaggcgacagtgcgagactccatctcaaaaaaaaaaaagctaataaatgattttgaagtaaagattcaatctgatatacattaataaacagataaaattygttttttgttaataatctttgtaaacctagaatttcctgtggtactttaagtgagtttattttcttaagttggttgaacatttactcatcagtcttcttgttccctgttattacagggaacaaacccttttttttytacatggtgtagaaaaaccttggtaaacctcaatctagtcctaggtatccagtcacccatgctgaatttgtagagcccaagttgatgcagtttttgggggccatatactttttctctamcaaagtgtaattgtcaaaggtgccctctcactgcatgaataacatttcatgagaatttctgactttcaaaagtggggaaaagtattttttaatctaacaataggctaaaccagaagttgacaatctaggactcatgggccaaatctggcctaccagcatagttttgaaaataaagttttattgtaacacaggcagatgcacttgtttatatatcatctatggctgctttcatctatggagtcttgtagtgtgcagagcctaaaatatttgttgtctgggcctctaagaaaacatttgctggccccagctgtagacagatcctcaacattcgagaaaactttcacttgggttgattgtgggtttctcctatggtagcaaggtagtcttttagaaagatttcctataaatgttaaagagcatagtgagccagtccttaagcagaattctgaagtgctttggcaggttggggttctgttgtacttcactgctgtatgcaggtaaccaagtgctccaaaggatcaagcactatgaccaagtgctctaaaggaaagctagttgtcagtgatgtatgaaaccaaataagctagtaactgatgatatacatgtagcatagtttgtccaacaaccacaactcctgagcttggacacgtgctcattacggttttgactgccttctgtgtcttttctccatcccaaccatttttggttttctttctttttcttttttttttttgaagacttcatttatttatttaggttttctttctaaatatatttgttttgagaaccgtgtaatacatctagagatgtaagaatcacctatgctagcatcagatcaacagttggaaatcactgatttagggaatagagccaataatctgcractttgcatccctcagtcagccttccagtcactccgttggtgaaagcaagagggtggatggcacttgtgctatagacttgcttcttaygaaatgggagcactttagtaatatttactacaaattaataagaataacagaattttagaattaaatgtctataagtcatgaaaatgtatatagtagtatatgttttatgaataactattactatgtattatatactgatattcacagacattaaccaggtgctttctttcatatgtactcagttttttaaaataaaaaagtaggcaatcataacctgcataacaaattttggtaaatgatggactgcagtggtcccataagattatcatactgtattataattaaaaagtcacatttttactgtactttttctgtttgggtacacttaaatacacgagtttaggcatatgttattttattgcttcrtagatattgcttttttcttcttttcatactgaaggtgtgtggcaaccctgcattaagcaaatctgtaggtactattttttcaggtgttcacctcctgtctctgtgtcgcattttgagaattctcctaatatttcaaacttctgattattattatatctgttacggtgatctgtgatcagtgatctttggttttgctgttgtgattgttttcaggcaccatgaactgcacccataaaagacagtgaatttaatccrtaaatattgtgtgtgttctggctgctccaccaactggccattaccaccccctgccaccgccgccccgttccctgagacacaacaatattgaaattaggccacttaatagccctccattggcctccaagtggaggaagtagttgcagatgtgggggaaatagcaagagagctagaattaaaagtagaatctgaagatgtgactgcttttatcgtgtgcaatctcataataaagttttcactgatgaggagctgcttcttatggatcaacaaagaatgtattttcttaagatggaatctattcctggtgaagatgctgtgaatgttgtcaaaataacaaaagaagggtttataatactacataggtttagttgttaaagcagcagcagggtttgagagattgactcyaattctgaaacaaattctactgcgggtaaatgctgttacacagcactggatgctacagagaaatctttcctgaaaggaagagtcagtgattgcagcagacttcattgttgtcttattgtaagaaatggccacagccgctccagcctttagcaaccaccatcctgatcagttagcagccatcgacactgaggcaagccctctaccagcaaaaggcacagatggtcattaayggttttcagtgataaagtaatttttagttaaggttgtacagggcttttaaaaacatactattattacacacttaataaactgctttttccttttgtattgtttcttcaaacctgaaattgtgtatctccctggctgttccattacatatctttatttttatatttacatacatacagtattctttttgccacaaatgtggatataatgatagctttctactggaaatacagcttcacattatctgtaatagagaatagactctctagggaaaaaggttttgtttattatctcaaactgtttaatatctatgaggaaatagacatgtacaaaaattttcttgccttattacatttctttgaaaaactaaacaatcagacttgtcataaagatattaattattatataagttgtgaactatggggaaaatattgagaggtttttttaattatttaaaaatagttcataaataagtatattagtttcttttcaaatatgttatttaccagtaataaaatctactcttaaagattatgctataaattggaacatgggaagcaagcctatttagtaaagctaacaatatttctrgttttgactgtttattacattaggaggtaaataagaagaataactactgttcatcacatatgtaatgtaaccagttggggctaattatgtcttaattcttaacattggcagagtactttggcatgccataaatacaaatatggtgacctttacaaaactataaataacactaatatgagtgtattctaaattaagaaaaaacattttgcatgataattaagagggaacaaaaaatacattctaccttctacttttggaaggttaaaaaatttaatgattagattatccctgatttcctaattttgatgacagtagctattgtgaataaagggtgaaacacacataatattcagcattctttttttttaaatgtgatttttcagttttcagtatgagtgtagaattagccgcttwgatttcctacactaagaacagcagcctcggtttctgtgagacttcctagggtccacgtcctggaggagaaagccctgacccaggggtgtgacggagaaagttgttctgtgctgccggctgttggcaggcctgsctctcatacccagcagccctttgctttccgcaggagatcagttgaagatttccgtctttcgatgaggatatttttcttatgttgactcattttagtctttcgatcattaggaaagtttgggcaatgtagtaacctctacttccaggactgactgaggaggtgatgtttggttacatgagcctacctcgtgggccgttggttaccagccgtgagtcactcatagggattggcttcatccctggatacctttagcctgagtaagaaatcacgttccctgttgacagcgtatttcttccattctcctcccactctttcttctctcagtgtttaagaatgggacatttactcagtctgggtaaagcattctctctccctgtggatcttcttttctcttcctttccatatttgcctaacgcctaactgagcctctcttctacttgccatatgtaactttgctcctctgtctctgaccatggggccttgcaacagatccatcactaccttcttcccccaggagcgcttccgttgctaaactgtctgttcagaatttcatgagatcctagtaaatacttccagaaagctggtttattttgtatttcattctgagtcacgaagaactttttttaatcatctcccagctgaggaatcagaggggtttggctatcatcatcatcatcatccttactgtgaaaaatgcacgctcattagctcttcgtgttgcgtttgacatagtgatttaatactccacaggtactttcagagacattttgactaacttgtttaacttacaaattttttatctgtatgtggaaatgaaattcatgtgtacttctatttttctctattttttaattttaaaaatgtgtattaagccattagatactattttttccttgaaagagcttctagggagcagccagttaacatccacctgtaggtattctcccaaaataccctcagaatttgtgaaataggaatttaaagcttctttcatctcccttttttcagcaatgaggaaacagaagcagcatgagattgagttgtccaaggtcgtgaagccaataaatgctaacacggagaccagaaataatcctaggagaagtcatgtaaatattgtacatatttgtggaaataacatatatacgaattttagagttgaacttgagcaaagaaacccctgtgacactgagtgggccacctcagcttggcagtgaagcaagtggacaagttggaaacggaatgtctcagctgctsttatctttgtaaaagaccattagtttgcttaaaggcaatattcctttaagatgtttgacagaaataattacaataaacatagttttataatattagaatataaatgtgatatgaaataaataacttctcttgcctgttatcaagaagttggtaataggaagaactaatataaaagacattaaaaatcaggccgggcatggtggctcatgcttgtaattccagcactttgggaggctaagacaggaggataacttgaggccaggagttgtagaccagcctgagcaatatagtgaaacctcatccctaccacaaaataaaaaataaaacattaaaaatcatgtggcaatgggaagctataaagtactttaaatatacccataattaaccgtgtgagattgccacaaatggatggtgtactagcactgtttagatactgagccatttctagatgagataggacattcctttaaatatgggcttcataagaaatcatatacatcagtctaaacacagtattcacctgactgaaagaatctgrcatttttaaggttcatgaacttgtggttttgagttttcgtcttgagcatttttttagctgccaagtactttgctttataaaatgtctgactgtatttatctttataaattaatcttcagaatttttaaaataattcatgtaaaaattacttgtcaaaatttaagtaaaatttggggtaattttccttttgatttkttttttaaagattgtctttatttgttgctgtaaagataagattaatgctctagaatagtggttctcaactaggggtggggaatggggagagagtggctctttcctccagaggacgtctggcagtgtctggagatatttttcttgtcccaacggaggagggggctactattggtgtctggtaggtagaggccagggatgctgctgaacatcctacagtgcacgggatggctctataacaaaygcctgtcctrtccagatggttcatagtggtgtgcacgggatggctctataacaaacgcctgtcctgtccagatggttcatggtggtgaggataagaaactctgccctaggatgtcatccttccaaatgtgcttgcagaatctgtgtgaatgccacctgtaacagatgagatgaatgccatctcatttttcgttacacttcagttttactttacagtaaattcttcatagaacaacagtagggtctcatttttctttaggtatcactttcactttacagtaaattcttcatagaactttagcaaacatttacgtgaacaccaaagaaaacattcggattcaaatagctccagggccttaagtattatggtctgctgcaggtcagacccaactcaaacccaggactcttctaatcattggaggctgaaccctcacctcagtgacccactgattcacgagccaagtcaagatgggtttgggaccctcccaagcctccaaaatcaatgaacatgtttactttttgttattagttataagaataacacatttttcatttgagaataagttgtagagtccatgatctggctttgatataaaacaacagttagaactgattcaagattatctttcaatgcataggattatactaatattagtgtgaagggttcactgcatatgagaattttcctttaaaactattagaattcatagatgttttagtgctttagggaataatataatgcatgatagaaattaggtaactgggacttgttttcagttaatcacaataggcagaaaacactttctctctgtgtaaatactacatataacatgtctaaataaaataatctttaaaaaattactgaatattggccagtttggcaaattcaaatcatgcactgtagaagtatcaaacaggcaaaccaatagcaaataccttaatattttgtttgtatttctagctataaaaggtgctttgtggcttttgtagatgagcatcagagacttaatttattgcaaaaaattttagcagcccattgtgaaatcaggggatgaagtaatctcctgttggagttcagtagagcattataggttttacacaataccatttgtctgtccataaatggttagattgttggcygctactcttggacccaccaggttctgggtagcctttctggttggggcacaaagtgacatcatctggtttaccattgcatttgtagactatgatacttcatagatgacatgtacacttggcgatcacaaagctgtctggcccatgttattctttgtggagagatgaggtgtaattgcttaaacataaaagacttytgaagcaatacttggtctaatgcaggtgctgattaccaccaaacaaaatgaaatccctcccatctcctgaggtgagatttctggaattgttaaattgaattcaaggggttgtttttcagtgttttgtaatgtctgtgacatttatgtttgaaaccaaactgataactgtctgatgacatgtagcacagttccctgcaatatagccacgcagtatatatacacagagaatttggccactcatcatcagctgtgtgcatttgggcacgtcacttactcagatctcagtttctgcatctgcacatggagaggttaataacgcccacctgatggagcaaagtgcagctctgtcatttcagctcactgtgaaggtgatggggaaaacttacagggaaaagattaatacagtgcatagtagattttgaagatttatttcatatttcctttctcttttcttccctgttcctgtattttcaatgctgaaagctagagaattagtttttttactccttcccttccaaagtgaaagaccctgttggaggcagctctgttagtgggattgctgtggctactggcataagaggacagtgagaaatgtgaacgctgcagtgccagccaacagaagatggtcctgaaccaaaagccaagaatctttcagtggtgttgacagataaaacagagtagttcggcgagacacccrtgaattgcaaaaarataaaatgtaagtagtattgaagaattgctggaatcacaggaaaagccattcaaaacgagattttggcaggtaaaccagttaacatttgaattaggaaagtcaagaaaagacgatgatgaatgaaaggcttatggataaatatcaaggacgtgtgaaagattcttaagaaaattagtgaaactgtcaagtattttttttttaatagagacacagcctcactgtgttgtacagygctcaggctggagtacagcggtgatcatagttcactgcagcctcggactcctgggctygagagatcctcctgccattgcctcctgagcagctgggtcgacaggtgtacactaccacaccaggctaattttttcaagtatttttttaagtgatacatgtatttttwtaatggtcctgtaaaaatcttacatgaaatgtatatggttgtgtcaattacaagaagaaaaccttactttactttgtgactagactaacaaaaattacatagatgcagttgtaatttaaattttgttaattgtaagtggaaatttttcttcaaaataacattcttaagtttttgaaatttagtttgagtcaaaactttcttttccactatttgttatggaatattgttcccctttttaagtggttcacgtaaggatatagaagtgttcaactacttggactcagtctaggttctactacatactagaacaactctggccagtttctcaatctctctgagtctcagttttctcatctctaaaatggggtaatcatagtgttcacttaaggttgttataagcattaaaggaaatcgtggaagtgaagttattagcacgtcattattattaccatcactgctgctaatgtcccacctagagaagtaagctcagtttgtgccacctcgcaacttaaaattaataaacagaaggaataaaggggaaaatgcataaaggaacatatgactttgttttctctgaacaagttaaaaaagttaaggtttcagagcttagtaagtgataagtaaagtaggtaagatctggtaaagtaacttrtgggatattgaatattaaatgctagaagaataatggtctttgcttctgttgtttatgggctaattcccagatattgttattagatgtttctggtgtggacaaactctaatgattcctagagtaaaaaattcccagattaagccagattttatgtttcagaaggtttgcgtctgccttctatttctgttggtaagtttaagattcctgaaaggctgctaaagcaggatgtacrtgaggataaccagcccatgagggtatgcaagtaaggaagtgaacatcagtgcggtcacagagaaaccctcctggcagcaagaaaggtgggttttcagcacaattgtatcagaggaataagggaggccctaatgcccacacagtgtaaagaaggcttggtagaggtacccaggaaagagctcaaccctggccccagtgcctcttatgaccctaacagttaatttgtacataagaaataaaccttgttttaaggaggatgaaggtgtttctcagaggaacactgataaatkttttttgaggaagacaaaataggttggtgagaaccttagtaccagcatatccccattctggctggcagacgactgtgtggtcccaagttcacagagaacatttaattgggagtgctggacattgaggaatgtttcataaatctgcaagcacagggaaatatttccctataggaagcaaatattaagacagggaactgaaaatataggaaaagaagttcatctactcttctactcccagcactaaaatgagctaatataccatatgcgaaaaatgatctatctacttctttccaaaaaatgtgcagaactcgctagacaccattgaattctgctatattaattaagattgatggttattaaaatgaaatcgcttttctgagccagatttgggggatggggattgcaatagttgagtgctccttgtgaaacatgcctagagagcttcttggcactcctgcccaaaggagggctgccagcacatgcccactggtagctattgtgcccattcactttgagtcttggtgcaggggctgtacctgacacacgctcctccttttctgcagccaagggctgagcatgccctgtgatcacttcctggaaagccttccgtacctgcttgatgttttcagcatatccccctttctttggctgaattctaagtgcatctgatactggaatttttaaacacaaattcttattgagaagtgtaaagtgctcttgagctaatatmttagaattttgaaaagtttcaacttacgggactgttagtgatgttagtaatgawgatagcatagcaggtaacacttatttagttctgaccatgtgccagatgctctgtcactcatctcttttaatccccataataaaacgatgaagtagttgtagttatatccattttacaggtaaggtgacaggagtttagagaagtgaaattactttcccatagtagtgaaggatataggatttggactcatgtggtttgaccctggaactgtgtgactgtccattaccttgtgyggctcctttggtggcctgccccttccatcacatttcattgccccagtgagtatttttccagttacattagctgcctttcctggccctctagtttttcctcaagaccattcttcctgtttgactttttgttgcttctttcctttccttatttttcattttaggtttgctaaattctaaatttaattagtgagaaaaggaagtgatgaagtaaaatatggaagcaaatctttcacctgaaattttgccacatgggtgacatagaaactgggactaaactgttaagctgtcttgtaactcagtctattaactttaaaaaaaactgtttcatggtgtttagtttatagacactatcctgggaataccatgtcagggatactgctgaatgacagataccttcggttttagaattatttgtagtttacatgttttacatggttgttaagtccgcttttctgtgattctcttcacagtatttgttcctgagtgatttgaagaatgttggggatttttgttggtggtgtttgttgtttagaaaacagggtttcacgatgtttcccaagctgaaatctaactcctaggcttaagcaatcttcctgcctcagcctcccgagtggctggatctacgggtgcaggccatgaccccaggcgtgaagaatattgggttcacagacattactgtcatgcaaatctatcaagggcctctgtaaccgtatgtgcatactctaaatttcaagccaacccgactataaccaaccacaagaaaaaaaagtgtgaaactttatctccttgcgtattatggtctgttgtcagtatgtgttaaaaacatctcatctagtactgaccaaatgctttttttgctcattacctaatttccagaaagtgtaccttgggccacactcctgttgccacacaggctcagtctctgctgctgctctggtgagcttgagaggcacgctattgcctcctgcatgcccattcatctcattaggcttgtggctgagaaccccacagttataaagaacctcaaaaagttatagatatgattcaagcagagaggctaagtcactagtaagaaagccataatttctcttccttgcatttktcattccttagtattactttatattgtatgtcgacaactaagacagtgttttctgactggcacacaattcttagaagtcatcctttatttctaattgtgcttgttcttggagtctgacccttcttgaaaaactgcttgaagtccaaatcaataattagcaatagttattacagaggaggcaatgttacttattttccttgggtgaataagtatcttttgtatgtatttgttttcagggtattgcctatatttacttttctgtgacagaagagaataacagaaactgtcattagagccaactaagattcttgtggaaggagacatgattgcatcattttatggacatttatcttgtcccaattttctatcagatcaagaatttgaatcaaaggtcttttgaagatttcsttactttgcagtctttatgctgggtggctataagccaatactatttttgttaagttacttcgaacgtgaaattttttttttttttttttttttttgagacggagtctcgctctgtcacccaggctggagtgcagtggcacgatctcggctcactgcaagctcygcttcctgggttcacgccattctcctgcctcagcctcccgagtagctgggactacaggcgcccgccaccacgcctggctaatatatatatatwtttttagacgcaatctggctctgtcgcccaggctagcrtgcagtggcgccatctcggctcactgcaagctctgcctcccagattcacgccattctcctgcctcagcctcccgagcagctgggactacaggcgcccgccaccacgcctgtctaatttttgtatttttagtagagacggggtttcactgtgttagccaggatggtctcgaactcctgatctcgtgatccgtccgcctcggcctcccaaggtgctgggattacaggcatgagccccaacgcccagctgagtgtgaaattttaggaagtggctctgccttacttcttaaatgtcactacacttccgagtcgagatgggagctaaagagaaattgtaatccaagaggtttcagtatgagtgtcctcaaacagaagtatgaacattatccttctgtgaaatagctctatcaattctgaagtaaagcccaaacatgatgtggaacgatgtgggataagtcatttttaatgcaaataagtcatttctgcaaaaaggagttgatttcagaagatgatatacatatctctatattgttccagtgtttttcattcttacatagactgaatatattgaatttgatactctctctgtcacaacagaaagtttttatccttctcacatccctcctctatttgctacagctctgattatagaggtaaaagtgtatacagaggtccctacaaacatgaaggcagagaagaaccctaatacgtgtcagaagagagacaagctgcctagtgtgaccagataatttctttgttctgaactggcatctgtggtattacctttattcttattagtatgcaagtccttgaaaaataaatgtatcagtggaagcatttaatcattcctgagactctggaattatggcagaagcaataagagaatcaggttcattatgtcctacatgtgtaaatgtaaagataccttcctgtttaaactgtggaatagccctgctcccctccctctccctgcagaaaatgttgattgaacacctatcatgtgttatatactgtgttagacactggcgagacactagagagacagaatagaatgcttgtctttaagaagctcacagttgaggtgagtaaactgaagattgcagtggagtgtaatgagagcaggtagcttgtgcaagggtgatggaggagcacagaagagggacagcccccaccaggggaggagtcaggaaacccttccactgagatgacacttggagtgccaggcagttgggaactagctgtggatacagatgtttctcagagaaggggccgtccagagaaggagaagacacctgtgcatgctggggggtctgcacacmgtaggatgtcactggagagagctgtgagggggacagggcaggaggagatgctggggacggggccggtgacagggcacacaggagcttccggcccataggcagtttatagccattgaagaaagaggcttgtggttgcatttgcatttggaagtcatgagttttcaggacaggtgcagagcaggaagagagtcagggcaaagagagtacctggtagcagtgacagcaatccagtaamgaaaatgataagggcctgggccagatggaattattcgctgagtttgtgcttgtgcgtctatcaggactctggctttagaaatggcaaaaagcgaacctcacgctaagcttaagtgaaataattgaagatagcgctgtatgggtgttacccaagtatgggaatggcaggaacgtccgatttcagggacagctggaaccagtaactcagatatcttcaggattctccctttttatcttctgtctccatttttctttctgtcttggcctcatcttttcagtccagttttttctatgaaactagaactaggatcactgcccctttcagtcttgccacttggaggaaaactgttttctctttcaactccatctggaatggcctggggtagggccttggtcaggtttccactccctcaaccagtcccagtagccagtgagtggtgctttgggccagcttgggccaggatcttaccttgaataaatcagtgcagtcaggatggcagggttaggctactcccattagaaccatgtgaagtaggaaagagcaccaaagcatgctttggggaatctgcattgagcagccacctcatttgtggcctactagaggctgggatggggarttatttaggactgctgaagaaacagactcagaaggacttgatgagcagttgactaatggaagagtgagaaaggaatcaaagaggactyccgggctactgggtgcagggtgagaccattcaccatgcagggccatccagaaagttgtgttagcttggggtaaaaggagaagcgaactagagttaatggtaatgtctcctgaggtgaacaggaggaagatccgaccaggaagttgcaggtcatcatgaccaggcagcacgagcttagctctcgctggagagcgcagtcagcataggtgtgcgaaggttctccctccgactcagttcayggcgtaggagcagagacagtgggagaggtgagcgaggcggggttgagtcgtgtagtcaggatggggtgtgtgtttaagatttgagcaggaagaaaagtcctcagaacatctgaactctgccttcctgcgtttgtgttctccctacctgctctcctgtgccctggaggagctgtctgtctggagctcctgtctgctaccacctccttgaagacttggcatcagcaattctcacctctctcctggatcagtttctccgtcatcactaggatctttccctcagcatgcaaagaggctgctttcatgcccatcttgaagtgcagtcctcccagtctcacccctttctctcactgacagcagaagttttcagaagctgtttgtgctccttgtctacgaaatctcacccccattctttcttgagccctctccttccttggacttttgtccacctctttcagaagctctcccatcaaggtcacgtttctgtctttgtccttctgacctgcagtcatggtgatcactccctcctggatacagactatccagactgttaggatactcccgtgtccttgcttcccctcactgcttcctcctcatctggcctgtaaacattatagcatcagtgtatttggttctctgaccatttatgttttgttgctaacattcctttcttggtggtctcagctggcctcaggacttgaaatatcatccatacataaatagttcccaaatgtgtgccctcagcctagaccctcgttggaaggccaggcttatagattcactgcagtgttaaatgaagactcacccttgtctcatcctgatttaaatatttcatgtttattagttccccgatagttttgttagtgtatcgaatgaatagaggtacttaaaagctatacatttttttttttattttggggattttgtctttgtggggttgttttatttgactaaggccatggttctcaaccagggcagttttgtccccccagggggaagttggcaacacctgtgaacataattgagggggtgctcctggcatctactgggtaaaggccagtgacgctcctaaacactgcaaagcacagcacaaccagcaataaaaaggacttattcctccttaaatgtcaatagtaccaaactggagaaaacctgaaaggaagacttacaaatttgaattatctcactgtcagtggaaaatgcattgaacatttgatacaaatagcaaagtagtttgaacatttctctttatacacatattttaaatagttgccaaaaggtggtagctatctcagacaaatgcacattgtgaattgtcctcttttaagcctgagattcctttaaacgtgcctattggattttgagtacctgcagttaaatagtgttgctcttggcaggacttagtgagcaaatgaggtatgatctctctgatctcagtcatctgctcagtcagccatgaccttctcagtgtctcttctttccacaccctgtctccactgagccatggcccaggcagttcacagtggggtggccagagattaccacaggggaaaaatgcagggccccaaggcggaggttcatgtggggttcaggataaattggaatgatttctgttttccaatgaatattgtccaaactgtcattgtactttatctaactccaaaaaaatctttaaatcaaaagcttttggatgaagtattgagcaatggaatagaatttttattagacaaattttggttacttcaagtaccatttggatatggatggataatgtttagatatgtatgtatgcatgcatgcatgcncatatacaatcgtgtatctgtagacacacaaacaataaaaattgccacagggccataggaaatatacatttgaaaaagaagtaattttgtatagtgtgataagtagaattgtccctagtaggacttagtgaacctcctgtagggtttcttccttacgtctacggcatcatcagagggtgtcaaaaagaagtaattttgtgtagtgtggtaagtagaactgtccctagtaggacttagtgaacctcccatagggtttcttccttacgtctacggcatcatcagagggcgyccaaggttgcattttgtttttaaaaataaatctctattgaagtaatacattgtggaaaagattgtgacctaatatgcaatcaaattctttaataaattggctattattcatgtcttaaaggcaattccattgttttcagtttaatgctggcaatttaaagtgtgttttccaaattttgtcagtttttttcctttaatgtttgttatagaagatagagatgttatgttggtatgctttataatataatagaaactttaacatggactctgtgtgtgtgtatgtgtatatgtgtgtgtgtrtgtgtatatatatgtatataggtatatatatgtatatatatgtatatatgtgtatatatatgtgtgtgtatatatatatgcatgtgtgtatatgtatatccttgggtctttagggaacacccagcctctttaatcagtagatagcagtcaaggggaagarcagaaccttgttaacctgtgcattctggaaggggatgagcatcccaggtgttagtatctcctggcccccaggagaaacaaacagtgactgtctcaggaggaagccgtcatttgcgttgatgtcctctggtctccagcaaattaaggttactaaacatgaactctcactaaatgcacaaggaaagaaaccaccatcagtcaaagtcagcataaataacaagtaataartaagtccccccaaaacttcagatactggaattatctaattcagaatataaaattacaaaaacatgtgtaaataaagatgtcaaatcagaaaaaataagcaagcaagaacagaatgtaaaaatgcccaggcaggtttgaaaaagaaccaaagagaactttggatgtgccaaaaaagaaagagagagagagagaagagaagaggagaggagaggagagaggaggggaggggaggggaggggaggggaggaaagaagggaggaaggaagggaagaaggaagggttaaatggccgacttagattagattgctgaaggacaattagatggctatacggaaattaacccagactattacagataagagcaaagagatgaaaattaccaaaaaaaagaaattaagagagtagaaagtaaaagtagtagtctaatatcctttcccagaagaaaatagagtgaaaagaggcaatatctaaagagatagttgctgagaaatttctagacttgattaaagagtcacagatgcaggaagcaccatggaccccaagcagaaagccatgcgtagacacattggagtgaaaccccagaataccaaagaaaacaggaatatctttacattaacaggagaaaaaaagacattacattacctacaaaggaatgacaattagaccggaaacacacttcttcctagcagaaactgcaaaccagaagacagtgggaaaatactgtcagcatggaagagaagataattttcaaccttgaactgtgcacttagcaaaacttctttcaaatacgagctagttaatttttccacattaagggaacttctaaaaatgcattttaagaagggaatttatgccacaagaaagatgcaagaaagaatgatgacaaaggaaattggtagacacaggaattcacacagaattttcagtctgaaattataagaagatgtatattcccctgaagaaggagacccagggagctatttaaattaactgaggaaaacttgcagagctgaaacagaggggaaacttactttatcacctctaaattaatcttctacaaatggagaccctatttggctattatgctcacgaaaggaatgtagttacccttaaaatgatgtttaagtgaggaaacaatgcccctctcatgttttatcatgtatttcaagtatccccctttttttttcttttaaattagtagagaaggggtcttgctatgttgcccaggctgatctcaaactcctcgtctgaagtgatcctcccacctcccaatgtgctgggattataggcatgagccaccgcacctagcctcaaatattctaaaccttcgttcttatagtgggttgggtggtagcccccagaaagatatgtccrcatcctaatatctgaacctgttgatgtgaccttatttggaaatgaggtctttgcagttataattagttaaggatcttgagatgaagggatcatcctggattaccaaggtgggccctaaatctaatgacaagtgtccacataataaaaagaagagccagagacatagacacacattggagaaagcactattcatatggtgtgaatatgggggcagagattggaccacaagccaaggaatgccatcacatgctgagacagcatcagggttctcctgtagatattctcraaggagcatggccctgttggatattaaccttcaagcctccagagctgtgagacaggaaattttggttgttcgaagccacccagtgtgtgggagtttgttatggcagccctaggaactaatatagtccttaacagttaatttatacttgtttttcaaaaacagcaaattaaaatttaaaagaaagttcagtgtctgctattaatgtaacagaatgttgaagcttttttctaggcgtgctttcttttcttgtttctgttcaggatggcatctacctacagtcatgcgtcacggaaccacagggatttgttctgagaaatgcatcattaggcagtgtcattgtgtgacggttgtagacgtagagtgttccacaagcctggatggtatatcttcctgcacacctatcgctgctaggctacaaactgggacagcagattactgaacactgtaggcagttgcaacacaatgtgtattggtgtatctaaacatagaaaaggtaaagtaaaaataccatataaaggacaaaagatatgcctgtattgggcagctctattgtaatttttttttttttttttttgagacagagtctcactctgtcattcaggctggattgcagtggggtgatctcagctcactgcaacctccacctcccaggttcaaatgattttcgtgcctcagcctcctgagtagctaggattatatgctcgcaccaccacacctggctaatttttgtwtttttagtagagatgaggttttaccacgttggccaggctggtctcaaactcctgacctcagttgatctgcccacctcagcctcccaaagtgttgggattacaggcgtgagccactgtgcctggcctctattgtaatcttacgggaccattgtcatataagcggtccatgcttgacctaaacgttgtggtgtggcgtgtggtgctatatgggacgtagatgtggcttatttgacctagtgttggaaaaggggcaggtggtgtcttcaggtgtttgtggtacattctgaatgcctcctggtctcagctgatgacttgctggtctgagctattattcccttgccttgtggccacagaggaggtgggattagtcccacttctggctgtgcctggtgtctgctgctggtaaaattcacaggcttcactttccctaggttcatggaaggagtgagctttactcttaagtagtcttagccttcaagtctcaatgcaccatttcagcgactgccttagggtccatgcaggcctgctggccctcttgccactgctcacattgagccttgcttcactgcttcctgtagcatgatattttattcttagtgtggattgtgatcccattttattggtaagagaactgagaaattaaaacacttgcttaagataatagcactgacaaaagtagcaagcagaattatgcataactaacatagtgtgttagacacggttctagtaatctaccctgaaaattttgtcctttgtcacagatagatattaaagctgaacctgtttccagggcatgagatggccttccattttcacttccagcccagactcctcagtgcccacccatgatctgtgctctggagatcccccttcacctggggattttctttsatttctttgaggctcagctttgtatttaacaaaataggaatagtaatattttacccagcatatactggtttttaatgtggcagtttttgttgtctactgcattgcgtgaacagaagttctgttctcattctatcaatgctggcaaaactcattatctcaatccaacgagtgtttaggctaaaaaccttattagttgttctcggtcttatggatatacttttacttgcatactctctttcctaggttaatgagttaatattgaaagccaaagtcattcaagaaatgtttattattgcttcctgtgtaggcccacatgcctggctgtttattttgatttttcctcaatctcagactttcaaaatcagagaattaagagatgtagtcatctattaataaaagaactaagaaatcttaactttccattgagacttaattgtagataccattaacattgtaatgtaatcattataataatgtctaacagttactgagtacttactgataaccagaaaacctrgattttctcctttaaacatcaaagcttttaggtactattactatccttattttacaaacaaggacatagtgatgttcttacatttctgtaagaaatgccatttaacctacattagtgtacccagtgatttggcatggcaaatgttaatatgcaagtagtacacagaggagactatgacttcagagtggttaaatggtttgtgtaagatatcacagctggttactaacagagctggctttccctccattcattgagctaacttttcttagtcctctttctaacgagaatcttatagtttaaggctttataaatcaagtatgtatttaagttaattataggggttccattatccacatgtgctataataattcacaaacacttaggtcatctcatcgcagaagagattcctcctgcattgcactgtggcttagcaaaacagcacaaggctagaaagccagtgagacaggcctgggtccggctyggctacttgtcctgactcaggacaggtgtgcagcctctgtgcgtttctctttcttcacctctcacttgggatagtctcagccctcatgttctatgcttttatatagtttcttccttaaaagagcattcttctgtaacatggagtaaaaatgaggagagcaaatttaaaaaaaaaatcattttaagcctttcttgagaattaagtagtaaaacatgtggttacaaaaatgtttaaaattaatccaaaactttttcttgaaatcaagaaaacaattgtatttataataaaataaaaaagaataaagkgtttaggaacaaatttagcagaagtgtaaaaattattctctgaaaactattaaacattgttgaaagaaattttaaaagaccaaaataaaggagaaagacatcctatattcatgtatcggaaggcacaataatgttagcatgggcatagcctccattttgatctacagattcaacatgatccctttcagaatccctgttggtgtttttgcagaaatcaacaagctgatcctaaagttcatatggaaattcaagggacagagaatagctaaaataaccttaaaaaagaacaaagttggagaactcatacttcctaatttttaaacttgccacagagctacagtaaccaggactgtgtggtactgtcataaggatagacatagagtaagtacatcaatgaaatcgaattgaaagtcagaaattgtctcccacatttttcattaattaattgatttttgaggaaaatgctattgaatgggaaaaataacctttctaacaaataatactgagacagctggatgtcaacatgcaaatgaatgaagttagaccctttcatcacaccatatataaaaatttactaaaaattgatcaaaaattcaaatgtaagaagaaaaacyataaaactcataaaaatatataggaataaatcttcatgaccttggattaacgaagccttctcgaatatgacaccaaargcatctgccacacaagcgaatgtagacaaattggacttcatcaaaattaaaagataaaaaagcttttatgcttcagagagcacaaccaagaaagtgaaaagtcagcctacagaatgagagaaaatctttgcaaattatatagctgataagggacttggatccagaatgtataaagaattcttacaactctataataaaaagataagtaatccgatttaaaaatggacaaaggatctgaatagacatgtctccaaaattgatatacaagtggccagtaggcacatgaaaaggtagttgcttcatatgattagttattgagaaggacacatcggaaccacaataagataccactcggtgccaactagcatgactacagtttaacagaccataacaagtactggggagaatgggaagaaatcagagccctgttaccctgctggtgggaatgtaaagtggtgcagccacattggaaaagtctacagttcctcaattggtaaaacagagttctcatatgacccagcaattccacccctaggtatatacctaaaagaaattaaagcatacgttcacaaaaaggcatgaacgctcatggtagcattattcacaaaaggcaaaggatggaggcaccacagatagtcatctcgtggacggttaaataaaatttggtatatacatataatagaatattatttggccataaaaaaggaacaatgtactgattcaagctacagtatggatgaaccttgaaaatgttatgctaactaaaagaaaccagaaacaaagaccagacattaatataattccatttataggaagtgtccagaataggcaaatctagagataaaaggtagattatctgtatgccagggctagggtactaggagaaaactggtgagtgactgctaaatgatacagggtttctttttgggatgatgaaagtgttctgaaattgattgtgatgatggttgtacatttctatgaatataagaaaagccattgaagcatatgctttaaatgaatgaattgtatgctatgtgaattatatctcaaaatagctgttctaaataatagttaaaattacattttgagcgggcgcggtggctcatgcctgtaatcccagtgctttcggaggccaaggcaggtggatcacgaggtcaggagatcgagaccatcctgactaacacggtgaaaccccgtctctactaaaaaatacaaaaaattagctgggcgtggtgacgggcacctgtagtcccagcttttcgggaggctgaggcaggagaatggcgtgaacccgggaggcggagcttgcagtgagccgagatcgcgccactgcactccagcctgggtgacagagtgagactccatctcaaaaaaaaaaaaaaaaaagaattagaaattatagttaattttggctagttatccaagataactttaggaaccagataagaaaagatccacctttctagcacgacatgaaagttctggtaatataagaacttggtagtcatatagctctcgatttgaatgctgttttagaatagttaatttatatagcttccctgaatctcagcttcttcatgtacaaaatgggggtaatattagcacatgggttgctcggaaaattaaatgagttaccccatctaaagagctcagcacagtgctatcagcgatagccctcattggaggtgccataaccatcataaggttgtggtaagagttggaagagaaaggcccttcctcatctttgcaagtgccgttcctcctgcctggagtaccaccctgtctcacagcttgatgagtcccttcatgacctcactggtagactccattcaagctccatttctggtaggcatttctcacgtgcgttgcgcctggcagccatgctacaaccccaaaggctttccccccttgcagacctggcattttactaggttcagcactggtttattggcccacctgaccctctctgtgatacctgagagcaggggctgctgcttctctcccagatccccagtgcctagctcagtgcttagtgattggtgggtgcgtagtcaacactgggtaaaagaatcaataaattgtatgaatagggtcaaatacttccattggactcccaaacattactttactggtaaacaggttaatctgaaatgttttatgttggaatcttcatttaatagtttgccatcattggtttcttagtatactttgagaaaatagtatagtcctgacattgaaataatgataaacatcaaaaaacctaaatttaattcttacaagtcaatagaaaaatttttaaaattactaattagccactaattacttactggctaataagtagtttttcatttcgaaaggcacttttttttgaaggacctctatgtgctatataaacctctgtggaaagttgaaactttgtatttcttaacataccatctgaattgacaaggggaattgaaaatttggatttccacggtagtcccattgtatttcttaatgataatggtgtaggtataaatgtacgtatcaagtttgtggagtaagtgaatctggtgtatgtttgaacttgcgctaagccacgttcttgccaaaatttggaaaacctatttagaaatattccccttatccctgtgccagctctccagaagccaaacactttgatcataatatttgcctccctgcttcatctgcaaaagaacatagttaaagtcattggtatgtgataaatcatgatattcacatatctaaactgtatgaawccattattaactagctaatatgagtattattaccttgagaatttggtattaaatggtgttttctcataaccttacctagataacaaggtaaaactgtctcagaagtgccttttaactttgtgatctttgaaaaagcagatagagttttcattaaagaccagagaacattaaaacaatttcagtgctttcatcaagatatggcccctttcaaccaatcatttcaaaatattacacaaaatttaggagccctttctgtaaataacactgaaatgaatttggaaagtggcattgccttaagtatagtacagagaaacttttgcccaggggccatatcatatcatttggatggctgtgcaggtttctaaataagagccatcaccacttattttgttaagagaaaggcagcctaaataaattcctttcttgtttcctttaactagttaccctgtgaactaagctatgtttctttctctccccatgagtcccaaagtagctttattaataggaatatatgatgtttgtgttcttaaaaaaaatcagggtggtcttagatgtctgtcgtccattctggcatttccctttatacaacccttttgaattttctgtttaaaaactggcattccaacagcttttctttggcctaatgcctgggttgcatattgaagcaacaaattaggaatgttaagatgtcccccaaagaaaaacgtttgttctgaaagtagagctgatgtgacacatggaattagggcttcttaacttgtctaaatgacagttaatgatcttttctctttttcttttcttttattgttttaacagggtggctgggagtgtagaatgaaagaaatgcccagaggccgaaatcgggtttggttcaccaaactgttaaatgtgtcaagtgcacttgactgatactacatcttttgcctctttttaggagctaatttcgttactcgaaaaattagccggtcagtagctaagatttaccttggacaactggaatgtttcagtttgggaaatctggatgccaaacgagattggggccatgccaaggactatgtggaggtaggaactgacacattacattcttgaaaatacccgtwtccattgatattctaaatgccaagcgtacagtgaaaaagtgtgacctagaggtgggggcatacaaacctttgccaaggcaggtatgtttacactcatgctgctttcacttcagggatcagtcgttcagggattggtggttcagacgtacaggtagcttacactgaatggtacttgaatgaggaaaactttcacaaatactcttccaattatttgtgctggatgatggatagatagatggaaaaagtgtttgaatggtgctcctctttattttgggggtataaaagtactagttctcagatcttctagaaatactgcctcatttcaatgtatataattcaagattcttggacttacattattctactaagtcccgccaagagtaatattcttatggaactctgctttctgctgctgaagagtctggttattacatcacacacttcttaacatgttatattgcatgtcgttgagctttacctattaaagagagatagagaaagatgttaataatgattctattgtgaaataatggatattgttaaagggaaattcagattttcattcttggcattcctagacatgctgttttgggtttgcatatattacatacgcaagtagtatgatttttcttttataaacaaatggttaccttttactttgccctgatctccctgcttttaaatatccatgttggttctgtgktcagacatgagcaagcatggtagagacattgtcctttccctggagtagcctgtccttgttcaagtgctcacagatttcctgtgctcatgagcctatttctgtcctgaatgatgtctctctaggaaactggacccagctttcttgttcatttatgcaattcaaaaagaaactttaatgcctacaaaagaaagcaaacaattagtttgtttgctagtgcagagatgaggctcacctgccatcttgtttttggtcataacaataaaaaatgtgtgtgtgtttgaacagctaatactgatttctgttatgcacaaaataattagctttgactttagattttgaayagtgcaacatttagatctatttatttatttatttatttatttatttatttatttttgagacagagtctctctctgttgctcaggctagagtgcagtggcatgatttcgcctcactacracctcggcctcccaggttcaagcgattctcctgcctcagcctcctgcgtaggtgggactataggcatgcgccaccacacccgactaatttttgtttttttagcagagatggggtttcaccattttgaccaggcgggtctcaaactcctgacctcaggtgatccacccgccttagcctcccaaagtgctgggattacagggatgagccaccgtgcccagcctaaatcttttaaatatgtgcttctaagctataattacaaagaagcattttatgacattaatccttagatttattttcagaacatcacatcaaaaaatatataggttcacgcttagaaattatgagaaagtagatactggcaagagaagccaaaactttcttttgtctaacctaaatgaccttacctactgaaaaatatgaggcttgttatgtaaaaatacattattttctcaataatatctatttattgtttagccttctagccatcagcatctgcatagagctacatagtaagctataggtattcttttttttttttttcttaaggcagagtctcgctctgttgccagtctggaatgcagtggcacaatcttggctcactgcaacctctgcctcccgggttcaagcgattctcctgcctcagactcatgagtagctgggactacaggcgcgtaccacgacgcccagctaatttttatatttttagtagagacggggtttcactgtgttgaccaggatggtctccatctgttgacctcatgatccacccaccttggcctcccaaagtgcygggattacaggcttgagccactgcacctggccctatataggtattatttatccaaactcttctccaagttcaaggaaccaaatcgattaaatttcattcaattttattattttgcacgtaggtgaaaaaggattcggaaatctaatagattttgatagtgagggaaacagtataccataatgttgatagtgctttttacaggttgtgtttattttcttctttatactgtctttattttccatagattttaaatgaacatgtgtaaacctttgtaattggccggggtaggaggtgacatttcagaaacaggccaaaaagtctcatgaaaatgaatgagagtgttaagtaagtaaggaggaagtcttgtgtcaacgagtagatctgaaagaaggacgctgctgtcatctcacttcccaaatgccaagctagckccrctgtgagtgtagtccacatctgggcacaacacttcccaaatgccaagctagcgctgctgcgagtgtagtccacatctgggcacaacaggcccacgtttgaattagcataaaataaaaatattttatatacattttggctccagtaggggttggtgcaaaaaggtcgtgttcagtgaagtcatttatgattgtttgacaaggcggtgtcattacagcctttcacaagccagcatgtgcacacagcacgctaccctctgagtaaaaacacagcaacacgctaccctctgaataaaaatacaccaacacgctaccctctgaataaaaatacaccaacacgctaccctccgaataaaaatacaccaacacgctaccctctgaataaaaatacaccaacacgctaccctccgaataaaaatacaccaacacgctaccctctgaataaaaatacaccaacacgctaccctctgaataaaaatacatcaacacgctaccctctgaataaaaatacaccaacacgctaccctctgaataaaaatacatcaacacgctaccctctgaataaaaatacaccaacacgctaccctctgaataaaaatacaccaacacgctaccctctgaataaaaatacatcaacacgctaccctctgaataaaaatacatcaacacgctaccctctgaataaaaatttgaaatggtcagattccatggagagacagatagaaagttaggtcattctccttgccatccaagccttgatttgttctataatacaagtgggtcttgtgtattaaggactctcctgggtttctaatatgttgatgatgtaggaagcattttatagttctcatttatgtgttctgaacaaagtctaaattacgtttattcagtaagaatttatagcttggtaccctccrttttaagaaatatgatcattccttgcaattttaagtgtattaacataagattacttcagagatttatgactaaaggtaaatttgttgccaaaattaaagtcagcaatcataaaaatgaaaaaggagaggtattgtttgtttaaaacacacatgcaccctgacactgaaatcaactttagaataaagaagtgtttgcaaatgtaggtcaaacaagtcataataccatctcatttacacacacgttttaattatacagctgaaatgggaaaggttcccttatccccctcgcagagcgtgtgatggtggtatgggttgcttcctcrgtgccccactgctcagacctcttggaggagcatgcagatgggcaggttgtggggctcaaccccacagcagtatctaggggtgaatgtttacagctgaagcctctgtgygcatgtgttacagggtgctctttcagtttagccatccataggtggcttgtgttagctcagttagacccctttccttatctccaggacagagggctttctgtatcctgaggttcttgctttggtatactggaagaatcagatcacacgtgggcttggagaatgagtgcaaggttttattgagtggaagtagctctcagcagatgggggaaccagaagagagatggtgtgggaaggtggttttcccctggagtcgggtctctcagtggctggagctctcctctctccgccccagccaaactcggcatagttccacccgtctgtggcctgccggtgtgctggtgcctgttggtatgctctcgacattctctcaatatccagctgctggtgtgttcctcttgatgttcagctgcttgtgtcttggggtttttataggcacagcatgggggtgtggtgggccagggtggtcttgggaaatgcagcatttgggcgtgaaggcaggagtgcctgtcctcacctagtccgtgggcataggcctgggggtggagccctcaccagggacctgcccttctcctcccggcacttccctgcccctcttccgtatcacaacctctctcttttatatgcaaaaattttagtaaaccttcagatgaagtgactgacacttttttacttgtcagtgaatttccatcatgaagagcagagagcattttctcctcgtgttgtgaggtgggtgctggttatccctgctgtgcaagtacattgtttctcagcttagacaagctgttttatcttgatttttccatctgtgtaaaggacagaatataaaccctgtaaaaaattagcatcagtgtgctatacatacatacatgaataaagtttacctctgacttgtaaaaattttcacaatgatttataaaaagtccttacttgttgctgattccaatttattttcatccatctgtagtcttgcttcctagatcaagatgttttcaaagttatttaaatgagtgagaagtatttcaacttgaagaaaaaaatatatacagctatattaaattatattgtacttctgaataaagtcataggcagttagatctcttccagtattttattataaaactttttaaacatacagaataactgaataaattttacctcaaacacctgcgtaccacccagattctgtaattaatgtctacaattactgttgcattttgaacaaaaattagtatttaagtaattactgtagtgctaatggcttacagctacaaatattcaatttgcacaaacacaagctactaaaaatttgcattttatggggtatagatagcagttcaaacwtttttttttttgagacggagtctcgccgtcgcccgggctggagtgcagtggtgcgatttcggccagttcaaacttttaaaatatttttatcttaagtatttacctgacccctctacaacctgcttttatgcccacctctctccatataggctcaagcagcttcacgagaacactctagtggcaatgcgccattttcaaccaatgtccagcagtcaggattatagcagtggtggcagaaaacactaagggagagaacctctgacttctcagggtggcactgttcattcaacatgtattctattgagttcctgccatggtcacagttctggttgctacaaatggcagtatatggtcccaatgagatcccactttgatataaatatgtgaaacacaactatagccagaacatattgactgataagctaaatggtaggagctgggccagagtatcttcaggcttttaccacccacaaaaaaggccccttgctcttgggagacagggttaatcaagagacctaagtccagcctctttccaggactcagtaaaagccatgtataaagtggcaagaggttttcctgctacagctaatcccacagatgctccagaagggtcctactggtaacccagaggacgtgaggatcgttaggggtgagcgttgaaattcatcagaatttaacgtcatatacctgcatccttttttgtgtggaggtggcaggggacagtgagcacagactgaatcataacaaaactacttttagaaataaacgtaattgccaaatgttaagcacttattatatgccagaaacttttgaagacttcttataggttttaaatgtaagaaagagtctggctgagacagctgtcagatcttgccgaacctatgctattggctgtatcaggtaaagaagtaaagggtgtgtttggggaaaatatgtagtcaggtctccagccccctctatcccttgtcctctgaatgaatttaccttcattccagctctcagttctcagctaatacagagacctggggaaggtgaggagcctctggaagggtacataggttacagacagagctgggagaactgcccactgctgcccagtcctttctttcctatctgtccatcttctactagcattttgtatcctatgttacacaaatctggaaggaagagacgtcatttaaactttgagatcttatttaagggaagtttgcttgttgcaacatcaccattgatgtcggatttttcacgaccctttcactggacttgtgacagggtgctccgtttacttggcccaccatgctcaaccgcttgtaggagggagcgcgtgagtgagcgagtgcgggatccggctggctgctgctctgtgcgctggcaggaacaagctccatttactcagcctgctgcgctcaaccccttgtgggagggagcacgtgagagagcaagaccagctgctctggtcaccagcaggagcaatcttcgtgtgagtgttgctgtggtacacaggtgggggtgcctgtgaccctgaagccccagagggtgtgttacagtgctctcttagctctgccgtctgtggacagcagtgtgttatcaactcggttggtcctttgcctcgtcacgtggagcagctgccctctgccagcgaaggcaaagggccagtgtgacagctttttttgggtacccgcactcagtgggtcctgagctcttgttgggagtccaagaagaatgaggtagtgtggacacttgaaggatggtgaaggtggatgtattagtccgttctcatgctgctgataaagacatactggagactgggtrtttataaagacaaagargtttaatggactcacagttccacgtggctggggaggcctcacagtcatggtggaaggcgaaaggcacgtcttacatggcagcagggaagagagagaatgagagccaagtgaaaggggttccccttttaaagccaacagctcttgtgagacttactaccatgagaacaggatgggggaaccgcccccatgattcagttatctcccaccaggtccctcccacaacacgtgggaattatgggagctacaattcaagatgagatttgaaaggggacgcagctgaactgtattagtggaggattttatttagcaacggaaatggctctcagcagagacgggagctagctgtagatgggacgggacaagtcttcccctgacgtccagccggctcttccctgagtcaagccatctctcttccaaagtccagctgctctctgaagtcaagttttccctctccagtcaaaccacgtttctctcttctactgactgagtctggggtctttataggcagaggatggggtacaggacgggcyatcggtagttttgaaaaaggcaacatttgatgggcaaaaaggcattattccgaargaaccattcaggagagagtgggcaaacaggagtagagttgtcgccttgggccgtgagtttcaggctttttggtttgaaggtggagcttcaccagggacctgcccctgtctgcctcctgcctctgtcaccatcagtagaccatgtttgttcatatgcaggagagtagcatatagcagtagtatctttttgtgtttccattgtctaaagtgttagtggtgcctgaatccatttgttagtaaggccttacttaacagaaagcaacggtgaggttgtatctgtctcataaagtgacagtggtctggaaaaaccagggatctgctgagagctctctatcttaacaacatcgttcctgtcttcctagcagaggggaaggcattgtgtaactacgtgcagaggatatttacctggggagtttcctagaaaacctattctattagaatctttgtcaagtgactgtttgttaggtaataaggtcagcaattgaatttctactcactgtgggagtctaattccatattattacttaggagcctaaggtgttctttcttggaagggaaatatgtcagtggcctcctcactgaatgtgttgtaatactcatcgattttttattttgactttttatattgattagtgaggtattgctattgttttccattgtgggaaaaaatcttctagccttctgtggagctatttaatatactstctttgaaaaatattccaagaaatacaaatgaaaataactaaataaatagtctctcctttatctgtatttagaagaacgtggtttctgtgttgtttctaacaaaccaawcatttaagaaaggcaattcaagggccttgattaataaagaaaaaagaacagctttatttataggaaaagaaaagcttgtaacagtttcctgcatctttgaaacataaaatgtttagattaagcaaamaaccattttcctgatctggctatggaaaactctgtataacaaattcagcttgccatttctctttttttctcttcttcatcctgtgcagtaaacttttcagtgtattatttaaaataagttaagaaaaatgtagaaaatcaattgcctgttttatctggctaggtcttgcttgattggaatgacatcccagaagctgctgtgtccccaaataagaacctgtagagcccgttttaaattgttgtttaatgaaagacacctgtatcacccatatttctagtatgaattgagttttcatttacagatagtttagaaacatgagactgggtgcattcttagatcacattttcagtttgatttaaaccacataaaattgagcatatgtcattaaatcagaaaagcagttrttggccagggtatgtatggagagaggatgcaaatgcatagagaataaagttgcatgttcatataaaatgggttaggtatagtgcctgtggacgtggattatgagggttatgaaacttcatgtaagtgctgcttaagttctaatgggtagcaattaaccacattaagatggaagcttgtactccaccctttagtcacgctcattgatgtgaagggtcattataccattgcagatcatgaagtgacccattgtacttaagaaagtcatggtgctagtcttgagagcaaaactcctaggaaaatagtgtragaaaattcttacactaaagaactgttcacacttaggttagctattcactttcacacttaccaagtccatgagattccttgagctttctcagtccaccccagcctgttctgcccttcctctttccctgccctgctccccacctgtctcttctttcactgacgtctcccacttttttgtgacttctgtgaaagtctggaaaatctgaaaatatgaactaaactgactgtttaattttaataacargactgtccacaggaaatagatgtaaatatctctcacaagatgtgacatcatctaaatttagtgatgattttgcttatatcttcaatattcmgtgcttcatctttatactcatgcactctggagagggcaaaacgtatttgcaatcaaggcagtcttttgcacacataccatacgttaatcactctatctctcttgctctgtctctttcctatacacacacaagctagaagtcaaatctctgtttttgaatgcatgctaaagtactgtttggctttatcctacttattagcacctttattgcaggaaataattgactaaaattacatgttttgtctttgcagagctctggtggagaagcctgggggctctgctctgtccttttttgggccacctgaatgcccaagcccaagctccaggttcccaggctcatcctcaggggaccctctaatacaagcatgttaatcttgcctttgtatccaaagacacaaaacaaaaccttttttaagttgaatgttcccgaaagcaaagaaacacattttattttcagccccgttcacttcatgctggaaaacatctcttctgcttattccgtgggaaggaattatagcagtaatgccacaaagattctccttatcctttttctcaggtaaagaagaaagttcaatcctctctgtgagtgttgggtcatttgtatctgttatttcmgttttctacctgttgacttcaatacagctgggataattgatggctttgtagtgctgatttgatcctgaaatccctgtgactctgattgatggcccagggcatcaacggtaagacctggcaacacggaatggatactgtaggaaatgggccagatctcgtgtaagaataagatgtttaacactgacttgctggagaaataagtttaatataggctggggacttggttccatgtgcttctactctatgccttattgaaggtgaagaatattcaaaagccattgtactcttgggatcaaatttccagaggatttttgacttgttagagttgcttcagaaactatgctgcatatgccccaaacasataaatttgaggtatagttaagtgaaagtctccttttccttttagaagagaaaaacaattggacttctactagggccagttagttacaggtacagtttacagaagccgaattatgtaaaggcaaaattgagaaatcctttgagaaattgtctttacattgttggcctaagcctcatatggaaattattagtagagttctcaaagaaagggatgaaattactccataggatagcttccctaagtacctctcagagttatgtaaaatatttgagatcacttttaccattttttctcatagagagaatggttgggctctcactatagagagaaaagtgagggagacctctgaggagcagtcaggactttgttagctatctcatgtcggtctctcttggggaagctccttgaaggcaggacctggatcctatccctctttatctttaatcatccctcccaacatgcctggcacataacagatgcccagtaaatacctgaattggatctccctgcccatcatttctttataaaattataaaaatgaaatctgtatatatgaaatgtgttccatttctcttactattaaaagatgctttctttagctagcacaagacattgcccccagaatatgatcttaccacacttaggttgagttgtgctagatttacttgatatcagcaaaatgtttgcaagcacctttctttctggttgagtgcagatcataaatgaaaggaagtaacgtctatatgttctcacacagtggccagtttcctgattatctctagattctactattattagactttattcctagctttatttttacttttgatttacttatttattttgaggtaggtctcactctgtcacccatactggagtgcagtggcatgattttggctcactgcagccttgatctcccaggctcaagtgatcctcccacctcagcctcctgagtagctgggactacaggcatgtaccaccatgcccggctgaatttttttttctttttagtagagatgaggcctccctatgttgcccaggctggtcttgaactccrgagctcaaatgatctgtccacctcggccccccaaaggactggattataggtatgagccaccatgcccggccttattcttatttttaaaggaagaatatctgagcagatagaaaaatggaaaggcagaaggataaactggccctgttttacaaaataatatttaaaaatcactaatataccattagcttataagaccargtacccatgggagtacttgatgatattgacatcagctcattcagaaacctttttgtgtgatcatcactctatttcctctcagttttcaaggatctcatttgttagaggattcttctagagagccagagttccaaggagggctctattattatggaaaaccgtcacactctcccatcccttctcttctcccctctctatcctctctctcagtctgtacccatcaccaacacatgcaaattagaagcaggtcatgttgtaataataggactttatttttaaatacatatagaatttaaagattcttatgtakttatttgacagtggctctgggaatatctgtggaaacagtgcagtaagaagaaaagaaaagccttctgcagtaccattttctgtccctcgtgagtgtgatttcatttcctccctggtcgcacatcacccacatgctcagaygacatatccctgttcttgggtccgtcctccagcttctgactcacagagcagagcgatagtctgtgggtgcctgtgttggagggtacaggttgcattccaggaaggtgactcggctggcatcctgcctctcggggcattctgtcaccaagtccacaggatacagataccccattcaaggtagcagagctgcgcctactttgtctcaacagaaaaaggcagagatgaggatttcaagggctgcatagtttcatgtgctttttcttacagtgtgtcctttagtcaagaattacttgctggttttgcctgggtctcaaatttcaagtttgaaaataaaatataaagatctatcactagaacttattttaaaccctggaagattgtcctattctattcctgtagtgctttgtcatttacatctttgtatttgattctyccaacacatatttgaccatggttaggagagcacggattgttttttgtcattttcataggaaaaggctgacattgaaaggagaaacccttgtttgatgtcttctcttggtatcaggcagtgggttccagccctgctctgccaactcctcagtgcagtgacttaccatgatactgtgccatgtttctgggctgatttttggtatatttagtcattcttgtgagatttttaaagtcatttttttttagtgacttcaagtgttgattgtgtagcaaacgtattcctctcgctaggtattacatataaactagcatctctactgctggcctaatacctctaatcatcctgtgaaaccactccagtgtgaggaactgagtgtgaaggaaactgtagaacatctgaggagccacatgtgaaaaggccagtccctgtgtcctaaacagacttcctctacattaagcagtcctttaatagttgtacaatcatataatttgaagaagatatccattctgtacaggaaatacaagtttaacagaagtcgtttcatttgatccttatcttcaaaaaaaaaaaaacctgaagaagcttgaagacgtggcatgggtggtttagattccattgccttttgtcagtggcagtagaagcctcattgtagttaagcatctgcctgggcctctgggaaaacaaagcatcattaactggctggctaatgagtcatctattaaaattatccctaatgaattgtgggtttgcttgtttaattgcgcgtggtattgtgctctcaaatgttagcagtccagtggggctcaaagaaattacactggctttattgagcatttcagtaggattcttcctaagtcactgtgccacgattggctctctctctttctctccctccctttttcgtctctctctctttctttcactctcctttccctctgttcatccctacctctctttttccctcttccctttccctcctttcccttcccctcccttcagctcatctcctctctctctccctttctttcacagattgtggggtaggaatacaatatgaaaactcttactttggagaatctgcgctaatggcatcttgagtatgaacagccccccacccccgcacgtgaagggttgatagagcctggtgagcagctggcagacgccccattttccttcagctgcaccctcacgtttcatcagcgctggtcactgtgggcgtgctaccttgtaactaggtggctgctggtcttcctttccctacagccatgttgtcagtctagaatggggtagcaaaaacatcataggaataaagggctaaactacgtaaaaaccatgattgtatattgaaaaatgcttaatgacagtttttacaccagtaagaatgccaagatcttcaggtacagcttagcttccacctgcgaagcctgcgtgagcagtggctgggcgggacatgtctgaatggtgaaggtgttgccacctcccaatatggccctttctttatgaacagctctaatggtcagttgttattttaaagtcaaagccttccttgagcctgaaaccatgaattaaaatatccagttagtctttattttcaagttcaaaaccttattgcgtactgaaaatgcatgaactactggacacttttacaagcttactttcacaggagtctggtaagatacgtgctattctcatatttttctcactagagggaaaacataaggcatagagagagaggcttgctgagtctggcccagatcaggcgcgttcattcggccgacccttgtgctggctgtaccctgcactgtgatgctctctctgcctcccacatggctgccagagtcgcctttctgagatacagatactgtcatatttcaacttaaaaccatcactgtctccaccatggaataaaggccgctgtctggagcatgcattctcrgccttgggcagggccccagcgtcctcctccggagctgggagctgctggccctgcaccgtgccggccctgggctgcccctgctgcttgcccttggagtcctgccctgctcaggctcagcactcagctgcctctgcagatgccctcctcaggggccctactctcctggccacttcactgaagaattggccatttcccgccttgtctgcaatgctttattctcagccctgtgagccyctgccagggcctggctgacaatgcttgcatctggcccctagcatctctcacagcgtcttgaaccccggtgctcaactgcctgagattgaactcagtcaaaccaactcagcctcaaatccaagtgtccagcttctttatgggaaaagcaaaaccastggttctgtggggacacatattctctgcagatacagtggatggttcgaggtctaagggcatgcgaggcctccgtgctgctctccctttagtggatgccagccacctgctgtagctggagcccagggtgggcaatggctggccactgcctgacttgcagacctcccaaggtatcctcaccatcccaaggtcatgacaacctcgcacacttctgcccaggcctaagcaggagggggkcctgtgtgggagagagggcctagcacctcactcatcagagctgtgtacatgaccacactgctgtgcttcagggaggcccagtggctggatgttgagctttgcagacaccagtcaagaatgatgggtagttgggcgcgacaggagaggattcagaatttgccatccaaagccctgtgagacacaagactaaggcccagtgcctggtgcagttctgcctttgacattgtgaggggcgcaccttgggaacttggagcacagggatcttccctggaaatagtctcaggtgtcacttgtcaccctgcattgggacttcatgagactgtgaataactacagtaaaccagatgtgcaagaagccagagtctaggttatagttacttcagactctgtatttaaagattctctcttttttttcttttttttttttttgagacagagtcttgctctgttgcccaggctggagtgcagtggtgcgatctcggctcactttaagctccacctcctgggttcacgccattctcctcaactggaggattctacgcctcccaagtagctgggaatgcaggcgcccaccaccacgccaggctaactttttgtatttttagtagagatggggtttcaccgtgttagccaggatggtcttaatctcctgacctcatgataccccggcctcagcctcccaaagtgctgggattacaggcgtgagccaccgcgcctagcccaaaagttctcttaattaaaaaaaaaaaaaaaaaaaaaaaaaacaaacaaaaaacgctttcatgataattgacacacgttctatgtaacacaaatcatatgctggcttttggctcccacagtttagcagcagtgcctaaatgggattgctagtagcatttctcccatcagcagaaagatctataggatggatatactgtattattttttcctttccccccgtacatccactcactgatgtagatgggaacataatgcaaacttaagcttgccttatttacataaatcttcctgttagctttccgctttaccatatctgcatttttatgtttgacctattagtacttttttggttttataaagaaaaaaaagtgcttccctcagcagaaccatctggcttcgtttcctgttcctcagcaactatatgtgtattctagcagggccacccctgtggttttctgagtggtgctgtttcactggtggtcttagaattcaactggagtgatggaaaacttatactatgggcttctttcaagtctaaagtttccaaggtgaaaaagtgcatattattgtcatttttgacatagcctttttttccctgtgactggaatatggtcttttaaaacaaatcacacccttctattctttgaggaagaaaactcacttctaaaaatgtcttttagatagtttgctaccaaatttccttggcagcaaactgaggcaactgagaatataatccagacatttttaccacatgcaaactttcytttttttttttttttttttgtttgtttgagacggagtctcgctctgtcgcccaggctggagtgcagtggcaggatctcggctcactgcaagctccgcctcccgggttcacgccattctcctgcctcagcctcccgagtagctgggactacaggcgcccgccactacgcccggctaattttttgtatttttagtagagacggggtttcaccgttttagccgggatggtctcgatctcctgacctcgtgatccgcccgcctcggcctcccaaagtgctgggattacaggcgtgagccaccgcgcctggcccacatgcaaactttcttaaagggtcagttattaataactagttttcttgatcaaataacaataaatgagcaagttaacaataaacaatgagcaaattacataactaaagggtgtggcattcagtttatagtttgtgtggcagaggtaaggtcagtctcatccagaagggcaatgtgtaatgctgctttgggcttgyggtacacacagagaatcccagctggtcactgggcacattttcagaggggtgtgtgcatgaggttgaaattctgtatttttatgttgtaatattctacagattttgaaaattttctgaccaagtgtgcacttatttttcactttgtgaaatactgctttctaaatctttgtttttagaaacagtcaccaaaaggttttgtttgtatatatatatttcattttttctctttttctgtttttggtctgtgcacatcccacgggtagttgagatccacaagctatggagagaggaagaccccacagtattttctttttctttttttaagggaaggtggggtatcacattcacccagtaggcactacatttcacatttggataagactttgttttataactgtttgtatttaaagctttcaaattttactgtgtaaggtaatgcaaagtgtttaacctgttacctatcacatagaaagaactctaaaaagttggagtgctccccacagtcctttgattagatcacttttwaaaaaattttttttagacaaagtctcactctgttgcccaggctggagtgcagtggcgtgatcttggttcactgcaacctctgcctcctgggatcaagccattgtcgtgcctcagcctcccaagtagctaggattacaggcgcccgccaccgcacctggctaatttttgtatttttagtagagacagagtttcactgttttggccaggctggtctcaaactcctgacctcaggtgatccacccgcctcagcctcccaaagtgctgggattggagaagtgagccaccatgcccagccaagatcacttatttttagtgatcagaaatggtcgattctaaaatgataagattatgaaatctttattcttctccttagtttgaaaaagtcttcaaatgtagcctcagacctattattttttatgaagagtttagagacattgaaaaaaactctgtactagaggatttggtttttggaggtgttttttccctacagagtagttcgtggtccctcaaagaccttgcttagtcagaatgttgcttgaaggtgtgcaaagttgaagggaatgctcatttttaattttaagaggaaggaaaaaagttaaaaattgaggctaataaaagttaatgaggaacatttaaatccttcaatggttcaatttatgttgcaagtcagaatggttcatgccgttattatatgtgtgtggcaacatcctctctctgctgtaattcttttcccttgaaaactagcccatgcagcgtggaaggcatatcatactctcatgattgctgttcattcttttgacaaattccacggctttttttttttttaataggggaaagaacaggcacaaggaaattaaaatataaacgtctgttttttctgccatttttttcctgtttgacagattactgaataaagcatggttatcagcagagtgaccatttctaactgtctctttgtgcttaaaaatttattttgggatgggaaacattccccaaacccagagggtacacttaatatgccagttttcatttgagaagaattacttttcagttgtaggtgttttgggatgtagcctgactcaacatccagtattaatggtccaaagatagaacagctgaactttctgactgcccttctttgggagacattagcatgtccctggagacagtttccccagctctggttacgcggatcagtatgtagggaaagcttattacttttagaaacgttcctcttggakgrccctgtctattacccacatcaaatatatggtacacgttgctgttttctttgctttcgaaatgcttcagaactagcccctccatctttccctgactgtagggtccaggctgtgggaacagattttccatcagaccaccttgggaaatgaagtgaactttttagtggtacatttaattcattaattgccctgtctccagagcttccagagatttttcttaaaaacacaatgccagttttttaatagcaatgtttaaaaagtcaatgcttaactcattcagagaaaaactcctgtgacacatttcctggagggcattggcctcaccacttgtttttattaacaatctrtatatacttgtggaatttatctctagatggaatattcagtcttatccctacactttcctcagactgaggcttttcatggtgaggttggtgactgcacgccagaatcaaaagaccctcgtgtatgtgcaaagcgtctgctgtgctgtatgttgggtcctcagcctcttcctgctgctgcctggcctcctacaatcacttcaccgttccaaatcttactttccttctattcaaagggagggggctggagttcaacacaggttaagatttagaaactgagaatatggaatcatcttttgaacactttttccgtacagcagtatttaccatctagtataaactttatgttgtttttaaatatatctgctaacagaacgtagtgttctgtgacacagattatgattttgtgttttaacattgtacaatccctcagtgaaacaaattatttataaagcccagtatcatcttcttttttttttcagtttcatttattattctgagcttaagctaagctaacatcttttttttttttttaacataccaggacaaaaaatactatagaaagtgctacctgatagaaataaaattcaagctatacatgcatgccatatgttatataattttaaattttcagtgattattacactataaaaagtaaaaatgtaacattaattttaagaatatttttaagtcaataaatcccaaatattaagcatgtaaaaaatattaaaaaattattgagacattttacattcctttttctgtacgacgtcttcaaaatccagtgtacattttatacttcacagcacacctcatctcagatgagccacagttcaggcctctggatcttgatcgggagtttgctttcttatacacggaatcccatatttaaaaaccactgttcttaactacggttatggaatcctgaagaggggcagcggtgagaaaagaaaatctggatgcttctgtgatgccatcttgatggataagcactgtatcactttcattgtggtgatcatgtgaccctcgccttgtgcctactgactcacccatggggccatagccatgccgtccctgcatgtggaaggagtaagcagaagactcttctcagtcttctccccagagggagagtcttcagggaggttttggagtggctgtagccagcatcacacacggatggacacattttaccttctagaatacagattgtccttggagaaaagcaaccacacaagaatcaccctcagtgactactgggccccactcaaaaggagggcagcttacactcacagcaagatcctgttgcaacccggagaatcccaggatttctaaagtaaaggacctaagaaagcatctggttgttgacataggattaaccaaagaacatagtctatacttttgggtctttgatttgtactaggcagagtctttgtacctgttcttttaagcaggtaattcacaagtaggcagaacctaaattgtcaagtgggaattttgaaaaaactttactcaagtgcctcggcttcagactaagaattaatttcatcatggagagcagtttagctgcacctttctctggggtttatctcacttaattcaccaaactttacttgttccaaaaaccgtaaagtctttgtttgaaaggcatttcatcaagatgtatgatatgctctttttattcctagtggcagcaatacaaataaattaaacgtttataacttgaccggtgtgactaatatcctgcgttttctggtggataccctgtcattctttcatctacgtagccttttttcccctgggaatctcaaagtctttttgtctgaactggttggttataggcatgctaattacagagatgtggatggtgtaacccccctccagctaaaatggcttgcctttagggtcagccgtgagtcaggtgcagacctgggatcttaacgcagaactcttgattttttaatttctgctctaatctttagctacataaacatatgaagaaactgactacagcagattattccaatacatgtccagctgtctgagcaaacagccgtagggaagagcttacctctcacctctcttggaatcatcaagccttcgagcagcagttcctgccttatggtgccatgtgtgtgtctgaggatcagaggaatgataagaagtcaagaggaagggaggatggctgagtagagtgatgcactttctatgcctctttattaactggaatgatgaaattaaaattatgccacttttattgaggtttgtagcatagcccaaatttaaagaaaattttgattcaagaaaatatcttttgccaagagactttcagaacaaaattggtctacatttgtaaactacttgggacagagaaacattagtttaagcttttaagtgaaaaatataagaaaaggaacctacaaagaatggtacggtagccccctcctatccgcagtttcactctccacggtttcacctgtccgcagtcaaccgtgatctgaaaatattaaatgggaaattacagaaataattcataagttttaaatcgtgcacctttctgagtagcatgatgaaatctcacaccatcccacttcgttctgcccggacgtgaaccattcctttgtccggtggatccccactgtcgatgttccccacccattagtctcttagtagcctccttggttatcagattgactgttgaagtattgtagtgtttgtgttcactgaatccttactttacctaataatggccccatggtgcaagcgttttgatgctggcatattgttatcattgttctattattagttcttgttgttaagytcttactgtgtctaatttttaaacgatttatcgtggatatgtatgcatgggaaaaaacatcgtgtgtgtacggtttggtatttgcaatttcaggtatccaccggggactttggaacatctcccacagataagaggggagaactgtatagttcatttattggccagttattgtctcttttatatggacatgcaacttatgtttataaccctatattcccttaaaattctgtgcttttgtaaaatgtgtaccagctcaggaggctcacctgcctcccatggaagcaggctttcatgcttgctctgtgtccgactgacttcgtaacattaaatgtgtcactgatggttgctttaggaaattatttgcctgggaaaagaaatacaccatgtcataaaacagagagttcacctatgttagtgagatgataccttcaaaggtggaacatttctagaagggttcctgtcctgtcacttcccttgtttcaatactgtattggcccaaggtaggtattggtttgggatttcttaaacaaaacttctttttaaatatttttagaaagttgcttttattcagaggtctcagtatcttgctttgtgccaagtttgttttgttggcttaaattatgttaaaattcagctttgaaaatcagtacatgggaccgtggggtgcttgatttgctgaaacccatccaccagtttctcatcttcccctcatctgtcatgtggagctttagagtatcagagtctatgcgtgttgagttcaagttgatacacatacactgacacgtgcatgccaagccatcttccccataagccagttgtcaaatgggtagagagattacacatgcgaaacagcaaataatgttagagtgtgtgcttgcagacacaaatatatatgcctgtgagacaatgacagaaaaataaggaatcctggaagcatacagactgacagttttgcagtgcatctgagttctcaccctccatggtctgggagaggaacatgtgccatccacccttgcctcctctcggaggctggggctgtgtgcagggagcccctrcggtgggttctctgcccatttcctgctatgtaaagtgttattagggaatgaatggctggtgaaaaggaccttgcagcctgtgctttgagtagcctgggaccgttgggaacagccgcttctgtctgtgtgatccgaagatagctcccagatgggagrgctcctactcctttccttgtcctccctccctgccctctagcacaaaagcttttggaactgcaggaaaccctctggcttgcaaacccaggacccgtaggcttcacaggtcttgtgaatggccagcatttwgggcttcayaccccactaacctcttgagaatttctttgaaaaactagagtatcatagagatgtgaaaagagtttgatttctaaaatcagtgagtgcatgtattcagataacctaggtttaaaaaaggcaataaaaattaaaatctgctgactgcaatgacagaataattgcattttattgtgcaaatatctaatttgacccaggttattttacttaacagcaattagtgttttggtgtgggctaaatagtacctgagaatccctaggattgtgttagtttcatggtgcaaaggctcactgcacatttggaactggcttactgagtcctggcaccccagcyctcaatgctggcacttgactatttgcaggaatggggaactgaccacccacagaatggcttatatgcatatgtaggatggcttatatacatatatacatatgccatgcagccagctttgaaatgtgatagcacttctctgaggtccctaatgtgctgctcaacctttaagactaatcaacaaagctaacagttacagtaatacttgtcacaagcatcacttatttggtagtttcatgtaaagatcattgtatcgttttttggaacagctgttctgtgtggatctgtgaagaaagtctcggtgggtactttccatttccatttgagcatgtcagatggcttggactcaacagccacctgggcgctccttctcagggacacctgcagatgcacaggtacctttgaggtcccacctacacgccaacacccacagctatgtgctggccccacatgcagatgcacaggcacctttgaggtccaacctacacgccagcacccacagctatgtgctggccccacatgcagatgcacaggcacctttgaggtccaacctacacrccagcacccacagctatgtgctggccccacatgcagatgcacaggcaccttttaggccccacctacacgccagcacccatagctatgtgctggccccacatgcagatgcacaggcacctttgaggtcccacctacacgccagcacccacagctatgtgctggccccacatgcagatgcacaggcacctttgaggtcccacctacacgccagcacccacagctatgtgctggccccacatgcagatgcacaggcacctttgaggccccacctctaatgacaccggccagtgccctcggcaccaggggtgaggcccagtgtggaagagctttgcaaggctttcccctggacctcacagctgccctgagaataagtgctcgctgcccaaaggaggcatcgcttggttaagtagcttgcacagagcacatgcaggtaagtcgctgggatggagtttggatctcatgtcatggatgccagagcttgtgctgttcttacttgcttgggccatgctacctctatccatcttttctgcccttatcccctttcttctgcttcccctcttctttgttttgcaacacatttttcctaccattatctcccttttaaggaacttaacgttgcctctgagaattgttgacgttgccctttgtcaaccatgtgacactggggacaggtccatctcatgcactccttctgccacccccaaggagggaacagggctttgtcagcagtcaaagctgctgtgctgggggctcctggctatgtgcgaggcatcatgctaggcccagtgaagcctgcagtgaggtattaagtgggcaccaccctgagccctaacttggccaacaggaaggtactgcgcattgctggtgtgggagccggsgagtcactgttctgacaacccacgctcaaggacacagcagtgagcacagcactctactatcggctctgtcaggaaagcctggccggaaaggaaacaaattcgttcgttaaatggactgacccttttgtctttgcttaatggagtaactttgccttcttttgacttattctgtctgcctgcaaaaaggaaatctgctctcatttaatggactatcagttgttggtgttgccgaggagggggcagtcctcctggcctttgctctcaggaaggacagacggccacacagagcagcccccgaatgcaaatgagagtcctgattaacagtaaggcccccagggtttcctccttttcccagagataaggctggggcttcctaccctgccacaatcagccaactgtttcaggagccattttctctcctctgtgattacatttattttgtctggtacaatttcgtgttatttaaatcttagggttttaaaatggctttctcagaagccattctcttctgaaccgcttgtcccgtgcccctggaagtctggagggcctgtcctgacatcacgtgctcaacattcaacagcgcttttctgttccaagcttgccttcctcccctaagctgaaataaatcaaagttggttgggactcagtcgcaataaatcaagacctgtccagaactggagcctgcccagtcaaaatgtcatagcttggctttcactgaggattaattaaaggcctaatataaagcccagatgtgcttcaggagagtagcaagctgcctggtggctgcatctccccaggttcctgcccacccaagaatatggaggaggacagaaaggcatccagggttgggagggcactgaggggagggaggcgcccgtaagcacatctgagtgaactttatctagtttggagaaaacaggacaagctttccagcaaggcaagaagaaaaatctatgtcagactgtgtgtgtacagtatttaaagggaaggaacatgtaatatatcagaaggtgtgctttaattgaggagacaaaagaaaatgaaccaagtaaagaggtttcattgttttaaaaaaatgcagtgagatttatgcctggttcctgctgaacctgtaaattgtttagagcagagaagctgtgtagatgaaatgcttttgagatatttttattcacagaaagttgaattagacgagaatagcttttggattaggacttatccaggtcttcctttagttccacacaattccatgtactcaacaaaagggtgcctaattaaattccgattgaagaaattcwtatgaaaagcaatgtgcaacattaattctccgtatgtgcaaagtactgcatttgaagtaggaaacaagaaagtgtataattcaaaaccctatatcgtgatcatattatatgactttaaagttaaattttaccactatttgtagaaatttgattctgaagttgggaaaagaagacatcatcaaagactaataaatccacaatctttttttgtggtaatgtgtatactttccttccctgaatatctgtaaatcagctatgtagaaactttgtaaataaaacaaagtgaatctcctgattgctgtgcaatttataatagacacatttgatgcaaataattggaatcttttgatagatataaataggctttttgtgactaggagggcttgctattatacagcctatctttatattaacattaagcttttatccatggaaaattcaactttccccagaagatgttacttcctcacaatgttatattgatgtttaaattctagacctgaaaattttgttaataaacaatagtttatgtgctgaacagatttaagaaaaatattatggtttaatttgagtgatcagagtgtttttacctgttatttgacccagatatttaaatgtacaatcatatttacttgtaaggaatttttagaagtccactggccttttaatagtgacattgtgagtcgtcatatatagcgtcttactatttttttatcctatattcaccttatcttgtggttgaagtatcaatttaaatgaattttaacatagctgtgcgatatcccagaaacaggaatttcacctattttccagatgtgctacacatttctattgagattactgaggactggtagatcattttgggttattaaggatctagcagcatgatactttgttttttaaggcctttcctctaggaccctttacttattttagtcagtaatctagaaaaaataatttactacaaatttacatttccattagttcagataatttatgtttttagaagggtttctgtgtcatgctttattacttagtccataaataacttttgtatttaccattgccttttattctatattttagttttaataacatcaagtgagaatgaatggcctaggacaatgtgtctccagaatgaggactagattttaagagcaaggaaatttagataaataagcttgccccattgccgattttaaatactcttgcatacttaattctcaatgtgcagaattaattacacacttctagaactttgagccagttggcatttggtaaatggcacagcgtatgtgatatttcaccccagattttcgcatccattaggttgttcttttgtattttaattttgaagtattttcgtgtttaaataaagctgtatcctttaccattgcgcagaagtcatctgagcacccacagtagcccttttccctgtctcccctctgtgtgtgtggtctccatagcagtaactgattacttattgtttatgtgtttccctattcagatggatgactggtttgttaagggcaagaatgcatgtttcattttgtttcttcagcgtctaacttagtaacaagcacataggatgagctcagtatacactgaatgagcaaaggctggcctgtgtcttttcagactagttagggacagtttggtgagtcattgccatgacatatcaaaggccacagtagagttctctgagcttcaaaaaaaaagccttgtgggaaagagcaacaaaattctcctagcatataagaatttttggaaaatgtgttaactctttgtatttggatcccttttattttgtggaaaccataatatggggtcttcaactgatctgaaggagttactgcaattccttaaaataggtggcctgacctcctaatagaatctttttcattatatattttttcttttctatgttttttttgttacaatgggatgaaaagctgacttaacagacctaatgtagttttgatcaatgtgagcaagaacatctcgttaccaagcccaagtagtaacacgttgttaaaattcagaaaaggctgactttaagagcttgccatagtcaacatcagaattatgttccacrgtcgtggagagaaacgtatcgtaattagcacaggccatctctgtagcccggaatattgggcaccatgtggcgactccaggcatgcttgcccccaggagctgagagccrggagccacggaaccagggagccacatctaaaaggctcactggaaagcaggtgcaggcacccaagggctgcttacgctctgctaccagcgcttcgccgttctctgacgtggatggttgctgaagacatgcctttcttgctrgtaaatgtattaggaagtggcctgggaaggaaaaagttgcagcataactactttctcccttgcgtggtagtgagttagcgcgacatgttggcataactgagtcgtctgaaacactgtgagtgatatcatcgagagtgcttttttgcagttaagggaacatacattttcaaagtataacattttagactagaaggtacacttagaaattgtctactctgattagatgtggaaatgaagactgaaataagtcactgatttatccagtgtcggagagccagaatgaagtaaaatgacccagcagcttctctggctactggtttttccttttcactatgccaaactgtctcttcttgtcacattatttgaaagattagtagaagttggccataaaacttcatgactagtttctgaaaatacatcaagccatgtgcttgtgatatgtgtactttttaatttgtatattatacttcagtagaagttatcttaaaaacttcatgatttatgaaatttgacatcagacttaacagcaggggctctttatcaacacatttttaatcgtaataaaggcttaggtcttaaagttgaagtggttataaaaagatggatttcattggtgcttgtgtgttatgtgctagcatatcagacattttaaaattttttcctgcacgcattgttgacggtgttcactgtagactctgcatgataacgcctcagattgtgaaattttagcagcatctgctcaggagctgcctctacctgcgtggccatccacacctacctctatgttggaactccatggaggtcaccccacaaccctagtttctccccgtccaatgaagaaggctccagagcgatgcctctgacccagataaggctccctgctcctccaagcttgactttctagggaagggacagttcatgtagaaaatagagtgacttaagccttgaacgttgactcagagtgtgtaggcagatgtgtggacttttcagcagctaacaacacggtgccctgtggaaggtctccacgtggccttagagtggcgactgtgttctctttagtgtgtaggcagatgtgtggactttcttcagcagctaacgacagggtgccctgtcgcaggtctccacgtggccttagagtggcgactgtgttctctttagtgtgtaggcagatgtgtggactttcttcagcagctaacgacagggtgccctgtcgcaggtctccacggggccttagagtggcgactgtgttctctttgctctactccttcactgccaaattccaaatgatgcagcgtttcataaagattaggtcatgtttacaaaacagtgtgagctaagtttccactgaagccttaggagattgttttttggctttgaaatgtaatattttttatagtgaacttattaaaactactactttcttccataatctcctggaatggcccaccggctttctctcttggttcattgcagctatagcaccaggctttcttgacgaaggtcttctctcttgaacggagtctactccttaaaaagttccatgggtcacctttattccactttgccatatcaagcrttgtaactgctactcactttagtccccttagccaggacgcgtggggaccacggtcttacattttctcctagtaataaagttagatattactaattatgccagtgcattctgatggatcaaagcatgcaggaaaaaaaaaaaacacaaatcaaaacaaacactgataacatttaaatctgacattctaagtaagattggagaagaaaaataacaccataaatgactatctaattatttaccatgtgcctggtgtgttcacaagagatatcttaccagctccccagacagacgggcaggatggatggagaaaaggaggaagagggagagaggaaagcaggaagaaaggaagctttctttctaactttattctcccattgccacttctattattcttagcacagaggagcatttataaggcaggcgaaagctcatgaagcactgttatgtacattatttcatttccttttatgacatttatcgccgttgtaattaattcattatttgtgtaatccatgatgttctttattgttggctgtaagttccgttagggcaggagccccgtcagtcctgttcattggaaatccccagccactggcacactttctggcccagcataggtgggaaggaatatctcttagatcaatacacgctgggatttgattctcacagcaccttcctttagagtgtcatctccccgcaggaagttgttctgatcccccatattacattggcatctcattcccaagcttgcattggatcctgttttttattttgtaactgacaggacacttgtggttagttgttcaaagtctttcttccatgctagactgtgaggtcaggagggcttgactggtgtgcaatttttcactgctgcgcccctacagacttaggaactggtaaatgccctccaaacaaggagggtggaaactattattttgcccatattatagaaaaggaggttggaccctaggaagcgaatgggctgactgtaatcwcatcacttgtatgaaacatactggcaccagagctgtctatacctgcaagcatgagtttcctcatcttaaagagactcaactaggcagtttctaaggtatcttgcaattctgatttttaaattgccaaataattttatttagaaggtgattttctttagcaaaatttagtaagttttatgatggcctgaagccaggggaaaggcctccagggtctcttccggggtgggatttgccacccagtggagaaccctgagcagaagagggtaagggaggccagggtaggtgtccaggatggcaagggwggccaggrtaggtgtccaggatggcaagggtggccaggtataggtgtccaggatggcaagggaggccaggataggtgtccaggatggcaacggaggccaggataggtgtccaggatggcaagggtggccagggtaggtgtccaggatggcaagggaggccaggataggtgtccaggatggcaagggaggccaggataggtgtccaggatggcaagggaggccagggtaggtgtccaggatggcaagggaggccagggtaggtgtccaggatggcaagggaggccaggataggtgtccaggatggcaagggtggccgtggagtagatccagcctgtgggactcattagataacctcagttatcaggagcttcttttgcatgaaaggctgtctagggatcattcagcattggacaggtcatgtcgagggatgaaaagaggttggttaatgagtacgtacatagaggtagctagaagaaataagttctagtgtttgattgcacagtagaataactattgttaagaataatttatcgtgtatttcaaagtagctaaaagagaaatgagatgctcccaactcagagaactgataaatgtttgaggtaaagaacattcttggccactcattttcagtctttattacaaactttgtttcttcagattgtcccttaaatattggcaagatatacaatttgtccaggtcccaaagctagaggagacagaacctggactccacgcaatttaaccatgctctcaaccccacattaagctccctttccaggatgccatcctcagcctctgctatgggctgaattttgccacctaaccccaaccaaaattcagatgttgaaatgctaacccccagtacctcagaatgtgaccgtatttggagataagttatttaaacaggtgattaatttaaaatgaccattagggtagggacctatccaataggactggtgtcctcatgagaagaggaagagaccccaggagtacgtgcacactgaggaaaggccatgtgaggacacagggaaaaggcagccatcaggcagccaagatgaggcttcaggagaaaccaaacctgtggcgtcttgatcttggatttccagtctgtggtgcagcaggtacagcagccctaaccagctaagcagccttcgcctcccttgtccagacctctttgttcacctgctgctcctcccgaatctcccacctttgttgatatgagctccatgtacattgttgtctttgccccaaaactgggaaatcagcctagagtcctgccctcgtcttccctacaacaccaacagtgagccctgtccttcccagagacatcagtcaaatccctgtctccctgttcatccctattatatcacctgtgatttgtaaccttgttatcttaaccggaaaaagactcccagtcagtctgtctgcagtgtagacgcttgatggcacttgtgtttgtcaatcacactttgatgggacagagtctacaccaccatccagaaggtaatcctgcccatgtattcctttgttcagatttcttcacgatgaaatctaactttgatacaacccctgcagcacaccaacaccttcatgatctgactctgctcccgcctcacatgggtcctgcctcacatggccctcacctgacaccccctctcctcccagcaccgagcccccttccccgctgtcagattccccggatttgtcagtcgtctatactttcttacatgctttccccacgttctgaagtcaccttctcctttgcccatttgtccactctagttccygccagactttgaggtccttcgtgtgaggactttgtccttccctcttgttattctcaccacttgtttgcagtaagttcctcamgaatgttatggagtaaataaacaaacatgtcccaaaggccttagctcagtgcttctctaaaggcagcaatcttgcccccagggaacgtttccaatgtctggcgacagtttttagggggagtgcacatatctaatgggttgaggccgaggatgctgckgaacatcctccgatacacagggcaacaatgaatggtccaagctaaaaggccagtagtgccaagtttgagaaactctgccttagctccagcccttacataatcatcctcaagccaagctctctgctcccccaatctgcttgtgcctttattggagcccttaggaaattcctctttttccttttccatattcttcattagattgtgctcctggaggtcaggaacgatgaatcactcagctttgtagcttcagtgcctgcactgtggctcggtaagtaatagttgagtagaagaatggatagggaaagaaaggagtaggagaagaagctgatggcatatttcaccgctttatgttttaaacttaggtcagctctggatctgtctctgtatctggtggttctggttagaaacaaagagaggggccaagtggtgagtaaactgagaactatgtacaaaacctattgggcaggatactagtttcaaactgacagggcataactggcgtgcatgttcattttgttacacatttctatttgataatgaccagagtttacatagaaggtgggaagaataatcatgtaaagcacgtctgttcaataaaagattctttagtgatagaaatgttctttatcagtgctgttcaatacagtatccctggccacacatgtgtattgagcacttgagtgtggcgtatgcacatgaagagctcagtttttaattgtatcattttaattgatattatcttaaatggtcatatgtggtcactggtttccttagtgggcaatgcatagctgaagtctgttttttggctgaccccactacacatgatagcttggcagtgttttgttaagcttactatagttcattttgaccagaggaagataacacaaaggtttaaaagaaaatgcagcggagaaacggttcatctttccaagaaaccctagtgttctgagtcacatcatgagtaaatggtggacggaaggcaggtttagctgggcagtcatcaaaaatcatgaagggcaagcaagccaggtaccacaccctcaggcactccccaaactcgttgcccatcggataaagttagtccaagtgccaactcctgccacaacaatgccttataaggactcttaaatcctgtctgacctttgaacaggttcagagtgtgctgtgttcaaatgggaaggaatataaagtaattctagaagatatccaaccggttgataaattgtagaccctaaagggggaaaaagaacatcttttgtctggaatttactttgaggggatgtgatttttgagggtaagattttcagtaggtaataaagtaaaatcccgtacctcaactaataactatttcctaaatgtctgttgctttaatcttagtgtctatagacaatggggccatacctaagagtacttttagatttaacctccaaactccatggagctcagtcttttgtataaaacagaattttttaaaaaaatgattgtattaccatcccatttctctataatgcttttgacaaaatatcctgtggtacttgatttacatttattcccttactggatatctgattgtggaaattaaaaaataggtataacatctcactctctatgtaataagacacatttaggtgaaaatgagataaacgggtgctctcactttgaaactgtaaagaaagcactaaacagcatttaagatatttaataccagtattcattattgttctcttaatgttttaatattatgaaatgttttaatattaaaattaggtggttacttaaggaaggaataattttccataacactgtcctaataaatacccctataatataaaacataaaataaatacctataacacaaaatatgaaatatacgtctagtataaaggactttttgcttgtaactacaccatcattcttccattggaattccccatagcttttcttagagtggcagtaagatcagattagaagtgtgagtaaaatattattgcaatcaattaaagcattaggctcataaattgatcaataactttttgagaacatgataggtcgtgatttcattttgttgaagaaaaatgtgatagctaagatgaaaagacatgtttatttttgtgtcaggtgttctgtgattagttaattaaatattttcatcagttccggtgacctcttgtctctcagctgcatattgactttcccaactgtgccttccatccttctggctgcagtaagagaaaccagattttcctcagcccctccaggctctttcttatctaactcaggagcgcctcctgccagsggggctgggcaaagaacagacccagaggtctccatttttgtaaaaaggttcatggcaggtcggttatttttcagtatattttttaaaggcgtggttgagctaatttaatttcttctgttcattaatttctctcctttcacctccaccccctctgaataaacggcccttcacacgagtccagtgtagcttcaatacaccttattcacactgccttttattgcagctgcattccagccagctggaggtggcctggctgcctcagctttcccgatttagctctggaaatgacttcagcatggcaaaaacgtttcactggccaatttggaaaacaggattcaatttgtgaagaaagctcaaaatggcaactgagaatgaaaaagaggatggagaaggttgcggcagcaaagcagtaagggaacagagatgggccgggtgcagtggctcacacctgtaatcccagcactttgggaggcaggcggatcacctaatgtcaggagttcgagaccagcctggccaacatggtgaaaccctgtctctactaaaaatacaagttagctgggcatggtggtgggcacctgtgatcccagctactcaggaggcagaggcaggagaatggcttgaacccgggaggtggaggtttcagtgagctgacatcgcgccactgcactccagcctgggtgacagagtcagactccgtctcaaaaaaaaaaaaaaaaaagaaaacaaaaaaccagagatgagaaactgttgttctctgctcatgctccttccttcttcccagctgggcccccatttccactctcttaaattgaggtcaggtgggaaggaggtggatggggaagctgcagccgaaagccagttctttgccttgcactttcgttgccctctttgggacttctcttcctggccctggcttaattacgggactgatataaacaaggagctagtgtggaactctgcacaggccgctggagaggaccaggcagcagttgccaggactgggttctgtgcagcggtcttatctgggagcagccataagaagggaaactgcagctgcaagtcagaatgcgtgtccagtcacagtaggccaaggcattggctgttccattgacacagctaggggtaaaaagtggtaacaccttcttttttgcaaacactgtgaacctaaagccaccctgataaatttgtgtctgtctgttagatccaatagttaatttttaagtaattcatatagggagttaaaagcttaattaaggctgggtgtggtggctcatgcctgtaatctcagcactttgggagccaaggcaagtagatcacctgaggtcaggagtttgagaccagcctgaccaatgtggtgaaaccccatttctactaaaaatacaaaaattagccaggcatggtggtgtgcacctgtaatcctgctactcaggatgctgaggtgggagaatcacttgaacctgggtagtggaggttgcagtgagccaagatcataccactgcactccaccctgggcaacagagcgagattccatctaaaaagaaaaaagcttaattaaaagtggatttatggtagtgggttttggtaacagatttgttactgaaatgcattacagacaggcagattccagattcccaaggctgatggatttcaagtctagggaagacatatttctaggtaaaagctgtatgtgtattgtggctttctctttggatatatatttcagtctcccccgagagaaaagaaatgtcatatttaagtaggaacatactttaataataggtgctacttacatctctactatgttgtttctgttatgtgggatttgtggtataaaaataagcaagtatattatttatagtttttttcttaagagaacactaaattttgaataatttcaaaagcctatgctaccttcagaagttaagcatggatcctaacaatttatatggcgtaactactgaatgtttacagtcgatgggatttgtggagttctgtggcctccttggcaatttcagcatgtggaagaggtgttgatattgtcatatgacctcagccctggatcctcatctgtcttctagctcagtggttatcaaacttctagtgtgcrtaggaatgacctggtagtcttgttaaaacactgattttggtcttcactcccagaggtctcatttagtagatctgggtgggacccacgaatgtgcatttttaacaagttccctggagatactgatgctgctactcttgctcccacattttaagaatgactgccctagcggttcgtcctcttcttgacctaacactaaggaagtggtaaccaagttttaaaaattagcctctcttgttaaattaggagatcaagtacttaatactaagtggcagtttcttttaaataacttggaaatttttgaatcctccaggactgcccctgttttccaarttagcataatctactctggaagttcagggattaggctagaatatgaatgggctgggctcttgttctgacacagccattcatagcaccagcttatttcttatcccagcacattaaactcctcttctctggccactagctgtatagtaggttggatttggacagcacagtatgcccatttagacatgaatttatttctcagcccttctgaagacagcagtagtgaggatttgatttgatataatgacactgaaaatggaaaggaaaggatgagtgaaaacaacctgtagaaatggaaaccacgtggtttgactaatgcctgtgtgggrgaggcacaggaaaggaacgaatcaaaratggctttatgtatcagaccaggagaatagatggcaataccagtaaaaatcaggagttggctttgtgaaagaaaataaggttgatttttaaaatataagcccatacatttgtaattggttgattttcaacaatggtacccagacaaatcagtggggaaggaacgtcacaaaaattaactcaaaatggatcctagctggaaatgtaagtgctaaaattgaggcatcaactgttcacattgacrcggctggggtaaaaaatagtaacactttcttttgaaaacaccattgaaccttaatccaccctgctaaatttgtgtctgttatttttaagtaattcatatgaagtgttaaaagcttaattaaaagtggatttattgtgggctttggtaaraggtacattacaggcagattccagatttccaaggctgattgattgaaaacacaggtgagagatactcttcttgaactttaattagacatagccttcttagatatataacacctaaagcacaagcaacaatggaaaaaatagataaaatggactccatcaaagttaaaaactgttctgatagcacaccatcaaaaaagtaaaaaagcagcctaccaaatgggagaaaacatttgcaagtcatatatctgataaggggccagtatccagaatatataaagaactcttacaactcaagaataagaagacagcctaattaaaaataggcacaagacttaaatagacatttccccacagaaaatattcagccgacatgaaaggacatgcacgtgaaaagatgtgccrcaccattagtcattaaggaaatgccgctcaaaaccacagggaaataccacttcacccccactagactggctgtgataaaaaagacagactgtaacaagtattggcgatgacgtggagatgttggaaccctcgtgcattgataatgtaagacagcttagccactttgtaaagcagtttgacagtttctcggtgttcaagaaaggcacatatttaagataaatgaaaacatacttccacatgaaaacttgcacagggatcctagtggcagcattattcacaatagccaaaaagtggaacttttggtagaatgatgtccattaattcataaatggataaataaaatgtaattcatccataatacgtcatattattcaaccataaaaagcactaatggacactgcaatgtggatgaacctggaaaacattatgctaagtaaaagaagatagacccaaaaggcaacatattatatgattccatttatatgaaatgtccagaacacaagaatccatagacactgaaagtacactgtagttgccgtgggctaggtaccagaaatggggaacgactgctaatgggtacagtgtttctttttgggtgatgaagtattctaaacttagatcgtggtaatggttgtgtgactccctgagtatactaaaatcaatctgtttgtatgtgaattatatatcaatgaagatttttttaagtagtaaaaatcttaagaaaccaagaataaatgccagggtaaaatccagtggacgtttggaacttgggagagaggtctgtgccagagggaaacgtgaagttccttgcatggaagagtagtcgaagccgtggaagtgaaccaactgtccagggagaatgtggagggagggagagcagtgaagttgttggaatgcagaacctgggagcacggctctttttttaaggaccaagaagaaggtagaagaatgattgagagataaggaagaaaccaggatggcacagaataacgaaagtgaaggaagagaggcaggtttacagaatgggcagtcacaaagggaaatgctatggaatgactcaacgagccactgagtttgatgtttgggaggtcgctgtttttcatatagatccagtggaggtggaagccacatacaaagttttaatgagtgtgtggagaatgagtgaaggcttaaggaaagtagcatagtcagccctttgtttttacacgttccgcatccatggattctacaataaaaaataacaatacagcaaaatatatacatatatatttttaaatactgaccaggtgcagtggttcatacctataatcccagccctcctttgggaggcctagttgggagtacccaaggccatgggggcccacctcttgcattagtgtgaccttgatgtgagacatgacgtcaaaggagattattttggaacattaaggcttaatgaccacccagctgatttcagacttgaatgggacctgtgtcccctttgttttggccaatttctcccatttagaatgggaacatttacccaatgcctgtaccctcattgcatcttggcagtaactaacttgctttagattttgcaggcttctaggcagaagggacttgccttgtctcatatgagactttggacttggacttttgggttaatgctggaatgaattaagactttgggggattgttgggaaggcatgattggttctgaaatgtgaaagggacctgagatttgggagagaccaggggcagaatgatatggttaggctttgtgttcccacccaaatctcatcttgaattataatccccataatcccctcgtgtaagagagagaccaggtggaggtaactggatgatgggggtcgtttcccccatggtgttctttcgatagtgagtgagttctcacgagatctgatggttttataagtgtctggtcattcctctggcattgtccttcctgccgccttatgaagaaggtgccttgcttccccttcaccttccaccatgattataagtttcctgaggcctccccagccttgctgaactgtgagttgattaaacctctttccattataaattacccagtcttagtaattatagcagtgtgaaaacatactaatatggggaggatagcttgagcccaggagtttgagaccagcctgggcaacacagcaagaccctcatctcttcaaaaaaaaaaaaataataataataataataaaaaaatagccaggaatggtggcacatccctgtagtctcaggtacttggtgggctgaggtgggaggatcattttagcccaggcggtcarggctgcagacagccatgattgcaccgttacactccaggctaggccacagagcctctgtytcaaaacaaaacaaaacaaaacaaaaaaacytaaaaactaaaaatacagtgcaactatttatataacatctacattgtatttagtattatgggtaatctagagatgatttaaggtatataggagaatgcatgtaggttatatgcaattactataccatttcacataagggagttgagcatccttggatttttgtatctgcagraggtcctggaaccgatcctctgtaaatactgaagaatacctgtatggagtagtttttaagtaatttgggaggaagaagaaaataaattgctgagggttgaagaaaggttttgtttttgctaatgacaatgacattgtttagaagagcaaatcttaagatttaaaggcagaaggaaaggaaccggtagagaaggatgattgataatgaaggcagagcagaagaaaattcataacagaataaaactctggatccagttattataaacacgtggtacctcattctcaccttcatagctctttcttcctgttttggaggtagccgaacataaatatgttcggtgtaaatttggggtttttttacttaatcaaaaatatacctagaaacgttgataacttgcagttttgtaaagtgtttccaaatctatggccttctaacacctggagtctttgtaagatccctcctggtaccctgagctcagaagccagcactgccttttaccagctttggcaaaattttgtaaacctctccaagtatgcgttgtcatctctaaagtggtaatgatatctacttgcaaggtttttattaagattatcaaaaaggtattattgaataatatatatagctgctaagtggtaaagaacagggccctacaacagactttcatgggtttgaatccaagacaagttgcttaccctctctacatgtctgttttctcatctgtgaaatggatctgatagaagtatttatgtcatgtggtggtgaagatgaataaatgagaacatctgtataagtgcagagcctggcacatctgtaagtttgctcagcaattgaaagtagtagcagcagttgccaccacttttactactcagagtaaaaatgctaagagcaaataagaaaaaatctgccaattgttagtgagagctaaccaataagaatgagttctactaatttaatcatttttcaaattaaagcctggagctgctggaaaaaaagtttaatatttgctgaaagagtcaaatctaattcttattataataaccagacattattacctctgacacagaaactttagtgtttgttccctgagtcactggtgttgataaatataagataaatattgtttttattcttgatttaaaaaaatcagtgtaattattaaaattaaataagtaaggtggtcattgttccttacaaaactgctcagtaagatacacttacagtctattttttattgagaatgctattagtaattctagtagtctattttttattgagaatgctgctaataaagtaactattagatttataggcccctgtaaatgaaatgtcttaataatataaaatctacttgcattcacaacaactgggtctctaatttatgttttatttccatctatgatatgtgacattttttgatttatcacagaataaaatttgtgtcatttctggtcattctcattttttattgatatttagttgttagagtaaaattccgacagaattacacaactgagaaagaatgatttgataggtcctaaaagtatatgcccagtggatttctaatggagattgaacttgatggaagtatgctaagttcttcaagttggaaattaatgttatattttaagaggacattcttggcattgcttttaccttttgggaggacgggaggaggaaaatcataacttttcttcttttctcagacaaatgaccaagcaggaaattttttatgaattacagaaacattcagattgaatagcatgctgtgattcccggctcagtcactttactttaccctgcccttcacgtttctacagacagcagtaatcagagcggtctgggaaccactcagtctgtgtcagtgcagcctggtgagttcagaagactcctttgttttgagctgtggaacaagaggaaagggtaaaattggcccctctgcctgcggctggatgcagcatggtatcccaggccagcctgccactgcagtagtttaaacaaggtttgtggtcttcacgttccataccagaggagragcgatgtcccgtagggaatagcaagtagatggtaacatcagacacttaaacgtgggaagcgggcagcccacagactgacaaggtggactctgccctctaatacttaggcaacctcggagaccaaggaacagtcacgaccttgtcacgtcactttccactgtgatctttataaactaaagcatagtgtcttagcactatgaaaacacttcgttctttgcctttgtagtctccagccaatgtcggtttagatatatccctcccatggtttctcctactcttccttggtgtgagaaagtgaaataaagttcagattaaacatttcacttcttcactggtatttgtggcacattaatttgatatatgataaagataaacaagcagaaccagagagtaagggggagaatccacttattctaagatagcttttctttttcaacttcaaaatgagaaataattatatttatctctgtaacatggagataactaggctgtaaattaatttccatgcaggcttttctaataaattacagagttttactcttttccagaatcaggagtccaaaatggcatctctgggtcaagtgctctgagacttctgaccttgtttctccataacgagggctttatccccttaaattcataaattacttaaaacatccttttaacatctcagaggagaggtgccagattgcttaaatatctcctgttttatcagagtgctacattcatttttcactcatttcratgtagtttcctcctatagttaaatcaccatttcaaaatttaacattgagttagggagcgtatagataaatgatagaactttgtgactgaaatagataaatcttgggccactgccagtagataaataatgtctattcaagcattttagaagtgatcagctatgaggtcgcgcagctcagggcaccgtagcctaatgcactttttaatgagtaaatcattgctaactggtgtgctcataatttaactcctttttaaatatactgcccatgggttttgcccctaaaatgcaagtgaggtaccctaagggccagaagaggactgggaacatttacaaatgagcatgacactaatgtgaaccaatggattatttgcattccactgcttcagttatcacttaatggctgcaggctctgatggcaggcctgtggactgtgttatgttagcctcaaaaataaatgctaatatctgcgaagttttcacattccccaccatatttggtcaattgtgctagcttagccccttaagggctgccaagagtcttgttggcaaaaatgccactttggtgaagacatagctgaccaccagtcctatttgtagactttccctggttaacgctacatcatttcctccccttagaactctgggatttgtgctttttattaagtgtgatcatttgagttaaatataaattgccctcttatatcatattttcctttgttggcagtgttttggtctttggataattctcccaagggaagttctcaactgtataagtttaatgaatggttgtattgatctgcttttcacatagatatttgattgggtacttgggaccatttggtagaaaagtaagatatatggggagaaaggaaatgactatttcaggttcctatatgtggtttaattgtggctccttttccttacattgaggctctcgctctgattgtaattacattaaatcaaaatctttactagttaaaaattgtataataaatattatatagatggccatgttctgtccatctattctaaatgaactgggattaaaactaggtaataaattttgtaatgattgggaaatgcctagttttgattaaataaatgtgtaataatgtgtttgagtttatgccctttatttggttaatactgaaacaaagtatatggggtcaaaattccttttagatatatttaaatgttaaaatttaaatattcatgttttaatggtgragctttttcattgcttggctcagcacacaaaataatttgtacatttttaagtaggaggaaatgtctttcagtacgaggggagctgacttgtagtgctgtgtctgctccttaaatatgtatgtgtgtgaaaattagacttacctagatttttttcagcaaaacagggttttagagtgagctcatgtatctgagagtatttctagcttttaaaatctatgattttataatatatgtggaaggttctttttattcaaattgtctttaaggtatttaatttgtttaatttttaaaaatccattaatcaatgtataaaaaagataaatggacaattgtgatttccataaaattattattatcattttattttattttttttgagatggagtctcgctttgtcattaggctggagtgcagtggcacgatcttggctcactgcagcctccgcctcctagggttaagcaattctcctgcctcagcctcccgagtagctgggattgtaggcgtgcctcaccacacccagctaatttttgtatttttagtagagatggggtttcactaagttggccaggatggtctggatctcttgacctcgtgattcttctgcctcagcctcccaaagtgctgggattgccaccgcacccggcccataaaattatatttttaaagaaatcaaagtcctacttatatatttgtttttaatgccacaaattgtacatatgcaaaaagagtaatccttttctctaggaaatggctcatgctagtactgccagcatacctaccatgatatgagttcctatgaggaaccaagctagattacatacacagtttcttctaatcctcacaacaatcactcgtgatagagatttgttctgttttaccaaaggaaaaacctggagctaagcctaaaagttataaagaccggggaattctgaacttggataacccatgagttttctattatgtcatgttgccttatccttataaatccattagataatgacttcaagacaatatgatgtggaatttaaatatcctgtctgtggccacattagtgcttattagataatcagcagtaataattgtgtttggatccttttgctcactgaccctctgctagacactgcttatgacgttgagttcttaagattggatttttttcttttttctttcttaactccctatgcaaagtccttcgttaattatttctctctcttctgtttaattgattctgtgtcatgattattctaattgcaaaatatrgaatcttgtaattaacttgtcatactattctaagagcacctctcattacactttggtttatttcattctagccatttattcatatttgagtgtatacagttgtacttatgtacacacacgcatatatccttgtgcatgctcaactaaactgggaattttaaccaatatttgcatttctaagcaatattatatatccattttaaaaagccaattaaatagctctttggtgcagtacactgagagtattgtatgtcagttttctctgcctccagctctgagggaccaagggctatgaagaattctcagaccccagatgcctgctaaatatgcttaatttagacagcataaactgtatgttccagtttgaaaataccacaccatgttttttaagcccatgccttccttcattgatttagaaaagaagttctaaaaataaaatactcaccagaaataaacctacttacatgtgtatttaaaaataatcacttagattatcttttgtggaccaagaattggtgacataggaccttgtcttggaaaaactctgtgagttttactgtagcttgtgagactttgaatcttactgctgtctgtggttctggaaggttttgtctgcctccttctaatggtaattcttaccagatctctcgctgactgttggtcatcttgccagatcttgagtgatgtcttttgcttcatcctgctgtgcatcttgcaggaaagtagatgctcttggtcatttgagtaatccgaatcttgttatttccagtcaactcagttggatttctgggatgagaattagaggagtcccattgaaaaactggaatgagagatgagaagtttgctgaaaacagaacatttttttgtgtgtggattgatttgcctcgtatacctgccttgtactttaaccacatctttgcagtttaaaatagaacacattatttcttcagattcacttattttgactacatcagtaatgctcttacaaggctgcatgacagatttatggtgacatgctttaggcagttcaaaatccttaaacctatattcagctccttttttcctagaaagtaagtcatcttaattttcaatctttctttctttttaatcttttaatgattttttgggggagaggaatcttgtaagttagattcttcaagcttggctacaaatgggttaaaatatagtgtgaaatattatactttctcctatttgattttgtctgctcatttgtttctcccatgttctcagtatacattccaagtttattgtctgtatcacttgttccatttctgcaggaaaggctgcttttctaattgtgtttggtcttttaaatttatcggtgcccccacttccctcctgcctgtttttaaattaatagttgaatgtcttttttactgatgatagaaaaatacctttttctaacattttctcttcatctcagaaacgcagtgctggaatgatcttacttttggtgcagtctattatttttaagatactaggattttcttcttttgtttctttatcctggatttctactttaatatttcatcaacaattcatacccttctttctagtttaatttttctactaagtacctgtctatctagtagtgatattcatttcagtgattacctaaatacaggtggagatattataatgggtaggcagtgtttgacatttccagctggccattgttggaacataaggccattgtttctgctgctgaagttatctttgtttctaaagagttttgaagtatattaatggaggttrgttagaattaggaaaatattagggtcaactatattgctcgtctgctttcacagtgaaaggtagcatggaagtgtatacttgctggttaccctggcagaaataccaactctagcagctatttggatgttaaccacaatggctaggaaccaaagcagtaaacttacagtgttagggaaaggaagagtgctcagcagtgttgagttaaacaagagtagtaagccctcaacgtagctcacttacatttttaaaaatttctttgtcgttgttgttttagagacaaaatcttgctgtgtcacccaggctggagttcagtggcacgatcagggcctcctcaccctcaaatgcctgggctcaagaagtccttccacctcaacctcctgagtagctggggcaacaaacgtgyaccaccacacctggtgatttttttttttttttttttttttttgtggaaakgaggtctcgtttcattgttcaggctggtcttaaactcctggcttcaagcagtcctcccatctcagcctcccaaagtgctgggattacaggtgtgagccactgtgcccagcctaaaaatttttataacagtaaaatacttttgtgactttaccttcctcttctttttatttttactgtgtgcctttctactcctgtaatagaaactctatttaagaaatattcatcatcatttatcattattcattcttctcccaaatcaactcagatatacgttgaataataaaatcagtttattgtctctcctatcatctttgtcaatttcccttaacatctcatatgtaagacgaggtcatgtgttcttgcagtgtaggtcgtgcytcttatacccttaaatacagtatcagggttcaaaaatgttatcatcctagaaaggctgtactatctctgaggtctcatacacgatatcgagatcagatctcactatatgtgaggaaagtttttagagatgctttagaaatacaacagatgtctgagttggttaatctgaaaagagtcagtggattattctgttagcatgattaccacccagtactacagatttcaatactgctttaacacagaggagtaaaaatcagaaaatctatagtgaaaggcacttctctctatctcaatattctttaaaaaaaaaaaaacctttggtaacataataagaaataagaataggtttctgtcttcaagaaatatttagtttttagcttaacataaaaatgcctatattggcttataattctgttttatttagtataaaagtgcccatattggctcattggcccatagggrctctgaagtcacttgaagtttactcacccrgcaagcttgactccttagcaggtgaatattcaccctatgcgaggggtgcatttatttcaaaggtttctgagaatgctgataaattccaccacctttcttagtagcgtatttaatgttttttcttcttgtgctcaagtcctcctcacttgtatgtaaatattttgctgtattttatacccaattttaatttttacttaattttaattttgtttaaatagaaaataaccagataattactttattttccatgtctgtaatgaaatttgggaaataattcttgaattcttctttttaatctttatcgcaactttgtataatcatttatttagcaactatttgaaaaataccagccattaggtgaaactgttttttcactctggggatggacaacaggatgaatacagcagagcctctgccttcactgggcccactgtgtaacaaagaaacatgcttgcagaaaccaagtataatcaccagtggtgaggctgatgatagctcagggcccaggtatatttagaaaaggctggggctctttcaaaccctgctttctgtcatttgcttttttcagtatgtatctgctgggaaaatcttcacccttttagagtcttttaaatgatattcttaagtgttattttctgtatatccaatcacttactgtactatatactatagaaaatacactctattcatttatacttcatatttatatttactgataattaatatttttaggtattaaataattgctgtcaggtattaacatgtacatttgcattttgcacctcacacttctgtaaatgttactttcttttttccacacaagcagattcccgcatggccagcagaagtgtctgagcctgccccaccggaatgaatgtcgcatgtctgtgatgtcacatgtctgtgtctgtacactttgggcacatccgtagagccaagaatccccctttggttgtcagcatttctgagggctaacatctcctagaatcttttggaagacccatagttgtaaaactggaaggatgtctttggggaatattttcacatcgattgttttgcctggataactttttttttttttttttttttttttgagatggattctcgctctgtcacccaggctggagtgcagtggtgcaatctcggctcactgcaagctccgcctcccaggttcatgccgttctcctgcctcagcctcccaagtagctgggactacaggtgcccgccaccacgcctggctaattttttgtgtatttttagtagagacggggtttcaccatgttagccaggatggtctcgatctcctgacttcgtgatctgcccacctcggcctcccagagtgctgggatgacaggcgtgagccaccgcgcccagcaggacttcttaaagaatgacatttctacatacagttatatgttacatctcctcataccaaggatgtagccaatcaaatggccaagagggctgaagagagcacataggtgtggctaacctctaaatcttaaaagtttgcttcaaatagcaaaaatattttgcttttagatcatataatttgtataattttactttccaaatgaagcatctctcagaaaatgtgaaattccactgacccccatatcctgggatgtacatatttaagatcccttgtgccaggtggccagagaaacaacgcagctgccaaccttttcattctttaaatgtctcttcagtgtattacaaataacctgtattggacctgtctttttttttttttttttttttttaatttttgagatggggtctcactctgtcatccaggatggaatacagtggtgcagtcatagctcactgcagcctcaaattcctgggctcaagtgatcctccctcctcaacttcccgagttgttgggactaaagggacacaccgtcacgcctggctaatttttattttttgtagacataggatcttgctatgttgcccaggctggtctcgaactcctttcctcaagcaatcctcccaccttggcctctcaaagtactgagattacagaggtgagccaccatgctctgctggatgtatcttaattgtaaatttttcctccaaaatgcactttttaatggatatctaaggtctgaagaggaaaatggaagacttgacagaagaaggtgtaccttcaatccttccctttttttggcctcttttatattttccaccagtggttcaactgaacatctgggaatcaacagcacaccgagacttctgtgcctctggctgttagatggaagaaatgttatgtgaattcattcccttccatcaccgggtgggacgtggtggtcagccccagcaggcagatttccaaggtgacactgaggagggaaaaaagtcttaccctgctgtccaccagcatgtcagagaccagagccagaacttctgagagcaccacagttccaaaacaaaggagatacaggatgtcagatcacactggtgtttcagccataactgttctcagggcattttttaacaatgtggtcactttctcctggtttgtccactgtaggaaggggtaaagatgatcagagaacctctttacataggagaattaattgtcttattttttactagaaatcaaaaaggaaggaaacattttattttatggtatattccaaataaaagttcgttgaactaacaaacagaaatgtcccacatctagcatttatattgtatttatatttatattgagtttccagaaggctttcctatgaataacctcctttcatcagttgtcacaatagcacaagttagtattgttattaccatttgaagtgagggagataaagatcccagaagttcaggaattgtctaagagctaggcatgaaccctcgtctttctactcaaacctcctctcttttctaccagccaaagagcacagcctcctgacaacctgggcataagtttagttctttaacaaatcaccacatttattttcagagcctagttattatatcgtaaggattacatccttaggttaaagaatgtataaatcaataaattatctcttttatgtttcacttcaaacacgtctttttttctcatcaccttcagctcccgagcatagcagaaaacatagttagaaagtgtcctttccggtataacagaattttttttttttgagacagagtttcgctcttgttgcccaggttggagtgcagtggtgcgatctcggctcactgcaacctctgcctgccgggttcaagcgagtctcctgcctcagtctccctagtagctgggattacaggtgccaaccaccacacccagccaatttttttaacataattttttaaaatgaagatatagtagaagactgcattatttatgctcacattttttttcttttcttttcttttttttttttgagatagtgctctctcgttgcccaggctggagtgcaatggcacgatctcggctcaccgcaacctctgccttctgggttcaagggattcttctgccccagagtagctgggattacagccatgtgccaccatgcctggctaattttgtatttttagtagaaacggggtttctccatgttcgtcaggctggtctcaaactcgtgacctcaggtgttgcgctgccctcagcctcccaaagtgctgggattacgggtgtgagccaccacacccagctatgctcacatatttttaaacatgtgattaacaatgtgctattattattttgagtaaatttaatatatgacaatagaaattgtgaaaatatttggcagtattacaaggataaaaacccattgaaaacatcttgacatacaagatagtgactttaagaatagtgataagaatattaaaatctggcaatttcttaagattttgaatctaccaatataattctgatgtttaaaggttttgagacagtaatatatagtgctgtgggttttatttgtgtgtcggcgggggagtgtgctacaatttttctgtaatacatcttgtggcacttatacatgtttgaaattttttttaaattctaacattcagagagtttgttgatacatatctttccagtccgtgtgtgtgtgtgtgtgtgtgtgtgtgtgtgtgkaaatacaaaaaaagacttcaatataaaatgtatttggttaaatcagagttattcaaatatgtgaatatctcaaatcagagatattcaaatattataaacatcaaaattgaggttctcttaatttaaatttattaacttcaaaggacttgtttgaatagaactctattggatattattctttttattttgaattttatatacccaagaataggtaacccaaatagggggcagtcccatgttttccaaatgagaagaaacaaaaaaatattctaagccaactgaatatttaaacttttaagaatgtggacaaaatagtcaagtgactttaaatgtttaatttactgaatagctaygcatacatttgtaaaataacattaaaatatttccaaacattggggttttttcttctcgcattttgaaaaacaattttattcagtatcctttaacacatcctcatcatctgtgtctttattactacgagacactttttggtcatctgttttctagagcacattttcacacagggctttcacatccattgctagtgctgccaaagggaagtccatcccaagccatgagtcttcagcgcatatatgaggacttgtgctgatgtatattatatatacgtattttatatatacacatgtatattaaatattgtcatgcttcccctagcttcctaatgtattgcttttttaaagggttactgacatataactcttataagagcatactcaggataacgacagctacatttttatctcttgttttgaagagattgtcgtgtgtgacccttgaagcatggaaactaggattaattaatgttatttcaractatcatgtcctctctctccaccactccaacgtagtacttagttcttcaaaataatataattgagaaattgccccataatacatgggattttgatagtacttgagtataaggggaccaactctctttttactaaggagtrttagggaggaaaaatggaaagtgtaaaccacaacttaaatgttcacttctccaccgttttttctatactatctgttgattttcacatttctttctaccagcctaacatttctttcattaaacttttctatataatcaaaataacaaacttgaaactccatcaagccacagtgaaaaactaaaagtgaagtcaagaacagagtgactcctagcaccggaggccaagtggccgtgcagtccccgtggggtggcacgcctccaagcaggtcgtctctggaggccggtgccctgttcgaggcagtggtcacccttcctcccactggtccgtctgcctcctgcaagctgtaattacaccacrgccctaatacagctgtggcctttggggaacacaaaggcacaatcgattgattgtttcatgtgaataaagcgagtgtgtggtataagaggatttgatgagttgtggtgggtttctggtgctttggtagaggttggcacttgtcttttcttaggaaattgtggccccatccaaacagggtagggtgttgtgttttcctgctgtcaccagcttctcctcttgattaagcttgtctttcaccaagctggcgttactgaagtacttgaaatcacagataaagaggatctttactgcttaaaaatttagtgcactgatatggtatttgggtctcagctttttacatagcaaaatcttcattttcctgtctttttcagtccttcagtcttagtgctagtttcttcagtgctgcctgaatattgtggacaataataaaattaccaagtatgtcagctggcatttcatttctcagtgtctaagcttgttgtgtgccctgtttccagggaaaaagtggccccaatataggcatccttctgggaagctgttgctcaaaattccattcccttattgcacagtttagttgtggcattgcactcttcttccaaaggtggggcaggatggttggcgatggaattaaggatgtggatgtggatccagcccaagtgaaaattttctgaaggagaagcggtgggaggaggtcaaatgcaaacaccgtctgacaggcagcaatgttgcaatgcataatcataatctttaggactggtatagataacccttttctcttcaaagcattttgctaacatttagttcgttaattctaccaacagccctgtagggagataagtttttattataatagcttcacgttgcctttaaagaactgggcgacttgccgaatgccacctgggctgtccctcactgtctaggtgtctctatctttcctgtgaaacagttcacgcagactgacgaaagagtggggatttcagcggttcccagaaacctgtgtgatacaggaatctactgccacttgttgctctagaaaataccatgcctcctgctcctgcagccctgtggctgcttacaacagcaaggcgcagagactgaaaacttgtaaacagctgtcgggggctgggggcgggcagagtgtaacagaataggctgccaaattcctgactgccatatgtgctgtgtaatacttgtcatctcaagtgagtcattaaaaggtttccccttaatggggctttgaagtgctgggacagcttgagcgcatctataaattgccacaaacagccctctgaccgagttagctaattgcttgctctttgacttattaggatcaactgagttaaataatttgtcacatgtgtggctcgtaataaataatgtgactagccagtttgtgggctgtttcagtgatatattgtaccccttttggacgttgtcacaagtagctggcaaatgtgggctattttatccataggactatcatatccctgcaaaaagagttagttctgacagagcgattggggaaaaaatgctaaaaggagtctagttactaacaaatgtgttcagttcttcaacctttccataaagcataactatcatttttcttggctattgggcacatacatcagacatcatgcaagtcataggcaaaagaatagaaattataagtactgaattattctagttcatatagactgaattattacagttaaaatattatckgttccctttgtgaaaacaagcaatccctgctagccagcccggtggatgtgctcggcccagctacgctcagcactgcattccggccagtgtttgtgctgtgggctgtgccaagggcattgttgtctactgccagaagacagggagggtgacaactgggatrgagaggaccatggatgagggaaagattaatttgaaagaggggatctgagaaagtaattgtccagtaatagggaaaggaggatgctttgctagccagaagttagaattaagtgcttctcttgcctaataaataatctgttgactgtaggtgctcacagcgtctcacagaaagaggatagtgccagcacatctgggctggctggctttgatagcagtatcttcgtcctcattcacaaaagagaaaagaaaagaaggcaagtaacttgccgtgctgttaatgtgaactatgctcttgtagaaagtattattatgtgagtaacaggaaaataattgagccgtttgtaactgtttttaaaaaatccttacaagaatacatcataattggctttccttactattcacaacagcagcttaggacagaattttgtcgtatttagcrtggaacaagtatcaagtatgtttaaaacaaggatcattacgtttttctattataaaattggtagatgaacccttttattatttcatgaaaaaaagtaatttctgtaacaaagaaggatagaaaaattccagtttaccaaaggttgctttcaactcctcatgtcagggaacatcatttattgttatttatttgattgtgttccctgaagtactcaattgaaataataatggccttaactcatatttttacagcaatttttaaaattaaaatattacattctctgtagacgtcatttcaaaattaatgttctttcactatttaatgacctactctttttctttccttaaacgtatttacgtaggtttttaatatatctctatgcttgcacattatcactgagacaacaggcaataaaaatgccagaacgtctcaaacagtgaggccgagaagtcacaaacaggtcccagctggagggtcccccagcttgttctcccctcccctttctggccagccccttttaacccttggtactcgttaactctccttgtggatgttcagagtaattagacagtggtttaagtgtgtgtgtgtgtgtgtgtgtgtgtgtgtgctgggggatagtgatatggatgggtggatgcagtttggaaaggagaggcatttctctctaattagcggaagccacccaaacctcgatttgtttcatatgcaaaatagtaaatgtctgcagcagacccagacacctatctggcatttggaacaggtgacattattagttccctgggccctgtttgtgtttacttttgttcacataagttaattagctggttttaaaaaagtatcatttctgccttctgaagaaataaaactttactctcttaatatggcttaatttaatagtgtgtgttttgcatttgttttggatattatttctaagtgacatcttaaacttcataggtgtgtcttgggcgtaacaaaagtaattattctattaaaaagagtacgtataaggaagagtatatttaaagatatttatctcaagataactagcactgaactaagtagctccttcccttaaaagacaaaatgtgctgagactgtactcacacagccagtctgaggcatccgaaatcacaagcaaagagcctctctggtgatgtggctcggactgttttgcagctgtgcttggtgtgcgggtgtgtaggtgtttgtggggctggggtgggggaggaagattgacattgtggcttgattggcacaggcatatatcatgcttctaagggttgggcgtatcttcgttgctgaaagtacaagctggatgaagtgctcatccttagctcttctggaagagctcatagaatggatctcctagtttcttactcagtgtccagtgacatagctgtcaccaccaagtgcacttctctgtacaaacctgccgtattgatcatggggtgtcatccagcactgaggagcaaggagggacagaaagaggaaaatgacattaaagggccactgaattaaagccttcaactcaagtgccagagacaccgtgctrgcagacgccagccctgtgtggctcttgtcctggcatggtcttcctatctgcccaggaaggcaggccccaggcacaacctgtgagagaacaggcactgcctacttggggagaatggacagcagacagtcgtggtctgagccgtctcagctgtacccaccctgcggcagaaggacccctccaggcatgcagggctgtttggctgccctctcctgtccagagtgtgtggaaaaatatgccaagaaattagtctccctgcttttgtaacagtagcacatccaggaggaagagccagggatcagtgggtcctccacagagtgtgaaggggacgccatccactaaatgttccttttccgcactgtggtcccaaacactgggttctgtgccgatttcttttttattttttaacagtaaaagtttctttctgcctgtgtttttgctacttactttcctcccttgctgagaagcagaagtaaaatggtcgcaggtttttcattatttctaaccattgtcagaaactgcctgaatatctgaaggctgtggttcttatgcagatcaacagttccaaatacctgaataccagacattgaccaggagctagaccttgacagcccttcagctcctgccacaagtgagtctgaagtaattgctgttgaaagaatgaccccatgccaccctcttctttgctgtctaaaccctcaatcggcctcaaattagatcaccatagagaaacatacctgggccacagatggatcacctcctcctctcattgtggcctgcctgtgacttacgcccttgatttttatttaggaacgctattaaaaaaataggaacaaagaaaggaacaatctacgactttgaaaaccttcccacttgtgttcatcagtatccatgtatgagaccttatgtacctagtgccagagaaaagcattacctaaagaactagtatttttcttttatacaagcagcgtgagctatctcccccagtagagccttttcctgctgcagttgcctcatcttctcagagagtgacaagatggtgctcataagctttaaccatgctatgcaaagctctggggcatttccccactgtcacggatggtttcatatccctattttaatatttcttttgcactttattatttcacttgtaygtgttcacattgtaagaacatattaaatcatttttagaaggagagtagatacaaattatgagtaattcattaaaataaatattttaaacatattcataattttctgatttcaaataatgtacaaataatgccttataagattctaagttatagaactacttgatctggatattgagcctctgaattcacaaccatacataacatattcagcacattctggagtcactaagcatttacttgtaacctttgcagcacattatactgggacgagccctacacttgagttcagagatttaggaatgaatcccaactatgccactttggtgactttgagataaaatttttcatctgtaaaattcttaaagaatactaaaaattattaaataaagtaagaaatatagacacgcctacctcagtgctctgcagaatatggctctcgatttccttccatccacttgtgctccctgaatgtgaggcagtcttgtgatgaagggtctgggaaactaaatgcattcaaccgggatcactgcggtcctccttggttcatccatgtatgtatttactccatatttacttcatccatgtaggaaaatatgttccaggttacctgattagacacttagaatagactggtgaagaaacatagtgggtaaacatgatgacagaacagctgttgagggccgggtgcggtggatcacgcctgtaatcccagcactttgggaggccgaggcaggcaggtcacaaggtcaggagttcgagaccagcctggccaatatggtaaaaccccatctctactaaaaatataaaaattagccaggcgtgctggcgggtgcctgtagtcccagctactcaggaggctgaagcaggagaatagcttgaacccgggaagcagaggttgcagtgagccaagatcgtgccactgcactccagcctgggtgacagagcgagactccagggaaaaaaaaaaaaagaacagctgttgagaaggaaagtcagcatttaggagcctcccttcctaggatcatctgttgggggaagcacccatccacagacacgaggaacacctacaaataacacaggagtgtttcttgtacctccaaaactcctgccttctattaccagtattcctcaatgtgtgttttctttatcattttacctctcaattttaacttttattctgatttgttttctgagacttttcttttgatttactgacttactaaacatcttagtcatgcttatgaataatttacaattacctaattaatagagggaaattttctcatatctccctatcctctaagatatttatccacttgtttctagagatccctgtgacaggaccttcttcagtgcttagggaatgtccaggggtccagcttttggctgggtaggtgtcagtaagctggtgagtgttaggatgaaaacattctggtagtctgtgtctacaatgttgtaaaatccagataaatggattctagatttgtacaaattgctcctgtctatatttgcctgcacactctatcacatctgtcagactgacatcatcctaccgatcgttacctttttaaacacacacctaattgtttgtattgccctgtagtagtataagtaaaatatgttttcgttaatatttcacaaaggaaaataatttctttttagaaaatgtttaaaaagacttatttaactacttttaaaagtaatccttagttgaccctattagcatgtcatataagaatatgcagtatgtgaacattttcacttttaaaatggtcacaatttacaacttttttgagttcaaagtaacttttgcatttattaaagatttcaccagaattgatatcatcagagtggaatacaatgagtctctgtaaattattgtcagtgaattgggaaatgtagctaaatatatccatgtaatttgtcaggagcataatttttacataaattgaaatgtaacactgattgttttaactttttaaaaattgttgtcgatttaaaagttaacaaaacagtcaattataaaccaaggaatatattgttgttatcatccagtgagcatggtgtgtgtcagatgattctccttcctgagcaggacttgagcaagcatactgtccatgctgtatgtgctgaccatagggatttaggggtaccccgggggggcactgtgtggcaagtgtactcccaaggttcagcagcatctgctcacctagcaggctttctgctcttttctgggatgttggtgctgtagtgtggcccagagctcttcaccaaacacagtgcatgcattaccttttttaaaaayaaaacttttatattgtaactactacatttgtaaaggttaattattttgtttttcttggtctcagcaggtttaattgttaaacttcgggaaacaattcagagtggcccattgaactggctgctgctcaggagtaaactgagacctgccctttaataaatagaaaaccaaatgattagcagcagaattagctcatactcactactaactacctgctctctgtatggcactcagtagctccaaccacttaacatttttaagccttttttcccctctgtaatgtaaacttsgtgaagctcaggcctttttaaaatgtatacccttcgctaagtacgcttgatacaataaaatctttgttctctgcagcaktgcagattcatatatgtatatacacacatgcactgtctaatatttatctggtctggaataagcattaatctttaattactatataaacattttaaacaggtgtggaataactgcactctcaaaaatgcagtgtttatctccttgctgcctgatggcatcagccccactgcctgacagctttcacctccctgtgcttgaggtggaaacggagaggtggtgggtaaagggcaaagaaatgccccaaatcccacatgaatcagaaatttccagttgtaaattatgcaccaccataacatcctttaccacagtttgccagccaggaattgagtttggggtagtgtttttctgtgttggtagggtgtggggctgggggctgtatatatagccatgcatttttttttcttcctgtggattgtacgccctcagccgccttttcttggggctgtgcacggagcctgtggtgtgaggagatataaagcagcatttttctaactgcctttggaaacaatgagggctctgttaacaggagcccaagcctctgcagaccgcttcgctgggtggaatgactggtggagcccaggttcaaagccattggcctccaagtgctttaattcagcgttatttttgcttctctaacatcttttttcctttcgttctttttttcttttttaacctaagcattctgaggtctccttgtttggtagggaagtgagcagcaactttttataattagattaaagttaatcaaatgaaggcttggatatttttaaatgtcatttaatctgcttctcttcttccttcatggattttatcactctagcttaatttgttataaaatttcacctcatttttgcctagtaccaggttttccagtttaaaataaagtagaaatagaagacaacagatattttcagcagtctctgttcttccttgaaatacacaaactcaattctgtactagacttgacaccaagtagttgtaatattcctagtagtaatttttctgctattacaaatctgctaggttggagaaatgaaagagaaataggaaatacaagrttctataattaaggacaaaatgaagaggataaagttctcaagaaaacttaattgaggaatatttcttacagaaagcagtttatgtctgtggtaagtgctgactgatgaagttaggatattttggtcaatctaaaatgataatccctgaagagagagagatgggagcatggagttggggagcacagatgatggcgtttctaagctccggcaataaaaatgtaaacatcctttcttgtttggtcaaaaactctatcttctgtactatgttttgcaaatgaaatatgaaaacaaggcaaaggaaacaatgttcaaaactatttttaacatcttacactgttgtaaactcaaggtatcatatgaagtttgactttacacttggggtctttctctgctttggggagtttgctgctcagctcagccttgtcgggtgtttgctgctcagcttagcctgacaagcctactttctactcagaggaggggagatcaggtttccaatttgttaggcgataggcagtgaggcggtgcactgacaggtctggttctgatttttaagtggtgttaaaaaggtcaaggttcacatttttcccattttatcctgagttcatcaccagcaaatctgcctttgccacatttagtcaacactactaaatgaaccaagaccagaaatggggatcatgggtttgctttcctccctggttatattctagcatccactgcagaaaaagaaaaattcatgtcatcatagagtggcccttgcttcatagttttgactagtagtctgatcatataaatctctagttaacattttttatttattgtgaaaataaatagctcaataattttaatgtttgaaggtaagaatggagggctgttttattaattcatttttcctttgtcatggttctttaagtttacacttctgttttgaaaaatgctgttaagagctgcattatgtaaaaatatgtaatattgaaattatcttttttctaacacagaagttaacaatagcttcccaaatctctgctataaaagattaagtatcattttatgtagtaatgctaataaataatgagaaaagtttagagaaataattcttgatatttataatgttttatctccttgggattgttttttgaactgatgataaactagaaagttaatttatttttgcaaaaagtgacaaaacttaaataaatgaaacgttatgacmcacccctcttagakaaattaattgtatcaattgaaaatggccacacttttttgctggtttattggctaatttgtttgaaattgattaatgctttttttaaatgacacattagaaaatatatattaaacttttatttttattttgagataaacctgaaaactttaaagtttggtaatttgtgatttgctaaaatgcagaaatgtgaagaaatgtacatgtatgtgagatgtttggcttttattggctttgcaataatgataaagtgatttatagattatcaaactactatactcttcagacacatatattatgatgttccggtgtgatctcaggcaaccttgtaaacctgtctaaatctttaatttaaagaagaattttcatttrtaagacttaaaagaagcttrtgggacgtgtcagaatttttaaattactgctcttttattcacaaaaagctatgtgggtactccatgtaaattgagagatactgaatgtccccttccccacttatattggaacacacacacacatgcacgcacacacacaatatttttctgtgtttataagtgctatataaagaattaatatgtggacacattacataataccttagagttttacagccaaacgtttgtgggtgctgtttccactcccacccttcttaaacacaaatatgtacttaaataaggaaaaatataccctctgaagtgaaatcgtaaaaacattttcttttttacttgcgagaatttttcctatggtgggttttcctaaacatgtgaaagaaactaatggttatgggtgattttaacacctcctaagagctaattgatagggccagttcattaagatccccctagccccttacagccacacaggtaataaaaaccatcgatgcaacagataacaatcagaaacctttgaatttaatgtttaaaatcagagttactaaaaaagcttcttttttctgcaggataaaaatgcaaacattttacatgttaaaaagtagaataatgtggctagtttagcctttaacagttattactcataatgaattatctatacctttagtatttaacttatccaatttttgggatgttttctcagtgttttgtataagttgtatgttttatatttggaagagacaatgttgcttgaaagacttactcataagtgttatagacattatatgcataaaaactatagctctcctccaataaatcttatgttatccccattattttattctaaagaagaatgtagatcaccggcacaacataataagaagtatggaatttttttacccagggaactatgtgaataaaacgttagatgttttcaagttaatttgacagrgttgtcattccaggatattgctgaatgcagctgggaaaggttctttggcaaagactaatcagtacaagctccagcaagttgtggaaatatattaatcacagaatccttttatgaacagttataatgtttgttaaccttgttctagctaatacaaagaattttttctgagacacacttggtatattcagcagattctctttgatagcttgataagctgcacctagcattgagtaaagcagtggtgtgtgttgctaatacatttcagtgatgtccccccggattcgaagctgtgccagcaggatcctttgtcttttcctgatacctcttgttcaaggtgtattgatgtaaagggagaaccattattttagtttaaaatattaaacaaaataatttttatttctatttcaatactgatggatcacccactgccacaaaaataaataaatgagcttaagtcatcaaacaacgttattttattggtctggtttatgaagaatgcgaagtcccagtgcagaagtaagtatctgctctttcctcatcatcaactcccttcctgttctagttattgtctgtaaatcccagttaagtactcaaagatttaaagtgtaatgaaacttagatggttgggaaagtggttgaagtgaatgttctctgtgaagctttyttattatttaaaagtttgggtaattccgttgttctcttttcctaaatatattcaagaatacctgctttcagttcagattttaacaatcataattttcagtgcaacagataaaatgtattttattttatgtagactttgctatctactcactttttcagaggtgaagtccgaaaagacaaaatgtgtttataaaaccctagactcacctgtgactggggactaaagtgcatttcttcccattctcttatgttggcttctccacagaagaggccacgacaccaggtcaggaggctgataggagaccagatcactctagccaattagcccatttccctgtaacctatgggatacctcctgccttttcgcatttttttttcttttttttttttttgggagaaagagcagtgatgccctctagccactgacatttctgcttcatgccccgaaattagaggaatctgctcagcctggttagtgtgagcaatccaaccctgtgggctggtattcccactggaacagcctctcctgatcaaaaatgtagtttccaagatgcctaacccaggctgtgtggtaaaattaaacccctcaccatccccagctgcaccacactggagtggcccctcctggtcctctagacggtgtgattctcagtcctgtttgttcattatgcaaaccattcttttgttttgtttaaatatgtttcatcatctcttcccattttatacacatgtatcctcccagaatgaacactaactcaacacaggactgagcccagaactttagagatgtcagtcggcttcctgctccttcattcactgagggtgctttccccttgtgtgcacgtcaccctccaggtgatttctaaaactctcctccagtgatctggctcagaagcagacatcttacttagtagtttaacagtgcactaactggaaggcagagtaaagacagacagatcttgtttcggtaactctgttcttgaatggagaagcgtgatatttcattgccctaacagtggagtctgggccaagggcatgtgagtgagagtgtgctgctgactggtgcagttagtggagcaagactagagaaggcaccagcccttctgggcacacatcacaaacacagacctgcctaggttcctctctccttcccatcagtgtgtgcctgccatgtaactcagcaagttggagaacttcttagcttatttaatcttcttaaagtacccttggattttgccttccccatcaagttcctacaacccaaacctgtggaccagccgttctcttcttcacggttgacaatgtgagaagactcttctcgtcctttttttggacaccagacatatattggtggagaatatcagccatttaggcaggtgtattgaggtgtaacttatatacagttaaatgtactgttattagtatgtagttctatgatttaaaaactgcatataggcctgtaactaccaccatcatcaagatatagaacaatccatcttgcacaaaattcccctgagcatcttcagagtcggcttcctcctctctctccccagcccccaccttataatctctaatgttttctgccctaatgtttttccttttccaggatatcatataaatggaataatcctctgggtaacttttggagtctgtcttcttttacttcacatgtgcatttgagatttatccatgttgtgtatatcagtagtccattcctttttgattgctgaatggtaatctattgtatagatcaacttattttttaacttcagaaacaaaatcatagaacttcattataagatttttattacatatcacatttatatgtattcttaacattttaagttatatataattaaagtctgagatacaatggttaatttttaattcttgtattcctcttttaaacattgttatatagggttttgttttgttttactgttattttcagtttatcttattcactacaatatgaagtctagaaggccagtggggctcaggactgtctgcaagacaatctataggtcaatctgtataataggcctctactccaatcatattaaagtaagattttctaattttttaaaatttttacctatgtattattttcttaaaataaggactgaatatgtttgaaggcattaaataatacattatgatgtttgttcttcagatacaatcaagggttctgattcagagatcaaatgtgactattgtaagggctgcagacatcacctgtcagtcccctgatttcacagtagggaatctcaacagatgcagggacccctcagtcattcactcagtggaagggcagacctcagtcttcactcctggtccaggctgtgcttccagaggctcctcagcacttcctctgaggctaccttactggtcttttgacagaccatccagaaacaagggctttaggattctttctcgttggctcaaaaaaccgaaaccaaaaaaggcaaaggtttgaagtgcagcatcatcatgaggcataaacttgtgaaggtaattggattcatttcattgcacgtttggtggccattacagctgaaatgttgcagttttatgccaaattgaatgaatttcttgtattactttttttcatccaacaaactacagcctagctccatttgactttctacctggtggaaggtttttatttttattgttctctgtcatgaaacagattttagtaaatagtttgtagagggccattgtccaagcagcagcatttgcagacatcatttctgtcagcagcgccgaagtagcaccagggttccacgttggaatcctcttttccagtgaggtatcaatgtctacggtcagactcctgggtaagtgctgcrtctggatgtcagcaagagctgcaagacagtttgctagtcaatcagytactgccagggctggctggaagcaccatctctgtgcaggtctgactgcaaacaaagcacagacctgtagggcagactgcgtcacctcagacctgagaatcctgccagtgtgcttctatgtcatctcagttaagtgcctgcccccccccaaaacacaaaaaaagcactgagatacggccatttctcctttaatgtaccctgccaaggcttatagatgaycttaaaccattaaaattcattttttaaagttgaatagattgtaacttcttatgtagacagtaaggaaaaaacaaaaattgtcgtttttattacgttctcataagatcagcaaatggtgctcaatattaatgatcccaggaaggtctatagaaatgttaaagtgtctctttaaacttgccagagagaatgatcttgggagttaaaaaagcattggctctcggtgtcagaaataaacatttgaatttgctcttctttctccattacgtttctctccctgtttttatccctattcagtaatatatagtgtgcatttctcagtgaaaataacaaccaaagaaagtaattggaaataagtaaaatctaaaccaaatactagtgtgaagtagtagaaaaaaatgaaatggaaatctagtgacaagcaaagcattgttattgaaaggtttttggaaaaaagcctctttcactttgctggcccagttagaaagtttggtccctggtacaaagccatacagctgcacacaatataaagtaaggttaacagcatatttggtgcgtttataacttccctagggcattttaacattaaaaatagckattgttaacccggtccatctgaacttaaatatgagcttactttgcaagaaatgaggggtaacgtctaagcacttttctctaggttttattattatttttaggttttacattatagcttctttttttgtctgttttatatgttttattccatgtactgagatacttggagttgtaggctaattggatataagactcttgactctcaactctgtaactttactcttaggtagtatgacatagatcttcgtaagtataatacattcgttactcttacacagggtgacattgatcttcataaatatatgcgctttcctctaacatggtgtgacattgatggtcataaacataacacaagcttatggtggatgtggtagttctttatcttagaatggcccatgagtgttccaagatgataattatagacaactrccttagtatattttgatcataatcacagaaatgcarttcctaacaagggtggcaacttctagactgtcagaatggttgcagccatatwtatgatttttattaataaacaaaaccaagaagtctgcacatggactagggctcagtcttgctaaaaatatagtgaataacacaaatacactttattatctcttcgataatgcaaaaaaggtagaagcatccatcctttcaaggctgagggaggtgtacattctgcttggcaattctccaactcacaaacaggaagcaaatatatttaaccataagaggcatcctgataaaaataagtttaagggcactttccaagttagtccctactgtgatcctgaagtcaaccaactattagccagagccaaacagcaatttccaaggtgaaaggagataaagatactagagcagacagcaactctcagcccagatccaatgtaacacaccacagaggctgctgtctccgtatgtccccagccttattcatggttcatgggctttggaagctgtcacccaggtaatcctgtgcttccctttatgatgagtggaactgaacgcagcatacggactgtcaggtgattttttgaagtgggaaaactgcaaaacccagttacgttcactacaacaaggaatgtcgtatgaatgttttcctctgtaccatctctaagacccacttccttttatactttataacttggtagtggagtcaacattgtctgagataagagcctgagagcatcttgatgacagattcgaatggcaagtgctggtgctcattccctctggaaagcacagggaactcttgatagaggtagaaatctattcgcatgtgggacaactctatgcattctgggactgagttcattagtttagtttcttagatgataagtgtgctgaaaaacttacaaactcacaaggtgtccttccagcaatggtttttaatatttttgccctctctctcagtggcacatgagagttgatgcctctcacctccaagatggacataaggaaggattctgttcacatccacatggccctgtagggaacaaagtgattggtcacaagggtaagatgtctaggatggaatatcaaaactacgcagcctaaagagttccacaccaarcacttctaagctagctgctgggtctagggtggagccccctacctgttgaactctgttggaaataagagtctgtactcttgcattttgtccagatccgctacagcttccttgctctgggcagtatgccaggattgcctgtcttgagcaaagctggggcatccccatcataaagtgaaaggagtccactgcagctgcagactattaaaatgcaaattgggcaaatacgttagctctcagccatctgaagagctaatgtctacagcagtggtagagtttggcactccatatggtagctaataatgttttcagggccaggaggagttttctgatttatggaagtaaagggagagagtgtagctgctgagttgtaagtaggaatagatacaggcaacctctcacaggtaggttagagcacatttctgtgacgttgtggcaagcctgtgtgrattataaagagagttttcattttcagcaactttattcaccaaaatcagaagatgaaaaaagttagggtattttaaagacacatacaccagcattatcaccatcactaccgacaagtttgatcctcaccagccataattccaaaatacaaaactgaccccctgaggcagtctatgtacttacagggaggttaaggattcccaagatactttactgttcattgttcagccatttgaaattctggaggatgttgaaacggttgtggggagattttggatttgagagattaggtacacagacacactgtctgtatgaatatgtatttataaatccaatttgtcacrgtcagaatctccctgtaatgtacctgcatgcatccatccatccatacgtgtgtttgtgtgtgtgcattgtagtagcagatagaaaagagaaggttagactgtatggtgcctaaaatttgttgaaaaagtaaattaaaattcattttcaaatgtttccatttccagaagggtgaatttgtgtacatttttttcttgaaaaatattgtttctttgtcaacctgctagtcagcatcctgctctcagactgtattttggttaacaaaagtaacatttttatcacttggtccagttgaatatttctctcagtggatctttgagttctttttcctctgatatttaacttcatttactacttcctggtgacagctgtttacataacaagtcaggtaccctctcaatacttggggagtagtaccagccctctctagactgcattctggactctgcagtgatctctgttctagaatagaactctgttctgtttagtgttaactgaaaaatccttggccagactccagcttcttgcatttttactttttctttactaagtaggccctcccttcaatggtagaaataagaaagaaaatgagttgtaatttaagtcaccaaaatttgcttgattagtggtttgagcaaatggctgacacctagagaagatgttgatgtgaatggctaacagctctgggactctgaatgtcttaggtctatggatccccaagtgcttttcccagagcaggtcatacaggcacttggagccacctgatgtctttcctgacaccatatgcagagattgtttggctgatcaactgacatataaagtatgggagttagctctctctatttgtcataggtaaacaaagatcaacaaaataaatgcagaaaggtttttagatgccaagtgcttatctaccacagatgaggaacttttattttttttctgacaactacacatctcagacccacagacttttcttctctaaagaaaacacaaaaaataaccatcagttaatagtgaagaatggcttatttctcatcttctttttcattccatttactaattatctctgtgctttagagtgagctatcccttagcaagaaaggatgataataaaggaaatattccaggataatttgagattttgaggtatctcctctcctctaaacgtgaaaagaagacaagacaatctcaagacattggagataaggctgctcatgaatgtggcccatcttgctgctagatcgcgagtctgcaggcagcatctggtgtgcccacatgctgaatgagaatggctctgcaatgtggtactgacattttagaccaaataattctagctgttctgttcaacagtgtccctgagctctgcctgctagaagcacccagacagccccagttgtgacaatcacagatgtctccagatattgccacatatagcttgggtgataaaatcactcccagttggaaaccactcttctaaaaggatagataggagctaaatagtgctggaggacatgattaacagagaacattggaagtttgtcatcagcgtgttgtgttttggtgtttacaacaaaatctgagttctgaagtctgaaattccaatttggtatgtggtatttttgcccttgtttgcagtaaaataatgccattaaggtaaactcaatgtcagtggcctcatccatacacacagactcataatccatctttctctaagttctgttatcacatatctgtgtatggaaaattgatgcacattaaaatacgacttttaagacaagcatagttttcagttttacagaataaaagcatttctgctaccaaatcttgcctgggtgtgaatttttacacctgagatattaatccttgaaaagaggtttttataatggaaatgctgacacaaccttagctgccctgcttgaaatggtatcattatattattccactcttgaccatgtccatgttctgaaaacagtggcagcattgtctgcctctgaatagtgctaaaggaccatggaggggaaggatttggcactgatatcagaaggggggaaattaaaaatacaccttgcatttatractcattcattcaactcgggggattttctacaatgaataagtaagtttgatccacatagaattgatatatttctccatatatggacaactcaaactgataagaatgtcttttggttctatctcccagactattttaactgagtcttcaatagctaatcacttttctgttggataacttatgaaattttcattaggctctgtggctactaacagcccacatagacatcttgaaataatgttttatgtcttgccctgtacacgtggttgtccagatgtgtatacacacacacacacactcatatgagttatctccttgtataatctttttttttttttttttttttttgagacggagtctsgctctgtcgcccaggctggagtgcagtggcgcgatctcagctcactgcaagctccgcctcccgggttcacgccattctcctgcctcagcctcccsagtagctgggactacaggcgcccgctaccacgcccggctaattttttgtatttttagtagagacggggtttcaccattttagccaggatggtctcgatctcctgacctcgtgatccgcccgcctcggcctcccaaagtgctgggattacaggcatgagccaccgcgcccggccctccttatataatcttcagacagccttttccaaaaaggcagtgttttgtgtcttgtgttggcagtatttcatgtctcagatacttttcagagtttcttgtatgcccttagtgagtaggaaaggggaaaaaattctcctagcaagtcctgcctgcatttcccctttcccctttctctcaacaaggacagaaatgagaacattctccaagatgtgcgcagactttaaagcggatcccaggcaggcgcggtggctcaagcctgtaatcccagcactttgggaggctgaggcggatcacctgaggtcgggagttcgagaccagcctgaccaacaaacaggcacaccatctccactaaaaatacaaaattagccgggcgtggtggcgcatgcctgaaatcccagctactcaggaggctgaggcaggaaaatcgcttgaacccggaaggcagaggttgcatcgcgccgagatcacaccattgcactctagcctgggcaacgagcgaaactccatctcgggaaaaaaaaaaatcggatcccacgtcccaccgtccttccaccattgccagggacagaaaaaatagttcaggatagttagtaacaaaattaagagaaaaaaaaagacactaagaaaaacataatgctaaattttcaaagcaagtattataaagaaacgcacctttttagtggaggggaagcttgtggaaaataaaagaaatagtgaaaaagccctgttaaactcgtttgctctcaggcacaggacagaaaatgtatcactgtgcctacaatggaaaggctactgaagtttttttcatatgcacctcaactgccatttttgagtttactcgttaagcaaaaagcttttattacagaaaatatccttgaaagattttgaacaaaaggacatactgtaaatttattgtttgattttaagttcttggcatgcatactacatattggtaaccattccttcatttaaagggcattttgcgagctcttgaggcctgtggctttgagggaactgcgtaatgccccgctgagttttcatctgctgctactgcaccaacacatggctttgaatttgagttgccagcaaaactgcggtggttggagtgaccactgtggaaaagacttatttcagagcctccgctatggcccagaacaaagtagatggcactgtccagaaacacgttctgcatctctttctcgctcccttcagggacccttgtgattccgtgtgggagcctctcctcctgcctctccctgccagtgatagggtgctgagacgttagtacccatggtcacagaagctgcccaggtggtgacaagacacacacgtgtgtgcctgctccggatgtctgctgtgggtggagcctgtcgtttggaaagtgttcatctccacaaatcaaaggtgcttgttgtgaacaagaaacacagtcacctcagactgccattaaaagcatttcatgttctgtgggcaattctgaactccagcttttcttttttttcttttaaaattattatttttaaaaaatatagtgttcagtggtaaaatccagagtgagggaaagctccccaatactggaatactggtgatcacttcctcattagctggcccacatttatagccccgcaaacacagtccccttattaaatgtattaaatgcctcgttctgctgtccagtatggggtctgctatacagtatgtgtgttttcaaacaattagatagcacaggaaagaaacaaatccctgccccgaaggtcctaactttaataaagtatgttatttccaataagcccctttaatataatattatattgtttgccaaatgaatttaaatattttaatgttgaaatgatatcagcaaatacctaaaacttatttcctgttgcaataaaatacacrttttctcagtctcacaactttccacattaataataattaaaaggttagaaggcagccttaattacatagctaatcactcggcctttcccctcgttgtttgggacaaacatacaagttttctaaatgtcttagccaaaatgtcctacgttccattcttcttcttcttttatctaatgtgtaagaaagcgcatttgatggatggaacattcccgtccacaacctctccagtaaatctctcaaagtccttaacctygtacagcctgcctgatagagcatttgctgttgtttatagtctgttatcccagggattggctttctgtgtaataaagtactaaaagtctcgtagagtaggatcaacttgggtgttctgcggtttgcatggtggtggttatacctaattcccacagcagagacgggagttagagggagcatcataaagaacacaagtcagtgggctgccagctgagtgagctgccctgcgaacaggtttgggtaatagcaatatttctaaaagggagggcaatgacacttaagtgaggttggtcttaggaagcagttgcaggtctggatccaataacgtatcattgactgcgtctggaatagatcgccggataaattgagtgaactcttaccctgctgggagcttttttgctgtgtgctctgtgcttattagcctcctagccctcgtttgaccctgttccctttttaaattaatgcwtctccaattccctaatctagacttttttttaatctcatgtttctttgtttccacccaatttgaggaaatagctgaggagttttcaactgtttacccaaaggcaaaattaacaggtgcattcagggttattgtaaggctcatcaaatacactgaaggcctggcccatttccagttctgataaataagttagcattgtaaattaactgaaaactgacagataagaagcagtatttagtggcctagataaaagttttactgtgcatgtgtagaagcgcctcactacaacatgtatcttgacacttaggtccataataatgagtttctaatkagcagaacctgggtaatagacactgaagygaaaccagaaagatcctgcttttaacacagtctaggaatgtatttacatccratagcagcttggcacaaggaagaaagtgttcaggagtttggccatctgtttgctgcagtttatgcctttatttggaggcagttagcagaagacccatgagattgcatgaggaggattaggaagaaaaggcactgggaaaaataaggtgtctctgatattttacgttggaacacatgatgatcatttatggggaaacaaatagtattttatgtgcagtgaatgtcttcaggtgtaaaaagctctttaagacctagcttccttattttgaaaaacgaacttcctattttgcaaaaaacacccactttttttctgagcaattctagctccacgaaagggttttgaaaagttctttgttagatagaagggattgcaaaactgtgtcaccataatattgatggtgttgctgttttatataatatggcaaagagcttcggtctgttctgtcgagtctctagacataatagggtaattcttatagtagactctttagaataaagagcttataataaacattttggaaagtcaaattcagggaaaagctacaacaacagtaattctaggatttatttttgcaatgctaaaattattttattccacataacttaagtacatttactgggtattcacaggttattcccaaataaaaagccttcacatttttgcgtttattagcaagtcagcaaactttcctgggtctggagagtaaaaagaaataacagtgctgtttgcttttttaccctttgtcacctcctttaagaaagagcatcatgtacatgaagtcactacattcctactcccctgtgttcattcatgagcacgtgtggcctgtaggtgcatgaagatgaaacagtttgatcagcatgcrtatggtggtcatattcttttatgaatccctaggtttatattaccagatgttttcctgaaatgtagcattttttaatttatttactaaatgtttattaagcatctagcattggcctccagtgtgccttatacataatagaagtgtatcaagcatttgtttaacaattaatttaatcaacaagtgactaaatcacaggaagaaagaaacttgcttagaacctatacttacaggtctaggccagcagtgctcaaatggtggcaattttgtcccccaggggagttttagcaatgtctggagacaggtttgattgttataactgagggatggggaacagggaggtagttgccactgtcatctagtggttgaggccaggtatgctgctacacatcctgcagtcacaggaaagcccccacaacaaagaactatctggcccaaaacgtcagtgatgccactgctgaaaaactgtgctagtagaagagacagtgtatgctcacccatccctccctatcagcccacttcactatacttcacacaccctcctaggtgatgcctacactcatgggaccctcaacagccatgtgcaccatcattacttacaaattcttgtcttcagcccagaccactccatgaagtccagccctatgcagtcctgccctctggacgttcccaccccactatcttcaaaagctctttcaagcacagagcaaccaagttggaattcaccatcttttactcaaacattagcttacagcattctgctgggcacatggttgtcacttagaaacaaaacaaaacaagaaaaccaaaaaactttgttaaatcaaattgtataaggtacccaagacagagagtagtcaatgtcaagagaggtgacgagagttttcagaataaggataaagtgctttttgctttaaaggcagtaggagccagggtgtgatgggaggccaggaatccatagagattttgtggagaagttgccaactgagctgagcatgaaggataagtggcgtttaatcacctgggattctgggtggtgggaacagatgagcagaggcacagaggttggaaacagggccatgagcagaggctacataacggagcactgtgactckacaagcggtagatgatgaaatggggcggtacgttgggacctggtcttggagattttacatgcaaaggtgagaagtccacgcttcactctgtagccggtgtggatctatgaagattggaaattgagatgatttgtggtagatttttggagacaaactaacagcagtgcctgccttctacctcacatccttcaagtctcatttcgatgtcacttccttggagaggcttctccagcacccatggtttggcttaatgccttggccgtacactcccagggtgtcttatacttctctttcatatatctcgtctcactctttcctyctcctaaagtgctgatcttcccgttagacagtacaccctcaccaagtctatttcagtgtactcgaacacccagaccgcacaaaccaaaatatcagcctggttgacagagatgttgcctgggtagacactgtgtagaacttaccaactgattagtattggggcaaagtgaaaaatgaattaagaatgactccaaggttgtaaaccttcctaataggggcatgtggtacattcggattactaatattaatatttctatctatgaaacataggttgacacattctgcagaaagtagctgagttctgtattggacacactgagattgaagtgttggttggtattggtgtggagagattagtaagcatgggacatgtgcaagggaacttagggaatggaattagagatgaatgtccactgaggtgatggtatttaaaaccgctccaagacagactgaataggcttctgttacttggatcttctgaaaattgccatgaatgactatttcattgttgttcccccatgatttttctcaccatcttctagatttcttaaagaatatttaccctagggcaggtgccrtggctcatacctgtaatcttcaggaggccaaggcaagaggatcacttgagcccaggagtttcagaccagcttgagcaacacaggaagaccctgtctctacaaaatataagaaaattagccaggcgtggtggcttgtacctgtagtcccagctactagggaggtttaggcaggaggatacttgagcccaggagtggtagactgcagtgagctatgattgcaccactgcacaccagcctaggtggcagagcaagaccgtcttttattttaaaaagggggtgggggaaatatttaccctctccccagtaaaaggtacatcataattctatttcaatacatctgaaaggtcaagcatgatttcatctgctgtttctccccctgcaccttagtcattatcaggagtcttctccagcttcatacttgtcattgttttgctggagtttttgcctccttggtttagtagagtccacagtgatatatttgatacatcctaaaagatatgagctgtacataaatrttctaagtgtttgtaaaatacctgctcaaatgctgccctgaggctttgctttcyggtacacacagtcttctggccacatctctcactgtcactgagtgttcccctcagtacgttgctttgcctagcccttgtctttcagagtacggtttgcaattttcaccttcattgggggaaacagaggttcacaatctaggattggaaagaatgtagagcatagcttctctttccatgttcccatggcttccatatcgtttccctgtccctgccagcctcttagagttttcccatctttcctatcaatggagagaaacttattcattgttttttataaactatggttcactctaacccaatattgtagtagttttgtttccttttattgatattgagaattttagagagaaaaagggcattagaatcatggtgtctggctggacacagtggctcacacctgtaatcccaacactttgggaggccaaggcaagtggatcacttgagcccaggagttcaagaccagcctgggcaacatggcaaaaccctgtctctacgaaaaatacaaaatttagctggacatggcggcacacacctatagcccccactacttgggaggctgtggtgggaggatcacttgagcctgggaggttgaggctgcattgagctgtgattgtggcactgcactccagcctgggtcacagagcaaagagaccttgtctcaaggaggaaaaaaaaaaaaaaaaaaagaaacatggtgtctggccctggaccttgactccccatctaatattatcaaaaagaccacaggacacctggtatcccagggatcatatgcttcaggccaaggattcaatgctactccactatgtcctcatgcctgaatattgctatgaggacttaacagcaggggtccccaaccccctgagccacagaccagtactggtccrtggcctgttaggaaccaggccgcacagcaggaggtgagtggtggaaaagccttacctcctgagtgccacctcctgtcagatcagtggtagcattagattctcatagcacagcctctattgtgtactgtgcatgcaagagagctaggttatrcgctccttatgaaaatctaatgcctgatgatctgaggtggaacagtttcatcccaaaaccatcgccccacacccccagtccgtggaaaaattgtcttccacaaaaccagtccctggtgccaaaaaggatggggaccgctgacttacagcattcagaggaagggtaccctgtgaagaatttaaagtagtagagagccacctgagaatgtctcaacatatgctagatattcatttaatgtttataagccgtgaagtggttggctaataaaactggaccagatagttattctactataatcttcaatgtgcattttctacaagatctatgttttatatatatatgctcatcactgataaatggtacaaagagaatctgggtatccttttcttcctctaaaagcataagtacaatgttgaatatgggataataaactatgaccgtgaaacccattacactttctgccattaactcagtctgtgaccttatataagtcacttattttacttttaatgtacaatagaggaatcattagagagtcagatgatgacattgacaaattgcctcaatctcagatgtaaaatgctgtgtgatatgaaaacaatttgtcttgccattatttcagatgtttctactttcctcctgtaaccagagtcacatttcatcatcagtttgaacatgagaaaaatattaagagtacatgatctaaatgcactgagctttagcagcacttacagactggtacagtaaaacctaaggatttcttctgaggccaaattttccttcctgaatagggccactcatttagttattatccattcttataaagaagtgttaccctcaggttacagttgtaactctctgtcgttaatttcttctagttaaatgaagttgtctgagaaagaagctaacctatttataaaagtatatatttgttcttgagccaaaagtcatttcgagatgcactttcatctgttaatgtcactgaaagttgctagataggtgcagcttgaacttccattttctttgtcatgattgcagacccaaatattttaaacacaagagaagacactgctaaaatcaggkttttttttctcaratccaggaaaaaaggtgtaggttgttaatgtttcttgttacaaagttttgaaatattttctcagataatgaaggctatttataattgattttaggaaaactcaagctaactgtaataaatatgccaagcattaagtctgaaaattcaagctgaatgcaaaaagtatggtatgccaagaattttaagtttaatcctgacataggtaaaaactgtttgaggtaggtttgctgtaatactatttttaaagaccaaatcacaacattaaatgtacaatccaagtacatacaatccactcagtagtcagtaagttttcatcctagtcttttctttgagaaaaattcattctactttagatttttttaagcttcattttatttaggtaatataccacactaggaaaaatacagggtttagagacaaacttgcatataaaccccagctctgctattcaaccaattgtggactttggggataataagccctagtgaatgggattatcatgggaattcgatctgtcagtatatctaaagctcctaacacagtgccagcacatgatagatattccgtaagtagtagttgttgctattgtgattacttatatcctcacattgaaagcgcaccctgtgaacaaggtgagaagagagatgctgagggcgagttgaagtctcttgccgacaagccgacaccacagctctcctgcatttctgacagatcatgcagacgctatggcctcagttctcccctttcttcttttggaggggcctggtgggatggagcatggcagcatcagaggctaccctgttctcagcaaaggytggctttaaccaacatactccacgcatgcatgcatttatttatttatttgaggcagggtctcactctgtcatccaggctggagttgcagtggcacgatctctgctcagcgcaacctccacctcatgggttcaagtgattctcrtgcctcagcctcctgggtaactgggactacaggtgcgtgccaccacacccagctaatttttgtattttcagtagagataaggtttcgccatgttgcccaggctggtctcaaactcatgagcttgagtgatctacctactttggcctcccaaagtgctgggattacaggcgtgagccaccattcctggcctgctccttacatttaagagagaccctatagggctctggtcttttttattttgttgttctcacaccttatactgtacattgatgtagcttcttttctaacataggagtccagagacccagagaagttgacagacatttccttttgatccacatggccatggcctgctttgtgcatgagtgggcctgcctgcttgagaccagcacctactgccaatctgagggccatccccttgggtatggacagtgatgttggctcactggtcagcggctcataaccctcataatctgtactgtctgttctgtaccaaccaggcagaatccaggtagaaattctctttattttattttattttattttattttattttattttattttattttatttgatgcagggtcttactctgttgctcaggctggagagcagtgacacgatttcagctcactcactgcaacctccgcctcctgggctcactgaccctcccacctcagcctcctaagtagccgggactacaggtgtgcaccaccatgtccagctaatttttggtagcaatgtggtttcaccatgttgcccaggctggtctcgaatgcctgagctcaagcaatccacctgccttggcatcccaaagtgctgggattacaggtgtgagccacggctcctggctgaaattttcttatttaaaatatacaatgtgagcctctgtacctcattgcaacctttgaaagcaagaaatactaggcagtttatcccctatccccacccctcaaaataggatatttttagcttcaagtaacagaaaatttgaatcaaattggctttaaccttaaaaaatgtattgtctcctgtaatccgacatttggaggtaggctgggatttgcagttggctaatacagagtcatctaggacccaggcttctctttgctgtccacagtattgacatcatccccagactggtccctgctgtggctrtaagtcggctgccagcagcagttggagtcacattcttctccatttggrgaaacagagtgacttccctggcctttcctgaagtcctcagcaggcctcctctcccatctccctagctagagttgggtcatatatccagacccaggctatttgccagtcagaggagttgggattgcctttccttaggctactgctgtgggcagcctccctgatgcataagggcaagaacaaacacccaaactacagtggggttcccttcagaaaggagaaggtgggactgtaacgaccactacagcaaagccactacagaagactttttggaggaggggatttttgtgctgggttttgaagaataaatagagttaggaagaggtgaggtggagattttaagttgatggaacatcatatacagaaagttcagaagtgggagagaacacagcctttgagagggaactgtgagtatgtgaatatggagaatggttagagtcacaggggatgagcctggggaagagtccatgtgtgtcacgtagaagtctgaatgccattccgaattgtgagagcatccagagaagatatgaggaaggtcctggttaagacaatggtgggaaaaacggagaggaagtggcatttagggaaataggcattgcaggacgttctggccagtgggatagaagtgagtgagaagaaagcagtcaagtggtggatatgaacaagtcacgtgtcctccagccactggaaccacctgtgtcagcgtccttcctcatggttcttcctcccttcctatctgtgtctctacatcacaaacatacacatgaacaccacctacctgtacctgtacagagagacaatttctatagcagtgacactacagcaaaaatagggatatatgtgcaaaatattgttaatttgttgtgttacccattctgatattaatagcgtcccctttcctaatctttggaaatcttttaaataaacaattatgcttatttgaggaaaaaaatgagttggtaatttctaattagcagtgacatggatctttagtaggaagcaatcatttcaaaaacgttagcatttggttatcagcttgtgagtttgttaggttcgatagaagtttcactttgcagtgagagtttgggaggaaacactattttccaggatcatgtttcttacaaaggactaaaatatgcttaagccaacctcctccctgcataaagttcacctctgaactaagaccaaactgaaaacaaggaacgccttgaaatattttgggatgttctgagagcaagggattctaggagagagagttcatttgatttttagcacttccagcactttagcactccttaaaggtaaatgcccatgacttaccacccttattcttttactacataggatctttttatatcactataaaacattagtcaacaaagcttaaaaaaatcccgagaattaaaaatgtctagctagttcagtctctgatacctacattctgtttatgcagtgtgtccacctggcagaaacatgaaaaaaatttgactcataagtttccgtctgtcctgtttgtttgtaacttgcattacgtgtacagtgtagctggatggtgcaacagtcgccctcacaatgtcattagtggctgccagatccggtgagctccaaastgccactgaggcattttaaccaacccgaacgctgtttgttgagattaccctcaagaccacacattacggctattctacaaatttttcctttttttaagtctagcagagtcacatgccagttttggctcctttgagaaagcaggcttctggattagctggccaccagagcccggtctccactcagtgctccacttggaagtgcggctgacccacactttggtttcttagagtagccaaaaacgagcatctggccctaatttagactgagcgtaggggctccccactagcagcaaatacgtctcttgccctctttcctctctgctggggaatagtgtgggggctggatatcagcaatacatgctcctgttttcctggcttggactctctcacttccagtaacattcttctttttacttgcacaagcctagttgacatttctggttggcatgtttgcctctgtaagccattttcatgactgctgggtttatttaacactcattcaaaaagttttggagaacctactatgtgccaggcacgtgatgtatgttctggaaggggtgaggagaggcagagcgtgagaggggtggtaccactcctgaactagagacctgggtgccccttccaggtgggaggtcttgcaaagtctcaacagaatagcattcacttatctttttaaagtgggtattgcctaatgagggccctttctagcccatcttttggattaaaatacatttcaagaactgtgacatttgaagtgcactggttttgtgcgtaacattctgtgagagttttacaccatagcagaaaaaatgcagtcctcgcctctcattgcttctatctaggcattttctgcctaggaaacctcaaggaaatttaaataatacacttcccaaatcatacctcaataaagttgatttcaaacaaatgaaaacagtttccaaaatattcctttcacgattgcgagccgaagacgaaactggttctaaagcatcccacaaaggcgcagagggctggccagagccaaagagcaacccacgtcccctcggctgcagcctgctcctcacactcatcactgggactcctgactggcagcacaccctgccccttccatgggtagcatctagtaacaagtgctttcagctttgcctgacagagctcattgtgaagcccatgattttatttccacttccagggtgaaaattacaacatcagttggaatagtacatctgacttggaatagactagagtggtcagaatgatggatctgatatatacttgaagggataattgtacacaaccagtttaaaagctggtaaatatttaagggtcaggggttaaatgtcaaagccacagtgcttgggctcagctccataaagtatctagaatgactgctaattaaatccagggtatatttcaccaaagggaaataaatttgacagctaacaaccaatactggattaccaccttacagaggttagggatcatgctagtarttgtaggtggtttacagtttttaacccagtactaatcgggaggatgattgcttacagttacagattaccatactaaagaaagttaagtcttatgagccaaaaataagcagtaccacaagcatatagatctgggtcccctggctcacttcttgtttaaaaataaatgccctctggctgttgcggagcaaatcactaaaacaaatgtagacatgctcactttttttttttctgagctgaaaattttctctgtgattaataattaccaaccagtgctgtagccaactatgaaattagatgaattggattttcaaaccagagcagcaaattgaaggcagaaaaatgtcggctaaaggtataatagtccctctcctagtcaaacacttgtcgttgtacttaggtaatgtgatatttttctcaagttcagcatccttacatgggcatgtaatttggacgctcctttggatgtcccacctcagggaaaaagctgtttaccttcagatgagatataccttatgagcactaagcaaacagagtaattgtaatattttaataggtatgtttacatgcagatcttgagattgtttctgcattaggtgatttatagggctatattaagtaaatcacacttggaatgctgttccaaagaatgactcataaaatactgccatctcccctttctcctttcaatagagagctccaagggaaagagacaaaagaggaattcctccgctcttcataccaatcacagtactaaccaagaaatcatcccatttaataacagttcagctattttcgatattttatttgcattgccaagtcagtgtaaaataaaattgtctaactcaaaatttcacagaggtaaatttatgtggaaaaaaacagccaaagcctttatagaaaacctcatcatccctgatactccaacttctgcaggctgaactaattactgcatgatctttacttgaggtattggttatatcaattaagttgttaggagtaatttcaataatgctagtgtttgagagaactacatagcaaacatgatttgccttaattagacttttaaattcagagccctatctaagtctggagccaagagctctattttgattctcttctgtattcacttagttgtaaagggaaattttttaatatgtctggctctaagtaattagtttgcaaatttgtaatgtgagatgttgtasgagctgagttgggaaaggagagcaaagcctcctccctttttcttttattagcatttcctgtatctggagacttcctgcaaggatggaacattcctttaagttcaactcgtgggaggtttgcaccaatagcataaaatgcctccagacaggtacctaccactgaccttcatgcaccttttgcccttaaaaaaatagcaatgcttttatttgtcaagcctttcagagcacttggtgggcagtggagcctgtgggcggcctgagcagtgtccccctagtcctcctgtctgctccctgtgaggcctgggtctccttcctccctgagctgtagatgctgagctggagatcctgtccagacctgtgggaaagtgcacaaagccccagccattcatcctgcgtctttcccactcactggggaaggaactcccagcaggaaggcttcattagcctgaaagaatatcgtgccttcgctttaactctttggcccctatggcagtcagtccattgagtgcagtattcacatataagatgtcgaagttcttgagagagtcttcattgcttggctcccacagagaattttcccrgtaacttcctttactaggcaagcgtttattaaaatgtgttcctgtccacagaaaattcaggattcgggacgggggtacaccacacttaccaacactttgagtcgtgccattaagcatcrtgtatgcaagtaacagattaggaagcaaaaaggccacattgtcatggaatctaaatcctgagtaaaatgtaagttgtttagggtttcccattctgcaaagaccacatttctgtaattttatgttaacttactatatgttttgaagaaccggctatgtcccttccattggcaaagaactttccctccacccacccctgcccttttgtaaatacagaaaaatcaccacaatgatgacatacaattataataaacatttaagaatcttgtactttcccaggtttatcttatcatctgaacatgtggtgagcccaaattggttgtcttttccctaaggtacaatatttctacacattttaatgcaatttacattttatttttaaagacttacagtgacatatttgaacattctgaaaattaaactttgtatgaacgtaattgcaagagttagyggaaactgaaatgaaatataaagacttccacttcctgtatatgaatttttagccttttcccaaactttctctattgtaaacttaaaacaaagtcttatcagcaagtaccaaagaatagcagctggatatcattaaatccctctgtctaagctattcttcttcattacctttttcctgacagctcttgctctgcacagaaattgtaactttgtgatagagatttatgtaattcaggtgtcctctatcctgaatgagagcttggctgcaaaagaatgaagggtttgccagagtccatagagttttataagaagaagaggggaaaccatacgaaattcagtgaagaaacacatgttaatgtaaccagttcatcagccgcttctacccaatctcccttttatggactattttcgtaagaatatttttctgcaaactgatgtagttagtagatgtcattatactaatgaaaggacattagctattttatyataaagtatgcaccagcactttgcagattcagtgaaactctaaaaatgtctttatctagcaacataatagaaaatactatgatagacatccaaccataaacaaattagaacaggcaacacaaatgcctttttcagtttagtgaaatagcgtagcagttgcttagttgatggtgacgtggtaacatacatatgccgatctgtgagcatttcatttggcctctactagctttcatacctcaaattttgagttcaggtctcagagtttttctttcatttacacagcaaaaccaccaggaaagagactttaaaagagactatcaggcatgacaagatactagtgaatcaaaaacgtacttaaaaaataaagcaaacgaggccaggcacggtggctcaggcctgtaatcccagcactttgggaggctgaggcgggtggatcacgagatcaggagatcgagaccatcctggctaacatggtgaaaccctgtctctactaaaaatccaaaaaattagccaggcgtggtggtgggcacctgtagtcacagctccggtggtgtgaacccgggaggcggagcttacagtgagcgctacagatagcgctactgcactcctgcctgggcgacatagcgagactccgtctcaaaaaaataataataaaataaaataaataaaaaataaaataaaataaaaagcaaatgaaaaaaatgtctaatgactcccatgaacattaaaytgatggcctcttctttccttgatttaacagttattttttgccctattaccaaattgatatcttaaagaattgttttactccaaatgcacttattatgtgcagttttattcatggttcctcacaatcaacaaattaaatgatatttatgcccatctgcctgcacttgttttttgaattagaaatacaaaagagatctaagaacttataaaatagttggtttatcaagcctaaaaagacataaatctaatttagtaatttaaatgtgaaaattactagatttttaaagattattttatagtgacatatctccttctatgtaaactctgtttcacattattttctgtaaaagcagaataagaattcaccaaatttgttataacaactccctacaaagaatgctgctgatctcccagcatgtgagatgttgtgggagctgagttgggaaaggagagcaaagccgcctccttccactcttctagagacacagaatgtagaatgctgccctgagttccgacctgcagcagcataagccacctccaccctatcccagtgatctgtccctgtgtgctcttcttctggctgccttagggtgttcttcagccagtttcaatgtcatgtcctcaaggaaaacttccctgacagacccccccttacgcaacacagactctgtgcccctcccgtccgtgttatttgccccgtgttagcacttagcactcactttatattccctccctccttccctctccctctctatcagtagagaactaattaatatctaaataaaaaaataattaaactgtggtaaatctatcatgtgatttgcttgcatctgtaggaaagtacaagaacattctccgtgaaactgaaatgccctcagagacattaagttgaaaaaacaagaatagtgtgtataaagtagtataaaaaggtggatgggggtaataaaactgttcctgtggttgcctggttgcaggaagggggacggaacaaacagggttcccgggacctggatggagaaaatcgagtaatgtcacattaatttttgagattttaaccatatgaatgcaatatctgatctttaaaaatgagttattctggaattattgtatagtttaataagttatagtttatataagtttaataagtttaataggaaattgtttaataagaaattgcccttcaattctctttaagaacagagtaatcttgcatttaacttagaagtatgttaaaagcttaacatacttctgatgcttaaaccaaatcttacaaaagcactgtaaataaaggattttgttgtgttttgttatttaatgaaagggagttgccgactctccccatagatgtcaagcgctaagaaaagatggatcccaactggagccaacagacagatgatgtatcatggtgcctctgacatttggtaacctccaggccctcagagcaattgctcagggaaatgcaacattgtaggtctggatctgttctaccagatggaaattagtgccttaaaatagcccagcatttttcccccaccactgagaacattttaaatggaatctcttttagatttaaatatttttaaatcttcaatggacatttaatgaatccttatagaatagcttttattttcttgataattgatgaaattaatatcatctgttttaatttcaaagcatgccaagcattttaacctgcaaatccgtaacctaccaggattgaactttaactactagattttaaggtgctaattcttaataatttctatttaatttttttgtaaattttaaccagaacctaagctctgactttgtgattcagttatgtttgtatatacatgtcttcatttttgagtgagtaagaatattagagttgttctatggatttgrtgygatatatgcattgtgattttaaggagagcatgtttctcatttagatattgactagaaatagagaaaacctaaccaacaacttcttaatttactttgtttgtttaatgagcagtttgggtttggtattaatttctgccttcataaatttcccttctcttgaataatgaggatctttcaacccactgcccttccatgtgaaaatggttttttaaacaaccttggttatagttttaaacttcgctggaagaattaggtcatccaaaatatgtgtggggtgtgaagttttgttttctgcacaaagacttgtcatgagtctaaacatttctctctcaagtaatttacaatttaattaccttgtgttatgttccctcaggaaggggaggagaagggaaaggaagaaaaggcaaaaaaaaaaagttttaaaaatgtgtgctgcattcaggatttagatttcaccttataaagtttttattacagcgtcctcctcccctcattgtgccatgaaatagtgaatcactctgcttggtctctgaggacagatgctgttctcatgttttatcctgacacctccgagatgagctttccatatgaaggaagggaggacatttgatgtgtccagtgttgttctggggcctccccttctctggaagtcactgacacgtgtagttttggcattgaagcccagcgggagacgacatttggccaattcccctgctgattaatgtgcctgagggtccatgccaccctttgcccccttccagtgcattagtttaaaaaaaaaaaaaaaaaaaaaaaggctttcatacgctccactgccgggtgagctgggcacaggtccagcggcgccagcaattttccgtcctttgtgtgagtgatcagaggccaaccccacaaaactgacagtggttgcactcagtgctactaatgatcttcagtagccgaagacttccttcctcgtgtggcctgaatgtttttactgggtaaatatgtgatctggaaagtggccacagagacgcagcctgataaagttcatcgtgtgcttcacatgttcatgctgacttttccgctgaagctcatcaggtctgtggcaggcaaagacagaacttacgagacasaaaatgaaaagttcgcttttgccttataggcagtttgcagatatgctttctgaaatgtgtcggcctcactttgttcattcttttctcactgaaaagagctttgcrgtcaagctaacaatgcatgtggtggactatttttaagaccaaggagtctttggctctggcttacctttacctgtccttttccacttctccacttcttcatcctgaacatccagtgagtccggaacagccaagttactgcttgtgtaatgggcacaaaagtaggtgatcatgctgtgactggctgtcagtgcatttacatgctctccaacacacataaaaaaaataaaagccatcactccagtcacagagtcaaatgctacaaataaaaattaatctctaaggagttttggattgttttttttgtaggggtatagagagtctcactccrtcccccaggctagagtgcagtggctcaatcataactcactgcaacctcaaactcctggtgggttcgaggagcttccagactcagcctccctagtagctgggactacaggcacatgacaccacacctggctaattttcttattttttgtagagatggggtcttgttatattgcccaggctggtctcaaactcctgaacaacttcgagaccagcctgggcaatatagcaagttgctcaagtgatcctcccaccttggcctcccagagtgctaggattatagacatgagccactgttctaaagagattttaattctgtaccctaccttcacttagtgctaatcaaaccacgtaagatggtagtttttatatatttattaaatttctgaagacgttatcaaccaccttatggttttttgttctaaaaacaaaccaactgtgaccagacagaaatttccttggaattatgtatttacaaaaattcttatggggagggtaaaagtggctgaaactcctctttggcctttgtgcattggctgtgtagagacctggtgagagatggtgactgtgggctggaactaggctaccagggattgaacatctaatttttcaatatgctagcttgctctggcaaatacctctagaagcaggcttcagctccttcagataaataatccctacaggtgcttaaagaattttcaagattttataaaaaacctraaaaggttaggaatatgtgtgttcggatgaatcctcagaaagctggaataaaaaactttcttctatcgcctgagtgacatggcatcctacagtgtttatttttattttactaagtcatgtttccctaactgcctctgggattgtaattctcattgatgagtgctcttctttagtccctttgctaaaaactttataaccttacctaaaatacttaaaattggcatctgtttagtgttttgcagttcatagagattttcccttcacgcttcccttaaggaatgattatctggactcctcgttttactaaagaaactgagaaatggcacattggtaagtggcagatccagagtacaggcattcttgcttatatcacttgtcacacatggcagatgggacacagccactgaattctcctttagtttcaggatgggagggctttgacctaacgtccaggaggccagtgtaaccagcggaatgatttagagggaagaaagccattgacttactttaatcctataatggcagtaatgcctttgtagccaatcaggaaacaatttacaaatggccttaccagaataactctgctggatcattctgatttgggaatattgaacctgtatctgcattggccaaatatagcaaacaagataatcatgtttatgtgcattacttttgaagaaccatttaaaaattataatgctttgggcaaatagtttcctagacatgaatggaaggactacattttctgaagtgtttgggtacattttcacatatcggtctacaaaacaggcatattctcgaagaggttctaagagttatatatatttcttatccctgaaatrccttatagtatagtgtgtatactatagtgtatagtgtggaggattcaattttatataaatttcagataatttaatatcttkttgataataactatcacatagatttctgaacaggtgccagatatagtttatcattcgcttacattctaggcaaaagcaactacatcatttattgctgtagttattgttggcttaaaaaaactagagaagtgttgtacytttgttagagtggaaaaccactcactgcttagggcttgcttctgtctcatcttcttgtctttatttcttaacatacattgaacccctgtactatatcctctgtggttggttatatgtaatacaaagctgaatacacatactccctctccttaagatgtttagagtctagaacagtggttctcaatccagggcaatgtgtggagacattttggttgtcgctactgggggaatggtcttgatacctagtgggtagaagttgctaagcatcttaaaatgcataagacagactccacaacaaagaattatttgtcacaaaatgtcagtagtgcctaggttgggaaatcctgatctagagtagttttagtgaatagaattttatctgcttatgggaatgttctatatctgcaatgtcccacatgatagccaacagccacatgtagattttgagcacttgaaatttggctagtataactgaggaactaaattattaatttaatttaattttgattaatttaaatttaaataaaaaagccactagtgtctaccatattggacagcggcagtctagaagaagagactgataagttaactagtgattacagctctatgtaagataactcaaaaccaaggcttgtgacagtagttatgagaacatacagaaaaaggattctgaattaggctgaggcaagaggcagctttccaagaacatagcacacagagggtgattcttgagctaagtgttgaagagttaaaatgtaccatatatgcctatgtataaagtggcttggaatatttgatgatgatttgattccccccgtccacctaataagaagattcattaaaatactaggtgtaagcagccagatgtggtggctacgcctgtaatccctgcattttgggaggccgaggagggtggatcgcttgagcccaggagttcacaaccagcccagccaacatggcagaaccccatctctgcaaaacattttagaaattagccagccatggtggcgtgtgcctgtgttcccagctactttacaggctgaggcaggagcatcacctgagtgagcccagaatgttaagtctgcagtgagctgtgatccacaccagtgcactccagcctggatgatacagcaagactgtgtcccagaaacaaaacaaacaaaacaaattgggtgtagggtcaacttggataaacaacctcttaggggaaaatgcctatgcataatatatttttttatttggttatacaaacatttaaaattatatacacatacgcacacgttcacatacatagatacacacacgtatcttcctatatccatatatattcatttagaaatatagatacacagttaacccttgaacaacatgggtttgaactgtgcaggttcacttatacatggattttcttccacttctgccactcctgagacatcaagaccgacccctcccctttcttgttctctcaagcctagtcaatgtgaagacaaggatgaagacctttatgatgatccacttccacttaattaatagcaaatatatgtttcttatgattttcctaatgaaactttttcccgtagctttcttcattgtaagaatacagtatatggtacacatatacaaaatatgtgttaatcaacaattcttggtatcagcaaggcttgcagtcaacagtcggaattagtagttaagtttttggtgagtcaaacattatatgtaatttttttacagtgcaggggtttggcacccctaaccctccatgttaagggtcaactatgctacatttttaaaatttcaagctgaaagactcactttggtgtttcttgtaggagaggtatagtggtaatgaactttcttagcttatctgggaatgtcttattttctgccttgtttcatgggacagttttgctaaatatagaattcttggttaacattgtttttgttttagcactttgaatatatcagccactgggccttcttacctccaagatatcatatgagaaaatggctgataatcatattgaagatcccttatatgtgatgaattgttactgttttgctgcttttaagattccatctttacctttggcttttgacaatttgaatatgtctcaggatagttctctttgagtttatcttacttgtttggtgagcttcttggatttgtagagtcatgtttttcatcaaatttgggaagttatcaaccattacttcttcaaatacactttctggccccttcttctctctgcttcttctgtgactcctgcagattatgttggtctgcttgatggtgtcccttgagttccttaggcgctgttcactttttttcattcattttcattcattcttctttctgtttctcaaactcagtaatttgaccttcaaatttactaattcttctgcttgcttaaatttgcttttgagccccctctattgtattttccattttacttattatactttccagctccagaatttcttttggtttcttttttaaaatttctctttttgttgttattctcattttgttcatacattgttttcctgtctttgtccatgacttaccctagatctttgattaccttaaagatagttatttatctggtaagtccaaagtttaggcttcctcaggtatgttttatgtcattttattttgttcctttgartgctctgtactttccttttcctttctatgtcttatttttccattgttgttgaaacctggacatttgaatcttagaatgtggtaactttggaaatccagttctttcccttccctagcatttcctgtgggttttctaactgttgtagggtgtgtctgtgccagggatcatcccaaattgaaatcttaagatcttgtgaggtcttttctgagtctgcatttcaccctggctatgcatggtggcttcctaaatcccctcatctatgcagctgttttgaatagccaaaaaaaatatgtgcaattcttttgaatcccttggaagctgcttcagccagtggaagttgaaataatgatatcaaagccttatcttttactaaagcttatgtaaaacgttaaagctaaggaatctaccttaggacttttccaaaacgtgtgtatatacaggttttccaaaacgtgtgtatatacaggttttccaaaacgtgtgtatatacaggttttccaaaacgtgtgtatatacaggttttccaaaacgtgtgtatatacaggttttccaaaacgtgtgtatatacaggttttccaaaacgtgtgtatatacaggttttctaaaacgtgtgtatatacaggttttccaaaacatgtgtgtatatacatgttttccaaaacatgtatttatacatatatatatattccaaaacattgtattcaatcccttgaagcgagtgtgtatccaggatacatatatgtatatatatcctggatatgtgtgtgtgtgtgtgtgcatatatatatatatatatcctggatacacatacacacacacacacacacacacacacacacacacacacacacatatatatttttttaagagacagcgtagctcttctgcttaggctggaatgcgggccacaatcatagctcactgtaaccttgaactcctacgctcaggtgatctttctgcctcagcctcccaagtagctaggactacaggtacatgccactgtgcctggctaattaaagaaacctttttttttagagagtgtcactatgctgcacagactactctcaaactcctggcctcaagtgatcctcccacctcagcctctctaaacactggtattacaggcatgagccaccacacccagccagatatttgttaaattataataaacaatagctctacaaacttcattttgtacatactgggcttctaaaatgaaatgatttcagataacaatttgaaacttatatagggcctcaggacattcttgataaaacctcagaattgaaaatgcaatcaggtattatgtgtaattaaagtcaggctattttaacttgcctcattaatttggagtttataactatatygacaatatctgcagaaaggatttgtttagcatattaatggtttagacaaggtccaaataatgcacacctacaacaaacttttaagcacttaaaataattttagaacctccttttgcatgaaaacaatttgctaaaataaattttatgtctatttgtaaatttggatctcatatgctctctacttagaaatattccaagatcctcttactaaagatatagtcgtgcaccacataatgacgtttcggtcagcggcagaccacatatacagtgttgataccagaagattataatggacttgaaaattgtttaatcatgtagtgacgtggtagccatccaaacatcatagcacaattaccttatttttaaatttcctttagcctaagtgtacagtgtttacaaattctacagtagtgtgcagtcatgtcctaggccttcatattgactcacctctcactcactcactcacccagagcaacttccagtsctgcaggcttccttcatggtgagtgcctgtacatgtgtaccattttctatctttttatttttttgagagagagcctcaatctgtcgcccaggctggagtacagtggtgtgatctcygctcactgccacctccccctcctaggttcaagtgatcctcgtgcctcagccacccaagtagctgggattacatgtgcatgccaccacgcctggctaatttttgtgtttttagtagagatggggtttcgccatgtctgccaggcggctggtctgaaactcctagctagcctcaagtgatctgcctgccttggcctcccaaagtgctgggattacaggcatgagccatggcacccagccattttctatcttttatgctatattttactgcacagtaaaactgtttcgaaatgtttagaaacacaaataattatcaccatgttatagttgcttaaatgagtatacagatttgtagtataggagcaataggctatactatatggcctagttgtatagtagactctactatgtgggtttgtgtaagtgcactgtgtgatttgggcccaacaaaatcacctaaggacacatttctcagaatgtgtttctgtcgttaaatgatgcatgactgtgttcaaactagttcctcaaattagactggcagtatttattcaccatagctcaattatgccagtgtttaatttatttgtctgctattttgtaaacctgaggttttgtaatgcatttggtttggtccatttttaagaggtaagaaaatatatgctttgtagaatttttatgttttctgtatccaatgaacatgttctcccaagagtcatgatgttttgaaggatgctmtacaagttaaacgtcatcagcgatcttctcagccaatgcgttgctttggcacatgtaaatacccactaggcattgtgtcctgtgtgcaactctgaaatggtgactgactttcgtaatgcgatttatttgcaagtgaaggatctaacatctctgtagttcttccacccttttgcctccttgacctccagtaaattctggcccaagagagagtgacttcagaaaaataaccacatatttagtaagcacctactatgtgtaaggcaccgtgctgggtgcccgaggtgatttaaatatgatagtgcatgcccctgacttctaaaatcatatttgggaggcaggaaaacaacaaacgtatggtaccacagtccaaagcagaggatacaggagaatgaaatcgttactgggagtgaggatattaaaataacagctaaaaaatattgagcacttaaaaagtaccaggtacktaataggcattatatttcatttaatcctcacatcctaactgttaaattttgtccctgctttaaaaggaggccctaggtgtggagagttcaagtagtttacaaaagactacttgagtagttcatgttagtggagctggggtttggatcctcatctgatacccacatgsttacactctgccctactgaaaacttcatgggagagaccaacagaagacagaccaccaggcattgtgagaggtgggcatttggtgatatttttccaaaacacagatcagcaggcgttgtgacacaaagacaaaaaaagtgtggacgtattcagggaatgtgaatagttaattttgtatggggggcggggcgcggcggtatagttgaaataggctgtacagggaagtgagaatgatgttgtagaaagtgtagaagtgcacacctgaattcactggttgtgcacacagccttggagtttccgtcacgttgcatggagatatgttgcatttgcagagaatgtgacaagaattgcarcccctggaatggtgcaacactggccaccctggatgaggagamggttataaggcaactcaatcacatagtatacttcaagggtcccgggctaaagggatggtggtggaaacagatgagaagagaagcctcaggcttgcactagttggagttgctggatgagggagaaaggagagtctcagggatggtagggtggtaatagcataagcacacaggagacacaggagaagggatgttcttaggaggaggcccgtcatgagaacagcctgagtgtgaagtactagtatgctgggaataccccagtgaaggtgctcagttaggctgctggagccattctggtgtagcaagtggtggtgaggttgggttttcttttctttttgagtcatggacagctttccatgaccattttggattctcaacaacaacaaaaaatgcatctatttatgcatatattctaacatagtatcaggagtctaatgaatattcaaactccctccatagaccctctgtgcctagcttaacaatgcttaggctaaaaacatagatatttgaagccatatatattagtgggtaaatttactggaaaacagtatgtaaaaggaaaagaagggggaggtaaggtcacaaccttaggaaatgctaaacttcaggtgccagaaagggcatgtgggcagtggtggggggtaggaatcctcaggacacatgcaggaggaagaagatgaacctgccatttgtagtgtcctaggagcccagrgtctttccaccagaaggctgtgctcagctgtgtaagaacatacaattgggaagatcatgactgaaaaactttagacttgatgagttattgcagttcaatattatccttcccatttttacaaataactttgagaaaagaggtcagattttaaactgaagaagagctggttgtgagaaattagagataatacggaatcttattaatttggtgtcacgatatatagtaatttttcactaatttctgacccaagaaaataagcaattagtagtaactaccatgctgtgtttggctctagagggcatttaaatataaaaattgggtaattttatgtatgttgtacaaataagtttcattttacaaatgagttttgccaaatattttacacacttctagtatccataccaaatctttttaatgagctctaaattataaaagtacaaaaagccactggaattgagaggatgtttgcaaagaaggaaatcctgtggtataaatgacccaaatttatagtattttcaccatactgtaactagattgaaggatttttctattgcattttgtaatttggggaaaacctgtttatttcttctgtcagacttctcttaatcggaaatatttatagtaaaatgtacacaaaaagtactttttacattataggtcattttaaagttaacagtattgaaatatttaaaatataggcgaggcatttcactgaagtttttacttctatattattgtaacctgacttagcatctcatataagaaaaagcaagtctccaagtatgtaaataaatttcaaacatgcttctacttttggtttatttgtatattcatcacaaagccttaaacattaacagataattctatttctccttttttcatctttgtcatctattggaatattaactgttaagtaattttctaattttgctaatctagaaaaatatcaatatttttcttgaactatctcatgactatgtattgtttccacgattcctttctactcttggaattcgtcagattattaccggagtttgtatatgtatttttttccctctttttcatcctaacaaactcacttcctgtgaaaataatcagagcactgtcaatactaccagggatatgtgacctaaatcttaccccaatacttctcagaatgatgagtttctaaatgtgtttgggctttgccaagccatcacacactttaaaatatagctatggttttgaatttccaaatgcattcacattaagtaattttataatgttgatattttttaaatgggaaaatgtgagttgggtcagaaagctacctttcaccctgagttctccagcttggtgacgtgtggtaccatttcattatgcaggactcagtgaacaagaagtcagttgtcatagccgtctgtttcctggtagtttacacaccagaaactgaaatctgagaatggtacttgaaggaaaacaaagagctttacagtatttttttttcttttcaggaaaacacacagaagctaattttagcgtcttgatcaaattgacccagcctttaaccctggcaaacgttaccacgacacacttccaatagacaatagtttgcataccagcattgcactggaaacagatgtgcatgcagaattggcgtcccctcccccgccgcaagactgagcccgccactgtcatgaaagttgaaatgtggtccttcctaattggggaaaaaactaggtcttctttcaaatttcaaactacaagctttcatgacttctttaaaaatttattatgtcacagttatgttttgaccagagtttcaaaatatcattcactagagaaacatctcttggctttagcatgatttttatcttggtaaaaaaaaaaaaaaaaaaaaaaaaamcaaataaattgttagcagctgcgctattcatgagtgatggttacacagtttatatattaaaacgtttggaatgtgcacaattacctcttttactttctcaccaggtctcctacagtttatataaactgcatttttattaccaaagaactgtccgtctttccctccttatcctcgcccatcccagcttggcagagtttgctccctaaagcccacgacagcgagctgccccccgtccccacccaccagccgcggctcccctggcagtgttgaattcagcctctccgctcaaaaggagctgggagggtttgctcagtttaggattacttagcatagacccttctcagaacctccgggagacccactcacttccgaaatgcaagagagtttttccatttttgccgagagacaagaaacaaatatctgtgtttcttgagcaatggaaaaggatgtttcctgtctcatttgctgtaataattgcttctctcaaaatatcctttcactctgggatagctataattggttgcagtatatgcatccatatatagagtccatgtatacaagacacaatgaggtggcattttgtaagcatgttccataacttaaaaatatacatgtgtttagaaaacattggccctgtgacttctctgaggccatagagaagttagtgacaggcaggcctgggctagagccccatgcccatgcgtgcaggaccacccagtggccaggagcagagatttctatgttgtaggcagagaaatctcaactgataattcatatttttaaaatatgaatttaggggaatgcatcattgtttaaaaagcagcaggcttgcagttataaagcactatgtaaactatagtgcttattagaattttggaaattcagtgaacttactcagttcaaaagtgagttgttagctctctacaatattcttgtctctaaagaaataatgagtgctgcttattcctgtaggtgaagtgtttacattaaaacgtaaacagaatttgaggattctatttagaattataattcatctgtatggaattgcagtaaacagattttggactactgaaacagtaatttcatgtgagatatattaaatgcaaaagttattctaaattttatagggtccataaataaccattagtcagatacccagaccgaaatgttatttcttatatttgcaagttaataaccaatagctacatttgaactttgtgaagggaatttaaactattttcctggaatttttgtttgactgccaaagggggaaaattctcattggactttgattgtgaaatccagtgctttttgtgtgtatgtttttactaccaaagcattctttatccacattttattttttcataataaaattcatgcctcttctttcagtaacacatgagtagcagctaactaccctaagtacttttcccctatttataatttatattaaatgttttcaagattttaggtttcatttcattaatgctaagtcagaaatatgtatttataaactataagaaaaactagaaaatgtacaatatcataaaataattgttttcagagagctttttatattagtaccagacagaaatgtttgtgtgatatatgtagttattgtgtagagtgtaccaagataaacactcaaaattaatgtaatactttctgcttagcatgaggattcctaatctgtatcatactattttattttctttaatgattttatcattacagtgaagcaaggagacaaacattactcctaaaatgtctacttgtcatattctatctctatgagaaacataacccaaggtagatatatatatatatatatatatttttttttttttttttgaggcagagtctcactttattgcctaggctggagtgcagtggcatgatctcagctcactgcaacttctgcctcctgggttcaagcaattctcctgcctctccctttcaagtagctgggatgacaggcgcctgcccccacgcctggctaatttttgtatttttagtagagacagggtttcaccatgttggccaggctggtctcaaacttctgacctcaagtgatccacccacctcagcctcccaaagtgctgggattacaggcaggagccaccgcacccaggcccaaggtagatttttaagtggatataaagaaatatctttcaaagagaagagcttttccatgtgacttttctgatacaccaaggtacaactcagtgcttttcacagaaaataatgaatccgtcgaataaaaacatttgagtttattaaaataaaccacttagtaattgcagggtataacacttgggccttacctgcattaactttttatttctctgagtatgtaaatatatatgtgtaaataccagcttctgtgtagtcatgccgcttttcttaggtgtggccactgctaagttactatgatgagtctgtttttcaaccttgccaagttaaaagaaaatgtagactcatttgtattagaataggaaggcatgttctagattgcagtctgtcagtagcatcttgtatgtgagtgtatgtgtgagagtgtgtgtatgtgtgtgtgtgaaggagcagtgtgttaaatatatatgtgtaaataccagcttctatctagtcatgcggctttccttaggtatgaccactgctaatttactaatgataaattttttagatatgctttagaattaaggtgagtggtattatctctagtttgagacaaagagaagcgaagtaacaaaaggccacataagtgataaatagtggacctggagtttaaacctgggatccccacctaaatcagaaatacaaaatcaaccacttttttgatgatccagggtctatgtatatttattacatgtatgtatatatgtatatatatatgcatgtgtatatatgtacatacatacatatagatgtgcttgtactagtgtttttcccaccagatagttagcctttcttctccccttgctcactttttttttttttttttttgagatgaagtctcactcttgtcccccaggctagagtggaatggcacgatctcggctcactgtaacctccgcctcctgggttcaagtgattctcctgcctcagcctcccgagtagctgggattacaggtacctgccaccacgcctggctaatttttgtattttcaatagagacagggtttcaccatgttggccaggatggtcttgaactcctgacctcaggtgatccacccgcctcggcctcccaaagtgctgggattacaggcatgagccactgcacccagccaaaggagaaaacttttatttagaaaaacttaactttcactcgttagaaaaacgtgttttgataatctaatttttaaaaatgcattaactatgtcttatcttggctaacacattttagttgacctggttatttcccagaaatttaacagatacaggagatatattcatttttggtaatatttatacctgtcgtcataccataaatatgcatcatgcattaatgtgcattcagattatgtatttgcatagttcagtcttctgtactttctatagttttcaggtgggctagtgattatggggcatacttttaaggcaagctctgtatttcagaaaagtaaaaagtggattcactttttccccctttttagctttttgcaccattacaatttttctttcctttgcagttctccattaaaaaaagaaagaaaaagaaaaatagttgatcattctgttataatcttccttaccgtactgggaatgggttgcttttcctgctgttaaccaggcttttacctccgtcctagggtgcagacccttgaagtattgagagagtcaggtcacgtgaatagcatgcagattgtagactccccacaaaccaaggggtgctcctgacccagcttcatctggagctattgccctcacaaggacagaagcaattaaattgtttgttctgctacagagtaaatggtctactgagaacttgtttgtacttttatatgtttttatggttaatgttttcagtgacccatgttataaagtaaaccataactacttctgtaagcatgttatagtagtaaagcaaaactgtatattcctagatatttatatcacttcactcaaaccctcggagtaaaacttaaaaaagaaaagatttctttccaaacatttcagttagaaactcaatttcagaaccttggcagtcttatgtataggctttcttacatgattgttgaataacatgttattatacgtggggggaagaatagttcttttgttggctgcattacattttgtggtgaaattggagaaaacaaatcattaaggaagtctattttggttcaagacattacacacttatgacgagtctgtttttcaaccttgccaagttaaaagaaaatgcagacccatttgtattagaacaggaaggcatgttctagattgcaatctatcagtagcatcttgtatgtgtgttatgtgagtgtgtgtgtgtgtgtgtgtaaaggagcaatgtattaaatatatatgtataaataccagcttctatctagtcatgccgcttttcttaggtatggacactgctaatttactaatgacaaatttttttagatactgctttagaattaaggaaaaaaatattttctcgatgaaatgttaaactctgtgacaaccccacccagacctgcttttctctggcagttttcctagtcttccaaactctaccaccccccttccattgaaactcctatccccacctgtgccttatggtcagcagacaaaaagaaagacctccaccactttaaaaaaagaagaagaaggagaaaaacaaatctgtatttgtttgttgcagtttgtgagcagagatagaagtatgaaaagaaatacactaaactttacatgttcattaattggttgaaaaggtggagaaacctgttaattctgtgcacttctgtgttctttgattaatgacaatgagaatatattacttttatatgagttataaaaaacagaaaacaaagcaaaatcgtttacagtatactgagaattcccagtactgtcttccatattacctctttggataatatccgtattttagaagggagtgctgccactgtatatgaataaatcgaattaatggtggtattttgttgggtccccatgatacagtcatcagtgaacacctgagctttggaatgagacaaaattggaatycagtcataaatcagtcgttttatgtgatttaagactcctaaataagctctctgaatccatttccttatctggcagtcataaaaatattatttctctaaggtggtacaaagatgagataattaaaacctgctagcacatggcagatcttccataaataccacctgggatgttgccaagcacacagtaggctctcataaataccgagtgaatagataggcgaatgaatggtcacttcttctcccaccctctaccgcctaccctatcccaccaccttcagggtcagatcaaggcaggagagcaagcccccaacttggctcagcgccctcactggtggggcagtgagcatgcgtgctcgtttacttccccttgcagagagccgggaatgttagcaaccatagtgtgtcagaggtggggaaatggatttggtgtcatggatgaagactttctattcccagctgaagttcttccttttcctctttattttgcaacattctgtcagctgttttcttgtgaaagaaatctggaagagtgaaaacaagaattgacatcaggataaggtgtaaaacaggcagagggtcatcaaaaacagctgagctaacgacagcacgctctctgtagaatgtgtcttggccttcttcttgtgttccttttcatttaaaaaagaaagcaaaaagaaagggattggaagtctcatcttttgccttgtgagtgggagtgggtttatgtttaaaatctcacttgaacaaccttatagattatttttaataaaagatgtttgaaaaaagcatgtggcccatcacaaaggagaaaacaaaaatttagactgtttttcgtttggttttcacataaatggattattccatggccatattcaccaagtggaaggtccccttttaattccatataaggctgttgcgcaggtctagggatctattcagtgkgatcaataaggttgagaccacatgtagccttcgtttagaacttagcagtaaaaatgaaggcactgaaattttctgctgtaactatttttctccagaagtacagaagttatataatactttgtgaaaatatcccttattatatacatttgcatataataacttggggtaaattttttacttatatggctaattgagactctaagcctgcctaaggtgaattgctgaatttttttcggtagatgaattgcatttttattgcagacartacatgcattgggtgacaaaatctgaaatgatctgaagtatttgaacacagagtggagccccagctttctatgtgaaaaagatgtactatgtacgtgggagattaacccacagcagaatttatttcatcttaaagaggggtgttttataacatgattatgtgttttgtcttagaatttatgatactttattgcatgcctgttgtccacaaatgtgacctattttgttttccatatttgatttgaaatagacacctttctttccttagtacaagtcaattaaatacagaactgttcctactatcatttttaattggaaactgaaatatcaggaaatgttacagaatcatgaaataaatgccagttgtttaatttgttttatrtaaagaggtttagagactgaattataaaacaggattgcttcatataaatgaattttgaatatatatatatttacgtacacatatggcatctaaagatttagtataattaaatatgaatataatttttaagttatcagtcaaatatatatattacatccatgtgatatttcttcataaaaacacaaaataccttcagattaaatctgtatcttttactttagagttccttaaaactatgaacatgaagttgctcaggtcttcataatatcccacacgtgtttaacgtgctctcttgcctcatgtggcacagccccaaacttagaacatacagtgtgggtggtcctgagggttccaaaggcagctgcgttttttttttctgggtgcccttatcttgagtaatagtgttgaaaacattgtaagacttatcagaatgttccagtagtctttatagtcccaaaatgcacacctcttttagaaaagaaagaaaacaaaaagctgttctagccgtggtcctttgagtgtgggatgcttcttcctgtagtggagaaggtgcctgtctctggtacaggcactcctacagctaaggagaatgaaagcctcccagttttgctaactaaaaaccttcttgtagccacattgcatttaatcagactcttatgctagaactgacattctgatttggtttaaaattatgtrgtcaatcttagtttttcttatcaacatgtcagaatctgctgaaatgaaagtggaawcacaaatcacaaataggctccaggttcccttagaacactgaacttcattttgaaagtacagcacagctctcataatgtcagttttcaaaatttactcacatgaagcaattagattttacaattcaggctctatatgtctttatataagcccgaatattactgtttatgttaagcaatgcatggaatctattctctgattttccccctaatatttcagtttccaattataagacaataagatggataattctgtatttagttgactcatactaataaaaatctaaaaggaattaaaaaaaataatacatgagcacaaatcagtaaaggctttattactagaggaaaagtcagtggatcgctcctaccctcttacttgaagaccttacgtgtcgcatggggatgctgtaatctttggaaagatgctcttatttaaacctctggagctctctctgttttctcaaccatccattattagctatctagaactaattactctcaaggcatcactttaggaattttatgattctttctgtctcctgggacatcatgtaaagttttcaaatgataaaagaagcctcaaaaagttatttctttttctcaagtcaggtgaagataggaatggctcaggagtagcagtttctaaaataacctcacttaggcattgagcgctgggtttctcttctgaaccttcatctaacgaacgctttaaagtgattagcttagaaaaaaataattcttattctttcccaagattcttgaaaacatattgattcttaatatctaattttatttcaatttttttaattaaggtttttttttttttttttttyttttaagagacagagtcttgctctgtcacacaggcttcagtgcggcggcacattcacagcttcctgtagccttgaactcctaggctcaagtcatcttcccgcctcagcctcctgagtagctgggactgtgctcatacaccaccagacccagctaattaaaaaaaatttttttggtagagatggggttttgctgtgttagcccagctggtctcgaccgcctcaagcagtcctcctgccttggtctcccgaagttctgggattacaggcatgagccaccatgcttggcttaataacttattttagaagcacctagagaataataaaaaagataaagcaataaaagcactaacaaaaataaatttctgttcccagtatacattctttttgtactgaagtctaagaaatctacatcaaactgagccttttgttttcttttcaaaaacagatgaaaaaaccatctacctcctcttcaatgagactgagaatttacactaacaaatctcaaacctggttgcataataactgcagcttcctcagcccctggtttgcagatcctgaatcagtcggtggggggtttgggaactggaatcgagttgtcctcctcctgttctggtgtctctgacctgctcccttccttttgtggcttctcctctgtgtcccctttgctgccccttctcttcctcttcctcctctccctctcccccttgcctttctttcctctgccctttcttctttttttcccctcagatcctcctcctgagtttcctagaagattctacagctgccaacactgggaacctctggtttgctctacttttctaaatttactgttagcgaaactgtggaggccccagtaggtaatcctctggtcctagtttatggactgaaatcccccttctcacgctctcttcacatcagtcaccagggtcctgggcctttctttaacttgctctgtgctcggagtcctgtgtactttgctggtcctgtttactctgcctggactacacagcctctccctggcttgtgagctcctcctcgttctataaggtcctcctctaaaatgttgcctctgtgagttttgcgccaatctaccttttacaccattcaaaacgaattcctctctctgcggtacttctatagcactagtgcagatctgtatttagcatttattagatcttaattgtagatctcttcccctacttgactatgattcctcggacagtagaaaggtatcatttgtatatttccagcagtgtacctggaacatagtaggtgtacaatgaacattggttaaatgaatatcagagcttttgattctaatatgaaaacagagctttttaaaattaggtacttaatttctagtggatttgtgttagatagcccaagagaattctgtggacattgtactgtaatggaccatcaaacttactcaaagaattgcagatagcaaaataggaatagaaaaccagtacatcactgtcattaaacgtggagtgcctactgtgtgcagtggcagtggaggatgagcagtatttgcatctttcagtgaggcacgaaggttgtgcctgtagatgtttcaaatgcttgttgtaacaggaagcaagacacctctttcccgtaagtctccagaaagcattgtgaagggcttcagttgaaaaaaaaaaaaaaaaaagcttgactagtctaaatattttaattattgtacaaataagattttgtgtcttaaagatacaataaaatgaaataatctactccagttaaaagcagtactcatttatttcatttattgaaggtgtttttaatcacctactctgtgaaaaatactggagaattataactagacattaataaaactcagctgataaggcttccatgacttgtttgtccaaatgtctattcatggcagttcaaacttcatggcatcatactgaatattagaaaagatcgcaagagtatgttcttagatgacttttatggaaaaggacatatttctttttgacaagggtgaaagatcttaaataattattttatcatttcaacttcagaaatatatgagcgtttactcagcacagcattgtcttgtggtcagtgaagtaatcagaaaaccaaaagaagactgtaaaagtctttcctctaaacacaggaccagctctcatcaagattctgtttcatgttgtcagaatcttcctaaaacaattacaaaccactttacagcaatactgggagagsgaaaaaaaaaactaggagaaaagacaagctcatgcctaagtatcattgtgagatacttcccgtttccacagaaaatgccacaaggatacataattgccacaaaggtatgtttttagtttccattattgttctgtttaaaagccaaaatgcctaactttgatcattaaatggtgttctaatgaaattagccacagtgataaaggaataatcgttctaaatgccaatctgatctygccattggcctgcttgtctgcaaggttatgtccagtcatctcctttggctgaggaaacccttagtaattttgacccctgccaaccttccctcttcccctcctccctstctgttccctggcagatcaggctcttcacgcctctttcacataccctgctccccctgccataaaactgctcctttcagccaggtgtggtggctcacgcckgtaaccctagcactctgggaggccgaggcaggtggatcacctgaggtcaagagttcgagaccagcctggccaacacagtgaaaccctgtctctactaaaaatacaaaaattagccaggtgtggtggcacacacctgtagtcccatctactcaggaggccaaggcaggagaatcatttgaacccaggagatggaggttgcagtgagtcactgcactccagcctgggtgacggagcaagactccatctcaaaaaaataaaaataaataaacttctcctctgccccctgcctattcctcccacttgtcctgcccacctatccagctgagttccctccctctggtgtgccccatcccacacctggggctgctctgtgacagcacacagtgacatacgcagttagccagctccctctcctctggaatgtgagctcctctaggggagggcagggctgtgccttattaatttcaataccccacccccggctcaggggctaccacatagcaactgctcagtgtagttgagctgcgtaaccgaaggaactgttaaccacatttaagaattaatattggttattaaaaataaccctccaatgtttatctctgtgacacttgataccagtgtctaccctttgatatgtgcaaataagactataaatataaaatatatttcaaagtgaacctgagttgtattgtaacgtatcaccctccggttaccgtaaatattccatgcgtggttgttgcatcactctccctccattcccctgaawagagaaaagattctcttttcttttataccaagattgtcttttcaggatcttaatcctgatctgttcttaggatttcagaattctttcactagccctcttctttrtcactagttctttaatttacacagttggttggctggttcctgttactcggcctacaaatctgtcctatgtcatctcctttgagtaatttatatcctccataaaatgccacgtagaggcactttttcacatttttgagtaatggcgagaaagaatcgccttgggaatcaaaaatccaatgagtcacaagattattttgttatttatgaccagagagtggtcattgacaatatttggcaattttacagctatgagcctaggctattgtgctttagaatgtaatttattaagcaaataaaactcttactggtaatgggttctgttaaacctggggaaccacgtgagctcccggccggtacagctgtggaagtttcatagtagccacatacatctcagatgtctggacactagtattttacacttacttcatggttttatttattcagttgcctttatattcttgattggattctgaccaaccattttggtttaagaagtcatcaactttgagtagtgagggaggagcctggagaaaataaaatgaatttatgttgaaaaaacataaatccctctttcattagatatgacatttagtaaatccaggctataaagaaacaccagatgtgttcatggaaagtattgatataaaatcatctttgagaaagaaaaagataaggacctaaaatttccttaaatactaattgtgtttaattccattaaatatagacacagagataggtaaataatggatgtgtataggtgtacacacacacacacacacacacagagagagcatgcactagtgcaaagaagtctgagtgagcaagcttaggattttttttaaaaaattactcatttatatcagtagtattttgtaatgttgggttcagtttagtaagtaatggaattctagctattatcttttaatatgtttggaggaaaggaaaatcttgaaattctcaagataagttgatctttttctaaatggcaacattaggcaatattaattttttaatattttaaaacttgaaatttatctcctttgatgtaaccattgtatgtatgtacctggcacctaggattagagaaattcagttctgtactaaactgtatgaaacactgtcaggaagccggatctaaattcaagctctaaatagtgatcaataagaaaattccatttcttttgaaagtaagttctagatgttcagctagctctctgctctacaagtcattcatttaaccgcaccgtagccattgcctcatgtctctgtttagcaagaggtggacaagtaagacttcagtatgtgtggtagaagtggcaataataaaaatgagattagaaggaaatgaaactagttacgtgaccttcaggactacctttaacttagccaagcctcatcataaggaaaagctaagagcccccaattttccaactaacagtcatcatttgccctgagaaataggatcaaaccaacagcacggcagcaacttgttcattcattcaagcatgttccttgttcctggtacctgactcaccttaggaactgtgaacacacagttgatcaaatacatgacaagaagttatcagtttaatcagggaggcagaaaagcgtactgcaaattacataatacagtgggaaatggcttttccttatgaatttctagttatttatatagtctagaaatgaagtcctctgctagttatgtccattgtaaatatttctccgaatctgtggctttccttttcgcttccttaatgctctcttttgatgagcagtttttatctgtcatgaagtccagtttataatttttttcatggttagtgatttttgtgcctttaagaaatatttgccttaatccttatgattatgaagatattctgtgtttctttgagaagctccatagttgtggctttcacatttacctctatgatccactgctaactaattttgtgtgtgatgtgagrtagggatggagattaattactttccacatggacatccagttgctctggaatcttactgaaaacacctcccttggccccactgaatggctttgatggtgtcattcagttaaaaattagaataatagatacatttataaaaactatcctaatgaattctaatgagtttatggtataggtattgtcaaaacaagggtgaaaaatggacacagtttctgccctcatggggttcacagtccatgggtctaccccttgattaagattgaaacagggacaggattgtatgagagtaacaatccgtcarcttaagcatgggatccctatcagtaaatctcactgcctctaatatgttctttgaatttttaaactaaatattgtgactaaaacaaaacaattaggctgagtgcagtataatcccaacactttgggaggccaaggtgggaggattgcctgagcccaggagttcgagaccagcctggacaatatagcaagacctcgtctttacaaaaaatgtaaaaatttgccaggcatggtggtacagacttgtagtcctgcttctcagggggctaagacagaaggctcacttgagcccaggaagttgaggctgcggtgagccctgattgccacaccgcactccagcctggacaacacagcaagaccctgtctcaaaaaaaaaattataattctgaaaatgctttttcaaagcataaaaactgcttccactcctctccccgtattgagatttttctggtctaaattaagacaaatatgcatattatatttatagcacgaagacagaatctatccataattcacaaggctggagtggttgaatgatgagatttctttatcctaaacctgatgacatacatatacagactgagcagtggctgtcaactcagaggaagaaccattagttggttcctgaagttgagagatatttacggttctatttttgaaaggtaaccatggcttaaataaaaccctgtgattcaatgctagtatcagtatgtgaaaatatcaacagagcctctttctcattttgatatgtaagaatcctaaattctaacctagacaaattcaaatctattatatgtcactgccaactattaatagctgtaataacagacggttttggtgtcaaataacaaaatggacagagtggaaacaatgtttaagccccgatttgttcagttacaaaagagcctacagactcgggtctcattaaggatttgtgtgtatgcatgtrcgtgcctgtgtgtgtgtgtgtgtgtgtgtgtgtgtgtgtkcccatgtgctcgaggtctcttttgacagttgatagagcacccatcctgaaattcagtctttctttgatttgaattacattgacagcataaaccctaatctaaaggaatctgcctctctaatccaaaaccgagttttcaatttataagaacctttagtagtattcagtacgttagcctatgataagcaaatactaggacctgttttaatttttgaatgactaactccttcctccaatgtatgagggactaaattggacttggagagaaaagttgattacccagatacctttttaaagctttttttctttcctttgtttccttttttagagacagggtctcactatgttgcccaggctggactcaaactccttggctcacaagatcttcctgcctcagcctcctgagtagctgggactactgtctcataccagcaagcccagaacccacatatatttttatatacttaccacaattacatatatctacattttcatataaattgaagtttcataatgaaggagcataaaattggaaacaacctaaataccttataccagagtttctccaactgtttttgtctcagaactcctcttgacagtcttaaaaatgctgagggtccaaaagcacttttgcttatgtgggttatatctatcaaccatagtaggagataaaactgcaacatttaaaggatatttattcatttaaaaataacgtgataaatatttttatgaaaaataactgtattttcccagacaaaaatattagtaaagtggcattgtttcaaaatttaaaaaaatctcattaatgtctgcattaacagaagacagttgagttctcttaactgcttcagtatctcctgtatatcggtgaaagaatgtggatgccaaagaagtatggttctagtattatcataaaaatggttttgcccttgaagaccaaacgaaagcatcttagagacctccagaggtgcctggaccatactttgggaactgctgccctgtactgttagaatgcttatggtaaacatgttagagcagtacagcagaataccatataactctgtacagtggcatgtatgtgggggactgtcaatacatcaaaatacactttttagtaagatatgttcctcctggtcagaaaagaaacagtgtatcttgtaatactgtagtgcatatataactaccaggaaaaataaagcataaatgtcagaccccttcttatattaatatttaataaaaatccaacaacttagcattgaaccatctcaaagaactaaactaataatttaccttatagaaatctaacaatataaagacagagatatgagttctgtgttactgaagagagacccatcagctccaaaaatgaaataaagcaggtgggaaagttcacactctgttatagatggtaagatagctgtcttcatttctttttgaaatagaaagccactcaacttctttagaaggttggctacaggatacttagagaccaaggtttttcctcgaacgaaggcattaattcttttgaagcccttggaaatacattccattgagagcttagtgttctatgccttaaagtttggcagagatgactttagcctaaaaaatattaagggtaatatagttcagctgccattgaaaatgagcgtatgatgttaaagaattttagaaaatcacaaaatagaataaacacatttctgccatgtaaaaaaaaaacctattgataaggattcraagtgagtttttaataaatttttagaattttctgtttgctggcttctttctataaagttaatgtataatgaagttctataattttaaatgaaagcatatacaattcatgacacataggagatctgagtgttctgtggtagtgaatctgctgaggcccagcacgcactgcagttctgattcactggcaaaattagcaataaagccaacagttttacccagaatcccaacagtggggaagaaaaaagcagagaggagaagtggaggtggcagacgccacagttaccagtggtrgagatgagcctcagggatggccggggtgcgccacatgggcatctgcccgctggccagccgtgagttcagactgacgggaaatgcatggcttccacggcctctttagaaccaagctggtgtgcacaaggggaactcgccacgtagcagtgaggactggcaaactgcacagagagcttttattgttcttgcttctttagagcaaatgaatttacaaatcaaattgaccataaagcatttaaagaatgaagacaaaaaggaaacagcgcatcttattaaaaacaaaaacaacgacaaattaatggttaaagtttcgccttgaatttgagcagtcaccttatgcttagaatctgttttcttgtggtgaacagccaagttttaccttctcttttattgaaacccctaggattttggcacttctttcaaaatgtgtattaaaactcagagacactaaatcatacctgtgagcttaaagcagcaaaaataatttactgaccttattcaccccttcagttgcagcaaactctttactgtatatttcctgtaccccaagcaagtggagagtccattttttacttctgaacctctcctccactctctcccacctcatttcccctcagtgtaaccaaatattttcagcaactagaggcccaaacaatcttgttaacttaaaagttttcctgcagatttattgacccagcagagttaaacagggtaagtgttgatcaacacctctcaggtatttctttaattattggcctggcatctctagagcctaataaaaatttgtaatgtgagtttgtaataaagtaactattatatttatttatttatttatttatttggggacgggaagggagcattttggtttttctaaaggggagcctccaccttttgccataaattgtagctgtagccttgataatactgtggttgaacaataaggtctcaagggctgctcgctgaaagagattaaactgtaattaaactacactatgagtaaggagagacggaaaaaagaaaaaaaaaattgtggttttcataaagcagaaaagaaatacattgactggtgtttacagcccagagacgttttttgccttctcgactgcaaaacagtcttatttttagccagccagggttttgcaagaatgccgtatcaatcccacatttctgttctttgaaataattgcaccaagctggtcccaaatcagcagtaactaactgaaaagcaggagggaaacatttctcaaacatacagtgccgatgaaatttgccataacactatgagttatgtcggctgcctgcatgaggttccacataatgggaaaaaagaatttaactagatcttaattgaacatgcagctacataatatccttttgtttaggctcaaaaatggatttttttaaacctccttatcagcgcagctattaaatattgtggctctccagctatcagtctccgatcagcacagttagtgcattttaccttccaaggaagtgcactttgagccagctggagcacaagaaatgtaggagctggagaaagtcgtaattgaaacaggcgactgcttcagtacagacaggaaataaaaggaagactggccctccaatggattaaattagatgtttcaaattcagacagtatcaggaaaaagaagacttatgttagagggggaaaaaggtaacagtaagttcattcagcggagcgccccctcctccccgcataacacatgtttttgctggaatcttactgtgccgccctgtagggcagactcgcccaggcctacctcctgccgaacaacagcggagcaggtccctgtgttaatgtcacactatcctttctctcctgcctgccctctccctttcagaggcctttggtattctatttccataaattaggcgtgaaattatgttgggctgaggatacatgatttcagctgttttatagttggaaaggaaaatcttttagacctaaagcaaaaacatttttttaaatatacttcctgccttattagtttgagatatgcctattatagaaaatgcttgctgtgtagaaactttattattttttttggtctcacagattgctgtcttgtccttcagttcaagtaatattgattgagtaacgactataggcaagatcccagactaactggtgtctgcaaaattgtacattcattaggacagtattaatttatgggaaatgtaaattctcaaatgaagacttgtacctctgttgaaatatttgaagaagctgattttattttacattggaataatctactgaaactttcaacattttttcactttaggtggtactgcatctccgtttttctatttaggcaaatatggcctttattaagtacaatttgcttaaatatccaactcccaattttgttactggcaatgcctgagacagtggcttttaaggtcagtggctatttcaacattatagtgtccagtgccgtttttattcggggtgggagggtagcattagatgaagtctttctctgagatgtaaataaataaaccacaaaattcaacaagctaaaaattactgtggttcttctttgtcccctcatgaaagctgataaagttgaacagtatagcaagtggacagaattccaactttcaagcttgaaaatgcctttcttttctaccctctatggccctctgtgtgcggaaaacatagtcttggaaaaatgtggggcttgtgcccggggctgcccgccagagccaggcctcatttgctcaggtgtgctcaccgttttagcttcttgaattaagccctgggaaaattcctgtgcaaacatctgctccctttgccctgcctctccgacgggagtgaggtggggtggggaatgcatcatgtgagtgggttttgcatggaaaatgttgcgggttgcctccactccagctggacagctttatacagctataaacctttactgctgtattaaggttctattcaaagggtatgaatctctgatattcatggtccaacaaaactgttactaattacttatctactgaatagctaccaggattggcagcttgaataacaatcacaaaaatctgtgtactcattattctccaacaaggcaagattctcattcctgtaaggagcatagcttgcttttttgaaaactcatgaacaaactggaaatgtctacttgtgcccccttcctcaagaggccaccttgcatagcttcctcacagaatatttctctgttcctgaaaggtaatttcggtgcaggtctcrtagaataagcacattttacagctctgggcaggctattctagtcacaggtcctcatggtccgggctccagggagcacctggaagcagattgtatcccccgagtgtcacttttcaggagcagggatgaagtggcagctgcctgctgcagagatctgtcacattcactaccctgaaacaggacacactcttcaagaatcaccaataaccagagttcgctcctccagcagttcttcccagaagtttactcagcaccttgacatcttttggtgtgactccattcttggaggtccagacccacctctgtgctttcagatgcagaatcacatccacttcttgcagctgtttgctgtgctgtgcctgcttcacccagggctaaggagctgatgataactgtgcagtgctctgaagaaatagatgtctaatcccagcactttgggaggctgaggcaggcagatcactgaggtcaggagttcaagaccagcctggccattatggtgaaaccccatctctgcttaaaaaaaaaaaaagaaagaaagaaaaagaaaaagaaaaattaattgggcatggtggctcattcctgtagtcccacctactcrggaggctgaggcaggagaaacacttgaacccaggaggcggaggttgcagtgagctgagatcacaccactgccctccagcctgggtgacagagctagactccatctcaaaaaaagaaaagaaaagaaatggttgtgagtaggagtcataagaacattctgctggccttttatagatgtctaaccctcctgagaaaggttggtgttactatccactttttacaaattagtaaactgagacttaaagagttgaagaagctcaccaatatcaatacaacctgtgtttggagttgctagggttcacaaccagagttctcagaatcggaagcttctttatttccatatatcatgttacttaaactagaccttattcaccttggaaacctaaattttatttcaggagaccttgtcgagaaggaagaatttcagaggccaaccaccatatgggcatcatcaagcagccctagtcaaggtgggaggaaggaagggaaggctggcctcctcttcccctggcctcctgctctcttcccttactgcaaagctctgaatcactgagaccattgcagctagctgggattttaatttttttwaaaaaaagacattaaggtatgaatgacctactatcttaacccttggagagtctgttaatctaaayaaatctccaaccgatataaatgtgtgaggaggtatttgaagtagtggttgagttttcttgtgtgttcagagagggagtcccaaaattagtgtatctaggaacaaagtacgcagtttgtttcgtaggctgtaaccctgaaatcaacaatgtgtgttagtggcaacatacagcattaaatgggtagcatatgcatatatcaagagtcatcttctctggagtctccctccagttttaattctccctccctccccagcccctcagccaatttctcttgatttccttgctttgccttccttctttcctgacttctgttattctagaatgtgactagaaagtagggaaggaaaagcacagccctattttctcgtcttctttcacctatttcgataataatgaagaccttcagacttaaaagtatatcttgatcacagttttcccatttaaaaattattcccatcagaggtatcacaacttgaaaaagaaaactagaccaaaggcaggtggctgggagtcaaaaggcaccgtgttgccaaggcttgagctttcttagatatatgccatccactccagcatatcatcgttagagattaaatccataataaattggatgttttaaagagactgttttttattatctgaacattgaggggaaaagaaggagggagcgggggactctttgccagcgggaagcacagaactagctgcctcccctcaccacccgcaccctccaccctcgtcacggccagttctccactcttactccacctccagcccagatscctggctccagtcccttccctcgctaatctttgacctacacgatatcctagggatcggtaggagtaaaggtttgaaagttcctatttgaaaacaagtcttagtgatcaaaatgcctctttgctggctggtgargtatggaccaggcccagaacaccctatgtttgacagaagtaagttgggggatttttaagttatttgtgttccagtactttccataaggaagaagtatgttttgaagcaagcaagatacaggtttgtgttgccaccagtgtgtcatagcctgcagttcacacacccggtgtaggtgtcaacaaagctgtctcgtattctccaacagtatgcgatgccaaaaccagaaaatgggatctgattgcaagggaggcactggcaaaacagaactttacagtgctcggttctgtttgacatttaggggacattcgcttggaggactcccaaacaagtaatacgccaagagaagggatggcttctgccttctcttggagattcagcgggtggctggctttaggcagaattacagagccttctgatccaaaggagcctcacgcttctacctccacatgggcctcactcacattccagctacgagaaagcctggatgctcttccagacccacccacacaaaaggtttgcacaagactcagtggttctacaggttctgctcttatctgagaactaagtacagaaacagtttcttaatatttctttaaaaatctggtttcttttaaaattatccactacagtgacttatatgaaaatcataccacagtgtggagttgcatcttgcaatgatagcttttaaattcttaaaacttttaagacaggagtgtgtgtgtgtgtgtgtgtgtgtgtgtgtgtgtgtgtgtgtgtgtkctctgtaattagaagtaaatttatacatcaaaatttaagcaaggttgttcttcagagtgcagtcacagttaatgaaatttctagaactttggaatgagtgcttttctgaagctggtacaaactgagatcgaaaccaaaactggaaaaatgtgaaaactttgtgtcctttgactcctttgttcaagaattgcaggaagatgttttccaggagtacttttgaatatataaaaccaggaaataactatgtgacattcctagcattagaactgaaaaatgagtcagagacaaaactgaaacaaacagagacatcaaagtgtctgttatcaaagtgcagatgccttgacttgttagcaaacctgtcctggtatatgccaaggcatgggatctggtaattatagaggacactccaagctgtgcccattggggtccacaaatgcacaccttcccttgtatttatgtgaatggtgtcccttggaacataatttctgagcttcctgggttcagataccggctctgccacacatcctagctgtgaaatgctggccaagtctattaagttctttctgcctcagtttctctctatgtaaaatgaagataatattcatacttacctcataggattccagtgggaaattaaacacattaatgtgtgtagctttggactgtgactattttaaaatgttagtaactctgatgatgatgatagtactgacatatacttgccactgtgcttttcattgtacaaatcaaaacatcacaaaacacttacttgagaggagctttcagtttcatagaaagtcagcataggtggacacaagtctattaaaatatttatgacctaagctcaagaaggaagtgagagagttctttttacctttttaacatgtggagtttaccagatacacctgtgcttatagcaggccagctataacatttaaatgacaatttttccactgactggggggtggggacgctttcatgacaaaactgtttcacctcagatcatcaagcattagagtttcataaggagtgtgccacctggatccctcgcacgtgcagttcacagtagggttcacgctcctgtgagaatctgatgccttggctaatctgtcaggaggcagagctcaggcagtaatgctcgcttgcaggctgctcacctcctgctttgcggcccagttcctaacaggccatatactggtactggtccctggcctggggtttagggatccctgcttgagcacacrgcagtcrtgatctaaggatcatttgttgggcatatagtaacaccattcttcctacatttttgagccayttgaataaacattcctcactgaatcagatcacttttttactgacttactgtaagggaatgggtaaagcatctgatgagcgtatcaaacatcactacagtttgaaggagctacatctttcctaagtgcagaggaaggaagaagcttgttctctgcttcctcaagtttttcgctactaaaacaaagtgagcatttgaatggaaaacacagcaaattaatattttatgattgttatttttaactgaagcgagagggtcagtgaattattatgttgctaatggagcaagtgtatgtagaagttcaatattagaagattgaaataaattttgagggttgtgatttgaagtcatattatcccaaggaaattttccaaaacagcatcaaatctgagctcccaaacatgacttgatcattatgagcatttggggagctttataaaattagagtttcctgggcccctctccagtatacctaattgcagtctgcaggcgtgaggcctgagaatttgtattttttaaaagtgccacaagggtctgaaaatacactaagagtagtctrtaacctggaccagcttcactttttatcctattttttgaagatctatcatactgaaaaatgacaagtttcatactttttcttacatagattttttttcctacatgtcttcctgcctaagatttaatgactacagatcccagatctcggtaagcctacaaggaggaactatgaggctgggtggacttccagagccagcattccaggatctcttccccagagccctgtccacagttcacagctgcagagccctccaggtcctgtggggttgttgaatagagaagcatacacaaccctgtgcttacatggggagaagaactctttccgctgaagccacacctctggttaccactttctcttccgatacaggcatcctgctaatttggtggagtttgtagagagaagagaactggccagtccccgccttccccccatctctggcctcactgtttattgggtcactgtgactatgcagattatatatttcggataaattattagcattcatctgagtgcttatttagggtcctgttgcaaatgtttcttgaatattttaaaattaaggagatgtttaaattgagtacactgaaatgtggatgactgttaatgtgaatgaactgctttcagaataagaacatttatttacaagttctttaaattgcaaagcttattataccattgaagcatttcatgtgaactttctgttttgaactaatctttaaattttatttgcattcaaagcatatttcctcctgatttgcccatttctcattgtttgattatcattttaaaatctgtaatgtttcattcaccttttaatttttccccaataaggaaatacagtttatgaggcacgcatagatactcttcctaataaatgatttaagagaaatatatgcatatatgcatcatatatctgtatgtatatatacagatatatgggaaaagggatgaatattcagaaggaagatcagtagactccacacagtcattttagccattagactagtgttgtatgcattagtgtaattttgatgccttgtgggttttagatatarctgggaattccttaaaaaacaaaaaatctgtacctcagagtctttggtagcatgtagaagtctatgtatgaaaatacattcatttttgatgatgatgatgattgttattatttttgagacggagtctgactgtgtcaccttggcaagagtgcagtagtgctgtctcagctcactgtaacctctgcctcccggactcaagtgatcctcccacctcagcctccagagtagctgggactacaggcatgcgccaccatgcctggctaatttttgtgtttttgtttttgttttgtagagatggggcttcgctatgtttcccaggctggtctcaaactcctgggctcaagtaatcacccaccccacctcagcctcccaaagtgctgggattacaggggtgagccaccgcaccttgaccccagcctcattttagattacttaggatatcatcgtccaggtgcagtggctcacccctgtaaattaacttttaaatacatttaatctagaatggaccatctgtctccttttcagaggttccatatgatttttatatatttgggataagaatgacgtgtcccgaatagtacacatataaaggtcttgtcaggaaatgtatatagctctcaatcaatctataaaatgatttgggtaccattgttaatatccagagttgagaggaagttttgaaaatgatatttaatcattccttcaacccaacagtgttaaccctactgtgttatgaagtcaaactgaggccaaattctctaaggctagtacattttctgcagcttctcagtaccagatttgacctcagattctgtccctagacatagaacattccatggtttcgaccaccaaccaaacacccagctttctatataatgccgtagtttcctttccctgtgatttttgctgatatacatgtgtctttgtttatttaaatgttttgtaccacctcagtggtttatatatggtgctgcaattttccaagtatttttttttttgcctcagtgaagttattttagagaatatcttagattaataaatctttggattagagtagacatacgtaaatgggatttggaatgcaattatttaactggaaatcttcatgggtttatcataaaaggagaaagaaccctctaggtgttgatagggcattggaaaagtggccagtaaattcatttcaaaatgttaggataaactcctcagatagatccaaacattatattttgttgtttcttttttctcatcctcctgggataatcattcactgacccaatctttgtttagaagtatccgtcttcatcccctgttcacttaaaatgaagttattcccacgtaagtgtgtaaagccctttccatcattccacttctaccattattggcgactctgtcctatagacctaagcacattatattttaaactgagtacaaacatttcttcatttttggcaataagctggtcaaactttctgtttttttaaaatcttagacatttgggagaagcactgagatgtgagatacactggcagggaatttgtgtttctccaggaatactaagcaaaatgagaaacccagaattccaggtgaccataaaattgcagagaatgaaggaaaagggtagtaattttcctctacgtggcttttgacttcctttggcattttaaagtaggaagatgagctgccttcacaataaactatatgtatcacctctgtacacaaggtactccagtctccacctgcggtggctcagaaacatccaggtgtcctggagttgatgacattcgctgacataaaagcagactcatcaagtccatggacatcttaaagatcataagtcagatttttgttcatgaacttcttgaaagaggtcatttaaggtttcccaccctggttcaggcctactttaaggggaaatggaatttataagtttatctgaatttcttgtaaactgttctgaagtgagctggaactcttaagctcatgttaacctctatctctatccctagaacagattcataggctcctaaagccgtcctggagtagagaagtacctcacaaatgcatagtcattttatcatgggttctgagactatcatagaacacaggacattggggaatgtatcatgacccaggaaactgccccacagtgcccctggaggaaacctgaagaagtcgtttgttgaaactagaagagatcactattgcagtgagtgtagatagggaaagggcatcaagaaaggggtgaagatgagatacatggggattagaggatatactgaagagtgaaaacgtctaataagaatttcatagtgagagatggaaaatataaggaaattatcatatgaatatgtgaagaaaatttcccagagcagaatgtaattcttgagattgtaaaggctgtgtaattgtccagctcagtggatgaacaaagacccacaccaaatactgttattgtcatatttcagcattggagttaaaaagaagatcataaaacttccagaagtacagatttcagacacatgatcaggagtaaatttggcattctatcaatattggaataagaagccagtagagcaaaaccaccctctaaattttggaaatgacttttaatttgaaattctaaaccaagtcaaggtattacagatattttcaaacacatatcatttttaatgtaattatcctccatgtacttttctgagaaagctattggtagatatactctaccaaaacaagggaatacatcaagaaagrtgaaggtgtagtattcaggaatagttgcaggagatccaacacagagagagaagggaattctcaggatgacagcaaaggaagtcccaagcagacaacagtagctggtctaggtgaaacgatcagtatcgaaggtgaaacaaactggattgaacactgatcccttcaagagagatgtttccaggagaagagtataaaggaagcagtaggttctctgacaggtttgaaggtatgaaaaattacattggcatgtgtgttatagaaagttggagagtgtgagaaaatgatatataaggaaaactaatccgaggaaaaaaaaaaaactaacagttaagcctggtggggaaaggggatgggtttttaaagaaaggaatgaaatcatgttatactagttgactctgaagaaaataatatttatayagaaactaataattgctactatgaatatagacttaaccaaaaattgagaagtaattatagaggggaagtgagtttaaaagtatataaatatgctaaaaattctgtagtgctgtaataagtcagtagttaattcctcaaatacatcgatcaggagataacagaatagacacatcatttggcaaactataagtattgaaaggggactctgaagagtctggcaaggtgggaggagcaagaaacaagagatttctgttttttattatcagtctcatcaatatttgactttctatattacttatatatgctattttgattagattaaaaattcattaaaaaatgtgtcatttggctgtatattataaacagtagtaaagtttaaaaatatattcaggtttaatctttmctaaaaacaccaaaatgcacgttgtattctaggaacaggaaataatatgttaattccacttaggaggaagggaacaaaccatacttgtttcttattttttctgattttacaaaaccagtgacttaaaacaacactgctgtggactgaattgtgtctccccaaaattcatatgttgaagccgtaactcctaatgtgatcgtatttggagatgtggcctttgggagatcactaggtttagatgagttcaagaggccagggcttcataatgggattagtgtccttataagaagaggaagagacatcagagctctcccccagcccaccacggttgagaacacagtgagaatgcagccaccatctataagctaggaagagcatcctcactagaaaaagaccatgctggtagtgtgatctcagaagtatagcctccaggactgtgaaaaaataaatttctgtgtttaagcgcccagtacaaggtagtttgtattggcagcccaagcaaactgagacaaacacaaattatcatcttacagttctggaatcagaagtccaaatgagtgttatagtcaaggtatctagcaaagctacatcccttccagaggctctgggggagaatctgtttccttgccttttccagtttctagaggccacctgcatttcttggcttgtggctctctccagtgcctacaaagtacattctctgtcctttgcttccatcatcacttaccttctctgtcttctgaccttttgccttgtagccctttgatgacattgggtccacctagacagccgggatcactccccaactcagcattctcttaatcacatctgtgaagaccatcttgccatgtgaggtaacatagtcactgattaggagttagggcatgaacatctttgggaggcattactcagcctaccacaagaggtaaagcaggcagcagcagaacttcttcacacttaatccctaagtatcacgattgttgtcaatgaactggcattcactgaagaccacatattcctcggtacatgtggatataaatgaaaattcaaatcatacaattatatatagctactatagaaaaacatatatactatacaaaaacgatatatactatatataaccgctatagaaaaactatagaaaacctcgatatgttggaaaatttggaaacttcatgtaaaatttgcctcatgaaatttttatctgcttgtttcctttaaaacaggtaggtaagccaacagcagctacgagtttaggtgctagagtcaaagagttttaaaagccaacttcactttctgtgtgaatctgaacaagttactcagcctctctacatttcacttttgcttctttataaaataaagaaaatagtagtgtctgccctactgggctgtggtaagaccatgcctaactcccatggagactttggaggcattcagtaattgtgagctcttattattattattgctaattattggctcrtcttctttttgagaagaggggcttgtctaataagccctaaatgctgaaaatttctttctgagctgtcatactggagtgtgaccatttatttctggatttctcaccaagtgagtaggattgataagattgttgacagaaagagtgaggttttcgggatgactctgaaaatgtgagaagcagttcatcaaaaataataagaactttcatagcaataaatgcaatgtcatatatttaggaacagaaaaatgtatctttatgaatacgagatggggaaagactgatagaatataccagagtggatcacaaatgatagaggctcataaatataagtgtgatattatttaaacagatatgccacttctttaaatgctagcataatatttagctatgctaccagcagtaagatacaattagaaagtaattttaggctgggtgtggtggctcacacccacaatcccatcactgggaggctgaggtggaaggaccacatgaacccaggagttcaggactatcctgggcaacatagtgagaccccatctctacaaaaaaaatacacaaaaattagccaagtgtggtggcatgcacctgtagtcccagctactagggaggctaaggtgggaggattgcttgagcctgggaggtcgagactgcagggagccgtgatcgcaccactgtgctccagcctgggtaacagagcaagagcctgtcaggaaaaaaaaaaaaaaaaaaaagaaaaaagaaaaagaaaaaataattttttgtcaagttctatctaacttatataataaagaatttggcctttgtcctgattcctaggagggagactacatccttggcatttcctaagtaataggagcgtctctgtaattcatggtgggcccctgtatggtttcagggtgggggctggccaagctagataagccaaccatgggcttagagagtcagggccttgagccaagtgaggtcagcatacggccagtggttcagtcagtcatgactatgtaatgaaacctcaatagaaaccctgggcagtgcagcttctgggtagtgaacacgttgatgtaataagggggtgatgcatcttgagcacatggaagctttgcctttggggccctyccagaccgtcccctgctgtcccttcatttggctggtcctgagttgtatcctttctaataacactgtcattacatgactattgtgtcctgagttctgtgagtcatcctagcaaattatgaaacttaaggtggagacccctcaggtttataaccagttggttataagtgcaggtgacctggggaccygcaaaccggggctggtgcccgaagtgagggctgtctcgttggggatcatgcccttcagtctgcagagtcacttcctaactccaggtgggtagcagcagaattgctttgcagttttacactaacacatagaggaaaatgaaagggtgtccagagatctaagttaattaatttttttattttaactaaaatccaacaaatggcttttgaaagagttaaaattatttgacctaaaatatagagttccattaacagcatttgagccaaattccagcatttgagaaacttggatatttcttaatgactagattgaaggttagccctaaattagaggtttgtgaaaaaggagaattctgacagaagctctttttctcttacctgaagtaatgaagtcatcacctgcaggtcttattgttccccttccattgctagtgtaatatcagaaactacctctttcttgtaactatttccaggcagatcttcccagacatttctgccaggaaaccccaggatagtaaagcctgtgaatgaattgatgcatacctcttaggaaccaacaaaatgcccccagaattaagccattcatgtgctactgcctccctttaactcttgtcccattgctttttaattttgaagaaattgaagaatctattggagtacacagtacgcgtaagacatcctttacctgtgcaattctgccctgcattctttaagcctgcctgttcctccacctccctggtctgaactctggatcgccctcccgactgtggccttggtcggctcccagtctttgcctctgtctcccttacttgtgactcatggtttcctctctgtgcctgtttctggcttgcttgccaagcctttcctcattgcctgtctaacctccacatgttaatattccaatttgacatctgggcgactgagagcaagggtgagcaacctgccaaggctgcacggtgggcagtggcaggtctgggctcccagtctgcctgtctcgggttgccttctccacactctcccatgccacctcccactagccgcacctccagcaccaggcggaggtccayatttcagtcctgtacacactcctctttgaaaaatgatgcatttgccagcaaaaccttagggttaaaaagtttacaaaagtgtgtgtgtcccacaaaaaatattccaaacaaaatcccctcttttctgtatttacgcatttcaggcagcttatgaaattgatgtgggctttgtttctactctgcagtctgaattctgtctttggtgtccaggaaaatgtttttataccttcttcacattaaaaatgtttcaagtatccaggacttgttcgcyctcctttttcatgtatttagatgaagagactttgcatattaattttgttgtttaaaaaagagtcaaaccaattgatactaaaattaaaaagctaacaatttagatccaacagaacatttcaagatctgttttttcccttactgtaagtgaaattcccattaatggcagccaggcctgaacaccgatagtgaatggggcctctsgtgttctgagatggacttatcacatggttagcagctgggatttatgtggagactcattaaataaaacagcagtggcagctacctcctgctgtagtacacttggaggtacagtacctgaatttttccaatcctagctggtcctttatactttgttttatgtctcgctcatttttctgactggtcttgacattttctgacctcacagtgcttttattattatttttattgctactagaacaatgataactcatgactctgatttatatgatggcagcttagccaggggagagattaaggcatacccaaaaacatgcagtaaatgttcaagtctattagcctttcgcttttattaagtgggaaactttagttttgttttgacacagatgagtctggagagtcatragtggctgcggggctgagcttgctgatgggcccttggctgtgggtacgcgctggcagagtggcgcgaggctgtaggtacgtgtgaggtggctcatggtcacaatcctgcagtcagctcactcacttccgttgtacattttgagtaactggtagtcattcttttgttcttttcttttccactgtaatcatagttttcaacttactgcagtgataaaaaaaaaaaaccacaaattactgacagatttccttgattttaataatttcgctatacaactgtctcatttaggagatgccacagctcctgctctcataaccaaaaccaggctcctgggagtgtgggcagcattgcttcgagcttccaggcccagagactttttcaggcctctgttgtgctcagtctgtagggaggagactgcccagcgccactccaggtagtgcctgaaccatcacaaactcagggccagagttcagttcatttggccccagtgtgtggccccagcctgggatgctgaggtccyctcctgcccatgaagcctctgctatgcttgctcaggctgtgcgagrggcttgtcttaagtctttgcatcctattcccagagactggagtcccactctttccctggcctgctggccttggttcttactggtgcttgcccatagccaaccctgcttcctgtgctgcttccctcagccgaggctctagacctcctggatgctttttactgaggcattgcatttccatctttctggatcacagttatcaacctcattgatggctgcaatttaatgaattttggtgatgaactgaattgaactgtaaatgataaaacattttcatggagttattaaaatcacatcattctgcatagattatatgaccttgagcttcactagaaagactttccaagaccttcaccrtctccaaattctcggacggcactggaatatcacgctgaagcagcagcacgctggttttacgtgaatttttttttcctttaccgctgtcatatttaacatctcactccttaatatttcagatttctgactaagaaccatctctgctgagcctcttctcctcctccatcagcacttgcattggaatttatttccaggagcatttttcacaaaggaaatgtcatcccttcttgggagtaagagggtgctgaatggtgcgcagaaaatgagcactgctgaagctcacagagatgagctctaccaagccactrtggcagattatgctctaaatacgaccacattggagtcccacatgctcttccagagccttgctacccccatcaggagatggagcctccttccctgccgaggatgctgggcaggayggtcatggctgcccagatgaagagaagacagggctggtgctgaggcaggtcgtggcaggcaacactgccccacctgacttgctctcgtgggatctagtcattgtcctgggaggrtgcccaagggggcccasgtggcgagggctgcgtagaagggcctggaggtcagcactgacctccagacataggagtgaayggcctttccaacaagtacagctgccagctgtggaatctcccagctcaggccccagacaacacctctgtccaaattgcgggcccaaagaattcatgaccataggaaatggtggtcttaagctaccaagttttaaggcaatttgttcttgctacttgttagaatttttcttgacctaccatctagagctcttttttattttttacattccatgctgaagatttattaagagcacaaataaaaacacgtttttattttgtttttcaattactaaccacctagatttgttatagcaagacaaagagcttcatgaattatatacataaccctgtttaggtaatataactctctgttagaaaataatgggtcaacttcttagactttgaggtgttactatagctttatccagcagttttatgttgattcttgccctgttagactaaaaagccascttttatcctttctttgagaaaaatttgttatagcacagattgtttctgcatcagaactattcttgaaaattctctaagtaactttttcttcatattttatgaatagtaatgttcaaaactaattgtgcagtagttcaattaattgtgcaattgttggtgttctgcagtgctccctcagtcagatccgcaaaggcataacagttgtagcttggagaatgacatcagtgcactttacacataagcaaaggaaggaagcttgctgctgggtggtcagccttagttcagtgttccatccaaaagaagcatgagccagccacactgtgaagcatgggaaaatggttttattcttttctgcagtctctagaagaagtggcataagggtgtcaatcacatgacccagagcagtaagtccaaaagtttctcyaccatccatctccccagatgtctccagatttgttttatccctctcagctccagactttgctctgacatccggccaaatctgctgtctcctctctcccctctggctctggcctctgctctccttcccgccccgggtagtcctgggatcaggcaaaccgaacatcctcaggcaggggaaagggaaggagttttgcgaaaattttcttttttttttttttttttttttttttgagacgagtcttgctctgtcacccaggctggagtgcagtggcgtgatcttggctcactgccacctccacctcccaggttcaagtgattctcctgcctcagcctcctgagtagctgggattacaggtgccygccaccacacccagccaatttttatattttcagtagagacggggtttcaccatgttggtcagattggtcaagattatcaaactgacttttcagttctctgtcccatattattatactcagaaatctttttaaatggacaaaaataaatagcccacctataacatacaaatattacttttattacaacagatttaatttcctaattttttttactcctgttagggccttaactaaggccttcagtgaagttgagacatgttcatggtttggggtttttttaggcttgttcatcttgtgtcacaacctactgagttatcacaaaatccagggcttgcatagacccaggggcaagggacagggcttcatagtcacccagagtaaccttcacatcgcaatgtcgtttctgtcactaagtacaaagagcctcatggccttttagtatgtgtatttgaagcttattaatgtgaatgagcaagcttccttgtcagatagcttatacctactgaatgttttcaaatttctctctaccttgtattttcagtagtaataaaattaccacctcttaaaatagccaagtatttattgtagcaatgttatcactacctatgtaaaacatcatggcttctcctaaggaacaaggaaaggttaaatttattcagtgtgcattttattattttgattcactaattttattcagattctatattgcaaacaataagagaatcgtgctcctccatttggattgtctttgatgtgtggatcctgacttcagtgtttgtctgatacttgagtcaggcattagggatacagtggtcaacgaagcaccatacttccatacttccctcaagggatgtataattttgygggacatgcccaagtaaatagattattaaaatatcagagcccattaagacttgcacctgcaccccgtggaacctcaggagcaagatctcccaaaggaagggatatcagagtctttaagttgagtgattaagtccygtttgaggtttggtgttaaataacttgttcagaattcagctccccagttactcccctagttataccagtttcttaaccttctcctctctcctctcctctcctctctttggcaaggtctcactctgttgcccaggctggagtgcagtggcgtgatctctgctcactacagccttgacctcccaggctcgagtgatcctcccacctcagcttccagagtagctgggaccacagktgcatgctaacatgcccgactattttaaatttttttttgtaaagatggagtcccactatgttgcccaggctggtctcaaactcctgggctcaagcaatcctcccacctcagcctccgaaagttttgggattacaggcatgagccaccacacccagcctctgtgatcctttcttgacagagaaataataatgcctcctttacaacgttattctgagaattagacaagttcacacccaagtatggggtagtgcctggcccacagtggacatttagtcaaattattttataagtgttttatttcattttgatctatgttctcatttcacccgtacttattccttcctaacaacttcctaatatttgcctttgccaagagtgagttaaaatcagtaagctctaaaaatcagccagttagccatgaggcatgtctatccaaagtctctttataaagagcattcatccttctatgggtaatacgaaatttgtgtttgaagatggtcccattttctctaaattcaggtttttattagtcctaacaaagttggtcttaaggcttggactggaaagatattattaaaagattacagatttgaagcttcttgtggcctctgatgagataataaaaatgttatctatttgtccttactcaagataaataagtaaatgaatgttcacagagcttaaattgtagatgagtgtgtttggttatgggcatctggaaacagtgactcctacagtacacctatgtttaggcttattggtttggtgttttatttttccttcatgctttttaaatacatgtaactgggtcttttgctagaaatatattttgggctaagttggtataaggtagtaaatgaaagaattggaccaaattctgtgagtctggactaaactgggtcaaattctctttcttccatgcagtttcaatagaattccattgaattaattttactcatcataaaatcagttgtatttcaagcctgcttcaagactctcagatccttttgatccaagcacaacagcctgttgctgtgcagtctgttgaacttggcggcgaggtgtagggaccgggatttgtgtttgaagttagcccactttactcctgctcgtcartatttcaggacagctgggattctctaaaaatcagtttttgccaaaaaaaaaaaaaaagttggtttgagaggattgcaccagttctatattattattcctacaatactrtaaaattgtacaaaggcccccatgaccattaagaatattggaatatggtgactcatctttcagtacyaagttgaaaggaaaggaagttatgaccagcagggttcatttcagaggatattcacagcgggatgttattctcccggctgacaattcagagggcttaaggccaygtgtggaagagccatcaccacatttgatttgaggtggcctcacctgggtgtgagggtgccagggagacagcagaggggagtaggccctagagttcaggcttcacacgcaggcactcaagctcatcaggcccagtgggagcagtggcctgaggaagtaggcagaaggctcggcagagtcagcttgaggagcagagggctagaagcccaggccagggcccagagtagcacaacagcagaaacccacgccagcgagagtaagcagcgagagcccaggagccgggcagcaatctgcacactgggcaaggaccaccagcagcagcaggaacacagcccattctgagctctgtccttcacccgggacctgaaccarcagcaaggacacctggaggaaggaccacgaaggcagggagccaggcagagctggagaccccttcgtgaggcctgccttggttccctgaaacacaaggccattttcttactgttggtcarcaaagagctttttctaaacagcaagctgtcatgtgccttctcggtgtycttcgtcttgcaatcgtgttttcccacttaaggcgagcgcttgggattcgatgcttttacaacacagattggtttttgtcgaactgcaacagtttcagagaaaaactcgctccccacagaccagtcttcaaactcaaactgtgttcagaatgagatgtgaaaggamaaggagaagggaaatctggttctagtttttaaaatataagtttggttccttgatgtaatttgtaaatcctgggttacagttcagtctctctgattaaatggaatcatcaccttggtgtataacaaagcaaaacaagatggcgaagttcttctgagtctgacatctcaccaggcactaggactcctgtgatggcgtgagcgagccctgcagcctggggaggtggcagtgagccgttgcgtgttgatgctgccrgcacctgggcaggagacgggcagaggatgggcagagcmgcgcgggagccagctcctgggcctggcacccagcagccccgctctcctcaggcaggcagagaggctgggaagcaggaggggaaggagagggtttataactgaccaaaaggctcctggtgctgcagacaggcagagaggtggaggccctgccatgccgtcctctcccaggccagcagaggaagcgcyctcaggaagctgtggggacaccgttgccactgcatgagtaacccataataacagtagtagttgccatttattgaatacattctgtgtgtcttctagcatccttggtactgtaatttaacccctaaaagaatctctgtggcactacatggtagtatcatcattttacagatgagaagactagggcctggagaagtgatttgcctgaagtcacacattgccaaaggattagaaatcattatttagaaaacaaaacttttactcatcaaacttacttatacaaaacacaattgccagcatgtatctttacgtataagccagggacaggctgcaagcggagcaagagtgtcggattcacttcgctctttttcgatttggcgtccattccccactttgagtgaggcgtgctcacggtggctcctggcctgagagagctgttgggtgggatgtgtcctcaaaagactaaactcagaactggaccacactgtgcctttggtggccttcagccaacygaggcaggatttgggaaaggtgattctctccagcagttttggtmccagcctggctgtgtctggtgttcactaaaatatgcctgatatgacagtcacagggccgacttccactccgctctgtgcactcgaaacacagacacttcgctcagttacgtctgtggccttcaatgagttaaagaagaaattgaatttggtcagtgtttttttcattttaccactatcagttagagggacaggttcgcatccatgattgagtcatgcttgtgcagctgcttatacgctgttcttgggaggggatgggaaacacaagagcgcttttggggtcatttcctatcagaggacattcgttttcacacagacgcacactcatggaggacatgaggattgtctctgcaggggtcacacgcattgtttctcgctggaaaatcgcagactctatcaaaaactttccttccagagtcattgtctctagaagcttctcaattcacacacagttacctttatctgtggtggcagttggaggcagagggcccaggtagagtcccaggctgttaattcacctgatctgtgaccctgggcattggcaaatgcatcaggatgccacaggagcacttccagctccrgaagcaggatacttcccccggccaggaggctgtgttagtgggactgggctagaatggtcagaactgggcctgggctcagaggggagcatcaggggatgaaagaccctcctctgaagtttccagtaagtggagccttggacagaaagtcctccagcatgaccctgagagggctgctggaggaaggctgtcctcgtacccagaggcatgtggacggtggtgatcacatctggtctgatttctaaacagagtacagctcatttctcttgagacccccacttgagcgctccctcctcactcccaccccagccaggactggtccagggatcagcatgggaggccacgccagcactgcgagatgatggggtaggcctttgaagggccagacacggcaataagaaacctgaaccaggagggcagcaggggtgttggggttggaaaaacattttcaggcgtatttctgctataagagaaaaaaaaaacaagaaaatgcaaggggccaagttctgactgcagagctggtacagtcctggcccacactggtcaggctgctgctgtcgacgagctttgaggtctgagctgcaaacgtcagcaggctttttcctggctggcaggaagggaaagttccctccagtgacagacaaaaataatggatttggggcaagtctaggccttcagaggttatagtgaaaattaatggagggccacgttaactaatgttactctaatcctgcagttcgagacattgggctaaatttctgttttatggcatgttttacaaactaacctattttagatcttggaacactccaggctggagtaagttccaggtcaggaaggctgccccctcctcttgaattccacagttccttggccactcctcagcacagtgcccgccgttccactcgtctgctgtctccactgaacctttaacatcagctcatttatctttcaggtgttataataattgacttcaatcagtattccattatcctaaacaggcaattatccacattgtcacttttgcatttgctcttttgacctaggggtcacagaggccctagtgtaacagaatccagcaaagttattcccttacctgtcatataaatagtcatcccagcaaaatgagacccaagggcgcttttcgtgaggtgttgagaaggccagtctaactcgatcctttattcagctctttaaggaatgcagtactgttttggcactctatcaaaataaaacaaagttccatttttcagcttctttttttaatgcgtgcacccctgagcttacaaatgcttctttgtggccctctttattgaaatttccattcagctcttccatctgttagctgtgtttacctctatttctagggaaagaattcagcatttcacctttatttggggtgtaaggtcataaaactgtctggattatttcagctatatttataccaaacttaatattgcttctttaacaggtttaaagcttttaattccctggttcgttattcatggtgagccgtctgctgagaacagtttgcattttataatggagaaggtactttataccctcttgctatccctccatcccccgaagaagaaagtgttccacaaatgtgaatttcatccaaagatcatctaatttaaactctagttctattccctacacatgcctgctgaatgcacataattgcatttcaggagcagagacgtgytcaacattctcctttttcctagaaatattgatgtcattacaatctcgggaaactcttttcagagtgatggtgtaacacacactgttgaaatggagtctccagatggagctggtgtgtgtgtgtattttcttaatttttcaaaataaagtgacttcagccttcagcagtaaatctggaagtatatcaagaagaaatatagaaataacataaaataaaaatataagcagattagttttctttctagaattgccacatttaaaaaaatatcacacatcctccgaagcaacatgaacattaaggaagyagtgtggaatagtggaatgaacattacctttgaagtggacaggatctccaggctgcctaggagctgtgctatgtaggcgcagcagcgcgtctcccctccatgtcttctgccacccagcaggagccacgtaacctgtttcactgccgkcgtgaggattaggggtatggcccatgcccatatggtgcctggcacacggtaggcattcatcagtgaggggctttattatcattatgccaaattttacagggtaaaatgtgcctagaattagtgtctaaagccgtttgttttcacactcatgattatctaacacctcatctatcatctgggacctctggccagatccccacctacagatgctcttgttgttgcttccttagttgatgaggtttgggccacatccccccaggacttggcagatcttgggggagaagagtgtcagtcttcacccgtatatctgcgcatttcctgtttaatggtctttcagggcaggcaagytragtgcccagatagaaaggagcaaaatcagtgctttgaaaatttacttagaggcaggtttcgatggtgtaaatctgaaacagagcctaacagtccacatatttcactctcaagtgatgcccacagaccttaatttttttagggacaaggtcttgttatgttgcccaggctggagtgcaatagtgcaatcatagctcactgcagcctccaactcctgggctcagagtgatcctcctgagtagctgggaccacaggtacatgccaccatgctcagctaaatttttttttttttttctgtagagacagagtcttgccatgttgccaaggctggtatcaaactcctggcctcaagtgatctccatgcctcggccccccaaagcactgagattacagatgtgagccaccacacctggccccacagaccattttttgaaaaccaaggatttaatattccaaaaattctgtgtgggacataattcttcgtaataatggcgatgccttagatttaacgaaatcttaaatgaaaattctatgtatttttgcatcgtttgttcaaagagaggcagcaactgtcctctgactttccaaactcgatggaaagagaaatggtctttattcactgccctcccatgaatggttgagaaaactctgtgtcttcttgagcctggtgtrtagtcarctccggattctgaacsgtcacrgctttcgttggaggttgatgcaggcactgagtctctgagtccagctggctgcccgtgtcattccacgacggtagcagtgcagaggttgtgctagtacagcacaggaggggacaggacacccattgtattgctcagtagaatattatcataaaaccccacrtacctcccatctccctttttttatttctcaaaaataaacttttcttttttcayaataaagacagaaaagaataaatgttcattttagagaatttagagaacttgaagaaaaaataactattatgtaaagacagccatctattactcatatttttgaaaaagtgtaggataatttctctgtatttcaaagaaccgtgttttgaactccaagccacagaagtttctagaagaaaaacaaaaaactttcattgcatttcacagcaacatggaaactatctggcaaaacactgccttttttatatccctggatccctggagcagggcatcaggcyagctgcaaatcgctctatatacacaggcttcaaagtaatgtgttttgacccctgctaaacatgaggtcaaggaaggttcaaagtatagtgggtccaagcacatcatgtccagtgagagtgccaytcttacagacatctttgatttgtawacttgtggtaattttctggcaagtgacagtaaagtgttttatcgtaagaatcaacatattaatagagtttttcaacagagtaaaaggaaaaggcaccttcctctaagacactcaaaagatgcctttgagctagcagccaccmtgtagaattggtggtggttatgcagtgtttgtcttttaatatttgcatcgttttggctcttccagtatctccaaataccatgcagatagaaaggaagatgttgtatgastaaagaagatgagtagtggggtcttaycaaggttgtccataaaactccccaccttcagccatgcatgcgcttgctagcataattctccatctcttctctagaaggcttggtatttctgaagaacttcattcctgggtccttgatttattattacttttcctgtcaatcatattagctgttacagattttattaagttgttrtctctaacagacttgtctttcggaatcagccaaagacaggaggccatcgagcaggctccgcttggaaatttctcatccccttcaactccccctggaatggacattcctcgctagtcagcctggccttgcctctgatgaactgcccaccttcagctctctgaaactcagttccctttcctcaatctccagtcttctgatccctgaagttacatgccacactgattcaatcagatgactgcagtgatgactgatgaaagtttgcttctttataaccacagaggagagttttggaagctgttcytttaggtgaagtcgtttccaccccaacatgagttagcatgcctttctgcacatatgttttcaatgtgactgtagcctgaaacatctttcctggatatttggtgagacagacagaaggacgagtgtgtgcattcttgtacatgtttgtctgtgtgtctgcacatttacacacaatcatcatttggggatgctgatgggccctaatccactttaataacacagtgagagattgcctcatgctttgctttataaaatatgaaaactatctgcagctgtgaaggaatgaccctcataattcatctgagagcctgcccctcttccttgtgggatatactccatatctcatatcaactcattgctctgagtgtcctccacagatgcagaaagatcctatgatagatgctgtgatttccgcagcgggggtggttagcctgtgacatgtgagtgatgaggcacaagtgagttacgaagacagtacatctctccacaccagataatatactgtcctttattctgcagctatgtttatatgaacattacagctaagaaaagagatgagggaagtagaattcttatggttttgattcatttatttataaggccttgcctctgatatagtcagcactctttgggaattttttaaggagcaacaatggtcatcactttcttctttcaagattttcttcaattaatttttgtacgtcatgtttggcttcaaatagtttgtcatttctgtgctttaaattaaagctactactcaaaattcagtttagttcctgtttttcaaaaatgtacagtgtatagtggtttgaacttttgacccaatagtaaatgtttgaagtctgagatactcataaactgttaatggatttgatatttcttaaaaacaagtctacaccctttcatgtgaaactctcctgggtgcttcccaaggagactgaaatcttgattaactctttccttcttggaataagatataattacctccacggtagtttcttccttgcaaatcctctcaagaggagtgaaacggttagaattcctgtgtcagacactccccaaggagaactgggccagtccatctgacagccatcgaygctgctcagcacaggcctgtttccgagccagtcgagcccttctctggcccactgtgaagctgtcacaccacacgtgctcagatttccctccgatgtgcacgcacctgcccaagggcagccctcttcctccatgagtgtcactctgcaggttgtagtccccaggcatccccaaccactttgtgaaacgatttagcaccaacatgtatttcatgcctaacacttcaacattgctgagcgctaaacattctaagcagtggtcagagctttcgttaataaccttgttaagagaagagagttgtatttagagaattattcagtaaatgctgttactttcaaggaatatcataactattgagaaagaccttggagaacccaaataatatagatattgctctcaaatagtagacttctcttaaagttaaaaaaaaaaaaaaaagaggaccctctgtgcattttctaactgccttgaatgcatataaaatgtaaaggccatgctctgtttttccccttgaatttctgctgccttttttcatcatccagtgagttagtctaaaccctccttgccaaragcctcctctgtccttgcagtttgctttaaccctgccatttgagcctcatgtttgcaaatagggattagcaggctctgtcattcacaaagtaagaatatgattttacaatattggttccagctaatgacagttaactgctattttgctctgaaacatccatttcagcttaagcatgaggaatattaaacaggaacacagaggtagtattttcaataaaactctctttctagaaactagttgttgctgacaagccaccacctacagaacagtggagaggaagcgaagcgaccctgagtccatgcttgtttttgttttttacgtttggtgtcatcacgaaccctgaccagtttttcagccaggcttcgtctgcagtcatcagctggttttcaaagttcttatatgccagtccccacgaacgtatactcccccgtgctttgctagtctagataatccagcacatgatggcagatgatgttgcaccccaaacttcagtggatgacctctgcatctctgttcaagcgttttttactttaattgaagaaataagtagaatttgtaaaatgtctaaccattgtyggatgcagttccagtacccagtgaaatcctttaatggccccttttggatttgaaacttgccttttctctttatgtgcagattcaaatggagggggtatgccatgtttttctctggggattaaaagaaaggactcaggaaattatgtgcatcagaatttctccacacmtactacaagcactttccaattataagaaacatgttttttcttttctttagcatattccttccttgtcctaccctcaggggttaaaaaagagagagctcatgcattggattttgattatggtcttcaattcattgtctccttcttcattttccttgtaacagtaactgaaaatagcatgagattttggagattacaaaagggcagtgtatacttggacacattattgtactgttttcataaatatcattcttctagtccctgtaagcccagacctcagtaaggctacaggtttccgctcacagggctgttctttctattgctgttggaaattacacaaaaaccttctttgcctgctcttccttttctttcttagactctaaagtttctcctgagactgattgcctcctagatatatgttcgtgtttctcagatagctcttctcttcttccccttcttggatttttacagtattcatagagctgagcttaagcatcatactgtaccaatagatgctgataacgtaggatgcttttctggctggacatatcagatattgtcaaactccagctttcagttggaccacttcttatttctgcactgtgtgactttgacagatcagcgaacatctcacaggttacagtaagatttgcacaaaactcagaaatgtgtcatgaggaacaaatgacatctgcatgaaggtgttttgcaaaacagacagtgctgtgtagctgtaggatgcatgcatccaatttactcagaggaaatggcatcatcagtgcacactattgtagccaccattgtattgactcactactatttgcttggcaccgttccaggcacttcacactccttttcttgtgcattttgtttgggcctgcaaaggaggcattgttatcataattttacagcggaggtgacttgccagcgtcacagtcattaagtagcagagctgggattcaaaccagagtgtgtctgaggcccaggccttcctcatggtttctttcagcatcctaagttaggttgaagagagtgaggaggaaragaagacaaagaaacccccagcacagccatcctcagtgggatgcatctggaactgaatatgatttgtttgactgtctggaagctgacacgctccagattaatcacactttcaggcttagatggcttcactccaaaagaatattgatattttaacaccagggaggggctattttagcatattctgtgtaagaaataagtgactatgccttataaacatttcacttatttaatttatttaattttagtttgtttatatatcctatgaagacatgaatagctcattattttacatatatcaaaaatatctgggactgcctgaaaatggaaattaaataacacttttcataaactcacagtcagagctccatgctgcaatggcaaatgcctcttcaattattaccttggcagttttctttcttattggatcatcattttaaaataccttttcagaacagttgactggatgcttttggtatgcagactcctgattaagtgatcttctatcctcattaagaagacccttttggatgtttctgactaatcttctgccatctcactttcactttcctggtataaatttttggtttactactcagtggttggctctcaaaacaggaaagcaagtttgacttcataaaaccaacagctaacacttgcacagtggtttaccacttacaaagcaagtactgttcactctcattgtctcactccccacaccgtggggtcatggcagggactccaaatcaccaaggaggaaacggccatcccagaggcgctctgcagcagccgcgttgatggtgtctgtggcttcaccctatgtgtgctccacggtcagattctccgctgccacaacaagattcgatagttccttgtgtcccacacagctttacgtacagtgccttacgcgtggtcttcagtaaacacatgcaaaattgaagcatcagtgagtgaaagatcactggaaattgtggctttctctctgaaaatccaaatttcctaacctagggtctaaaactgtctgtgaatttcctcaagtcgtaggtaaaaatgtgttcgtgtgttggctcacacatgtgtgcagttctcagggaagaagatatcctcatttttcatcagattctcaaaggagtccatgactcaagtaaagttaataataagtgcttttaaaaattaaacagagaaccccaaaatgttgtaagattttagttagcattcataacaaaagatatcaatcattagaaagttacatttaggctgggtgcggtggctcacacctgtaatcccagcactcggggaggccgaggcgggtggtcacttagagtcaggagtttgggaccagcctggccaatatggcaaaaccccatctcctctaaaaatacaaaaattagccaggcctggtggtccacgcccataatcccagctacttggaaggctgaggcacgagaatcacttgaacctgggaggtggaggttgcagtgagcagagatcacgcattttttggttgtggagatcasgccactgcactccagcctgggtgacagtgcaagactccgtctcaaaaaaaaaaataaaaaataaaaaacatttaaactctgtgttacctaaaggatatcaaaattttgtgtctgtgctaattgatgttggtttgttagagctttaaactattgaggtcgaagcttgggcttcagtcttcctcctggccaattaatagcctcgttaagtggctgaggatttcactgagtcctgccagtccccttgaaaatgcccatgaggggttagcaaaagggaaggcagggaattacagaatgccaatcaattccatccctgtgcttcctgggttgtttgtgttttcatagcttcagtgtgaatataacttggattttagctgagaagtagcttgacacaggttaaagtgtcattttctttatttcctccagctttgagagaatttgttaccccagtattggacattccagaattctgtttactcacaagttagactgcataccttctgttacactggttgcttctgggagaaggatccgcttcctctttatctccgtaaacccagttctattagtgtcagttattgtcgtgaagcttgagtgaaagtcgatcacacagaatcaccaagtcaaaataaaggacttttctaggaacgaattacatcagtagataacctaacttaaattataatatactagtgaataattttttatcactgagtacttttctctctgtagaatatagtataatcagacagagtragctgttatttcctctcctgggcatattattctgtatcttttatctcttacaatattgaaggaatattaaaaggaactcaaaatgaataagcacacaaaaaatgagaaatataagcataactcttttagtctgtaaaatgtcagtagttaaataggagttgtgaagtgccagtttttacaaattatgaatattcaaaagatacaaaaacatgtttaaatcaaagcaaaatatatagattgagtattccttatctgaaatgcttgggaacagaaatgttttgggttttggagtatctgcattatacttactggtcgaacatcccaaatccaaaaacagaaatgctccaatgagcatgtcctttggacgttaagtcagcactcaaaaagttcagattttggaacatttcagatttcagatttttggattggggtactcaacctgtatattatgtgacagtgactaacaagaaacatttattcatgaaggaatgagtaaacgtagtacctccttggttgaagcaggagttctaaggtatgtacccaagtttgaattcttcagtatcttatctgtcatatattggtagtagctggcaatattgatcccttttttggagctgttcttccaattaaatttttagaagcaaatgctgaaatcatcatccttgcactttttgaacatatcctattgattatactgtcgttctaaatatttacaatgtattctttcaaatatttgtggatataatagaaagcatgtctctatgacattgtatgctttactgaagtgacattagatattcccctgtttacacacattcatatggttaatgactcatgttacctattaaggtttcctgtttcctgatttaaaagatatttaaaggcctcagtactgaaatgtttatttttacctctggatcttctgcttcatatagtaacatatacaggctaaatacctattttaacaccaccagacccactttttacctttattatgaaactagggtttggtcagctgagggcaagctgtatgcataacatagctggcagtatagtcggtgaactgtcaccragaagagagtcaaaatgtaaacactgagcaattctacagcagcttagagccgggattaactgggatcacctagtattctgtttttaatgaaactctctcccttgtattttcatgtttgggagagagtccaaagttatctcatgctaatttagttaggcagtgccctccggggatgtcacaggcttccctgacctctccagagagagattcagtgaagggatgaggagaattaaacattcctgagaaattggaaagcaacaacccccagagaatttgcagagaaactcgctccagactcggctgccagagactcaagtcaccttttcagcacttgcttaacatctctctcagtcccatctggcttgactcagaggtcagtctgggagactcgggagtggtggcagctcagagaagaattcaagggagggccaccaatagcacattctgctyttgttgcttgtttttatctgaagtacatttgaaaagatggacagggcataaggttgaagtaataacttgactttgcttggccatctttttttccttttaacccaaaatttactttaaggtgaactggtatttttatttccyaaataataagttccttgattcttgatgactgaaacttaagagttgttgtcgtttctgttatacaggacctctgtgactaattattttgtaattwgccattttacaaaggatattttcttttatgcgtttaatgaaatttgggggggtggtgggtggaaaatatgtttccggttttaaaatcatattccctttgtggtttacatttcgtatatgaagaatttcagaaaactaggaaaacaaaagtattattaaatattgaatctgtattataaacaaatctaaggagctacattttatagtttgttcatttcattttctactgaacagaataaagttcagtgtgccctacagctgtggtgtgagaggaaggtttggggatccctgctcgattttacacttaagtsagattcagcaggaaataaagaacccttacccggtgctcctttargccagattgctgagctgggagacctagctgaccagatctggcccattgccaggctttgtttagtccagtcagtgtttcagcccacagctaacattttagagtttgttgggtttttaaaaaacataacgcagtttttagcatgttcgatgtgcagctcctcygtgtaagcagatctggtgagactggttcaacatccccaggtgggaaccgtctgtgggaaacggggcgcttgctgggycttctagaaggggagagcctctgcaggctgcctgaggtgagcttccctgggctccggaggcactggagtagcgaggcccaccttagaccctcctcccgagccatacacaagagagaaatyacttttcaaagtaagcgactttgttcattagaaagtgagttatagcagatatataaatatgatactcatttcttcattggttcccattaggattctcaagatgcttttctctctccgtggtggcctacaaagagacctggcccgggagacggaaggtgtgggttctaacgcagagcctttccccagcacctgaaacagctcatgcaccgcgtttcctgaagcccaaatgaatctgctgcctcgaaagttctgtggtctttgctcctgtccaatttccagtgactcaatgcacatcagcttaaattagctaacttctccttgcttctgtgccacacacaaaaattaatcatggcatcaggtatcttgatgcactgaaagagtattacatttaaacagacgggcagcgaatccatgaatcatcctgagcttcacatacccaccctccatttcacatgtgtcgttttcatatagtgcagccgctctgcccactgggagagaggacgtttgcagctgatttctgaagtagaggagttaataaaggcaccaggcatgtttcgaaggacccaggtgaaagccttcttacatcctcagccctttgctttagggctgaagataggacagagagaagagtcctgggctgagtctcgcaagggccttctcaaggcctttgcgtttgttctgctatttcctaaacctttctccactgtgccgaaggagttaaagggytccgagccctaaccctccatcggggagtgtctcgggcaccagcgagaatctggcacaggacatgttttcatggaactgcttatcaaaactaagcttctgccgtttcatttagacggggtagattgggtggaaaactggcccaggraccaggaaatttgccttctgttcctgctcagccgccgcgtgaccctgttgcaggtcagtcctccaagcatgtctcagtttctccatctgtaaaattakwcaatgaaatgaatgttatttataagaaacctgagggaaatccttctgattatcttcactgaaacaatgcgaatgaatatttttgtgggggctctgccttgctctcttcctgggctcactcttgcctagcgccttcttatctgctcgaggggtttttcagaccacagccttctcagtgcttgttaatgggttgtgttcccatctcaccttcttgttaacaccatccccagctctaggaaaagaggcggtggccttgggaactctttatgccaaaataaacaacaaagtttggaaacatttagaccaagataattaggaaaatggtgttgaataaaagatagcattagaattgctaccatgcttaagttagaatccggttccaaaaagcacaatctccagttaactgatctgttgtaaattttttttttctttttggtttagttttgttttttaaaagatttaaattgtttaaatcttctgatcactcctgtcagttaaggtttcttcctcattgagaagtcacactggggggaaaaaaatgtgcccacagctgtttactatttagcaacactattaaaggaacactatttaacaataattcatgaagctccctactcagaaaaaaagacagctcctctgaactatctacctatataatacaaatttattttcttgaaattgcaaaaacccgcatgttgagacaaacatataaattgccaggatttttgtgttctttcagaacttaaatataaccaaacgattttgggcaaggaatcagaaattctttagaacggaaatgttgaaaccccagattcagttctaaaactcatctttcaaaaagaattcatgctctgaaaaatgcagcgtttttatgtttggtatgataacagccccatggaattatcacatcatatcttgacgatcgttacggagcggtgatgatctcttaggcattaacccaggattttctccaataatattatcatttataacagcaataacattttgtagatcacagagtgcttttaacatattatctgatgggatacctaaaaccctataacctgtgtaagaaaatcaagggtgaaatgagtaagttgtctaaagtgacaagcctattccagacagggcccagcgttttaggacttcagtccaagttcttttcactacatgatattaagactatcctttatcatcgagtattttcctgtaaaaataattcatttggaaagatgaagaaacacataaagcctccatctcttgcctctgtgaacctctcggctctcacatcccacacacaggcctccgttttgagtgcatgttttcgtattcaccctcacagcacattcccagctttaaatagttgtctcccatcttgtatgaatgtacatttgtgatcacagaaaggccttctcagttaccagcactgtttttactgctgggaacaaaatcatttcaaacaaacagcttttttttttcttcgctccttcactcttaacccccagcctcagtagcactacgaggagatgtaccggacaagcagcaggcaggcctacaatgcccgctctgtctttcccctgcagaccctccaaactagcaggggtgcctgccaagagggggtgcctcagctccagtggatcgcagcttcagcaaatggcactgctccctccaagggagccctccacctgtgcccccagtgtggagacagggagcactcttcactctcaggagcggatgttcactactttcactagtggtcctagcaaagtttcaaactgagctactgagtgggagacagattcgtaccaatggagaaactggttcttccgctttctagatttcatgccaccatgatgactgggatgtcccattgttccccctgggcaaaccggaaatccattttactgttagaaatactagatctttaaaaaatctgtttattctggagtcagtcacacacagggcaatctatgtgaaagaaaagaggaaggagcagttgcataattgtcataccatccatcatgttcattctcacactgaccatggtttttaatgtctgtccacctgcagtctgtggcctcgccagacagtaagggcagcgccctggaagtgggggatttatcacttgccagtaggtttactcttggggagacgctggggttttatctccatgcccctggagaattgacttactgaatgcttcccttgaagacctaagtcactggttcttcagcccctttgcatartcctctcactgaaatcagaactgaatttgttctttttcatttttggktaagaagatgcacattagaagacagctcagagcaatggggctgacctagtgggaaaagacactggtttcttttcacgtttctggatggcccgtggcccacatctgccagcatcttcgcacgtgtccacagcaccagtcagcctcacccaccttgtctttccctttgcgatcttagaaagaatttggtagaaatgggaaccgaagattgagcagaaagtataattaccacatgtatttaccagctcattttcaagagcagtaaaagtacactaaacattctgcttgtacatacactagcactttaaaactaccagctttctaaaacatggttttgatttttggagcaaacattcaattgctattctttgatattattgatttataaacaaaatgatcagcattccctaatgtctcgaagcaaagaaattagggtaacacatttaaaatttatcagtttgaaactttstaaatactcttccttaataataaccacaatacactgaaaatgtcaagttctgtaaaaaatgaacagggacgcgaatgtgtcgggcttcattttgaagacccagcgtgtttctcatcctccccaggaagggaaggttgaaatcatgaagttaacatctgccttttcgtaaacaccacctcaaagtgctctttctcttaggttggaggctgaaagaaagaagcacaaatcttccctgggccaagagtttcatcataagccctgtgtgatcaataagtacattgtggtggttatttcatagctgattaacttatatgtctacaagccaacacttgacttgaaaggctggtcgggttgctcgccgtgcgagcatggcctttaccagcctgccctggcagccagctctgggactgctcactcctgaccacaacccgggtacagccctgaagtttcgtcgtgagtaacccgtcagcaggagcccatgyctctctgaaagggcattttgtcttttttggcagtaccaaatggcaggataattagtgttagggagggaaaaaacagaattgaaaaccacatccgatacctggttatggactcttcaactttgtggaggcagaaaatgtggtggctttatttttcttaataaatgcagacggttataagcaattgagcatttaatgatgagatgatgctgaaaggcataacttaataaaaattgcctctgtgtttctcacttcatggttgaaacagactgtgcttctcggctttttctgtaatcaggtttatatcagattgtcctttaattcatgttaagatcttacatcttagtacttcctcttagagtttttgtattcctccttgcaaagtctctgtttcatttttagggaaagggtttcctatagtttttttttcgtctccagtgttgcttttaatttcaccaattatggagtaaataaatcattgtgtacttggaagaaaaattggcaggagagcagaatatgttaaggactcttgcttttcattgtgagcgagatttcccaactggagcgtctctgttttattttgcctctggctaacatctgaagatcagtaataaagctctatgcaaatactttcatgtattaaaagaacaatattttgacactcattgacacaagcaaaaaaaatacaacattaaattagtgttcaggcaaacaatgaagacattgttcattcacatgaaatgcatgtgaaaaatgctgtgttatattaacagaaaagcttgctcctcagaactcgacctttagcactggcgtaaatgacattacttatggtgctgtatagtattagacaggctttcttgttaacagtcttgagcagccgttgataacttgtcagactactgagaattttagtcaccaaaaaataaatgttcattctcagtacctgataatttaagtttctcacagattttttaaattatcttttggatattttagagttttcaaatactcgataagttaaatactttaaaagtgttaattcattgtaggctttttctacttgtttttccagatttcatctagaattawgtagacttaattttttaaaaactcccttgatcatctataatgtgtttttaaaataattgaacttcaaggtacgctcttgatttttattctgaatcttggagaacacagggggccttttgtttaattttcagtcatgtggacaggcccttccatggaaggggaggtttctctagatgactctttgcatgtatgtagtagaatttctttcctcctttatcactacactcaaatgttacagttacaatcattgttttcttaaatacaactggcttcccttttcatctgtgttgatccaggacattgcagagtcagcatctgggaaatcattatgccaacagaccatcccagtcccgggtgaggtcaagttagtaagagcaattggaccacccgaaagaacaaagctcagatactcctcatagtgggacattctcagattagcaaacaaaaattaaaagaagaatgattaaatctaattatattcagcatgtttttcagagtactgagtggaagagtgacttttaacttgacatctagatttttgtgaatgaagacactggggaaacacatttgaaatgagttttaaccaacaagttgcataggacactaggttcccagttacaaagacggtgcatgtcccagcctgccatctttagaggcgctcaagggtgggcggtcctcggcggtggggactgygggggccatgggttgatgacaccctcatgaggaccctgagtactcctcctcctctggtgtactgggttgtctcctctgtgttcccacagctcctttcacactggcccctctcccatcattttrgtggctggctgggcaagtggccatcttccccactggatactgaggtcaacaggtggtgacttatcccccctggagctcccttcttaccactgaatacagagctgatayacaactggtcccatatactcgtggtccagaagtcctatttgctctttatccaaacttgtttgctaaaggagcagaaaccaactcaaagaaattcatggaaaacgggattttttgtaaggagcctcagggcacctcgcaggaatgggaaaggaggatctgctttcctctgtgtctgcacatctccctcactccctccctcctcgtgggctccctttcccactctgctgcccacacaggtcttcatgcctcccagtctctccagctggctccgccccggtgacagtctcacgcctgggtgctcagccctttcctgctgtttctgcctctgggtctcttactgcaaatgtctttgacattcccattggcccagaatatgttaggtctccatccatggaaaccgaagggtgttggggggtggggggctggggcgcagtaggcacagggacacatcacctggtttaaatacacctggcttgactcactccttcatcaagagcagtgtgtggggacagtcttattaggaggaaggttttagaaaggagccatacctgatagttccctgataactacctgaagcctctgtcccaaaagttatttcttaaatcagatttggacttttaaaacsctttttcctatataaatgtttaaagcacgtaggccaggcacagtgtcttcsctgtctgttcctacgtggtctatcgccagactctagcacagtgcccagcaactagcaggcacactgtaaacattcatttcttgtctggtcaggtccccaggttagctcacaaaagtccacacagctatttgtaaccagcacgtagaattgagtttcaacaagaaaatgtattctacacacagccattaggagaatgcacaagagcatcatgcagtcgcaagaatacaggaaagggagttgaggttccagccccagctctaacacttagcaggtgtatgacttcaggtgaaccatttaatctctccagtttcagctgcttcatctttaacatttgtggaattgaatgacaacacctctaaggccccttccagctattaaattctgtggctgtgactaacataatcaggatttaattcactccaccctatcagtcttccttccccatgctatttatgggtgcaagagtttggttgtggagatgaactacacattctcctgggcaccagtaactccctcaagatacgtaatcatcattgtcatcatcctgatgaaaaaattagccgggcgtggtggcgcacacctgtagtcccagctactctagaggctgaggcgtgagaatcacttgaacccgggaggcagaggttgcagtgagctgagatcgtgccactacactccagcctgggcgacacagtgagactccgtgtcaaaaataataaatacataaaacagccccctgaggtagggattattattattttttgagaaaaggctggtctctaactcctgacctcgggtgatccacctgccttggcttcccaaagtgctgggattacaggcgtgagccaccgcgcctgtaatccagaagtcacccagtgaatagtggggctggagcttagacgcgggtttctgattcccagcccaagctctagacacagagtttctcagcgcgcttcccagatcagcagcctcctgcttcaccctggaacttgcacattctccagctccacccaggcctattgaatctgtagctccaggcctcaagggggccagcagcctgcgttctaatcttccagaggattgcagtgcacacttctagcctgacagatgattctaatgcacgctaacgtttgagaacacctaccccctctgcagcactacatttcaccaaactccagagggtttctcaggtgtttactcccaggtattccaattggggagagagtgtggtatgagtgcccatttgtggatggatgaggcaggcaggcattcaaacgtcaagtgcctgtaaattaggagctagttgtgctacttttcaaacactcactctctcccagttgtcatcgctgatgaaatcactactgaagaagtcaggaggtggagataatgaccaagaagggaggaggggccattattcctccagccgtgctgtggagaaaatgaggaggccttctccaagaagccccggcagagagttttagcaggataagcaaacaggattagagtagggtgtcacatagcaaggttccttctccctcttgaacataaggctggctctgtagccccacrcagcccagcrtggtagccacagccttgtgtgtctgctgagcactcaaattgtgcctcttctgagtggagatgtcctgtgaggacaaaagacaggctacacttcaaagtcttggtacatagaaaaggaacgtgaartatctcaatcatattttgtattgaaatggtaacatactggatatattcgattaaatgaaacatcaaatttagcttcaccttttctttttactttttcaatgcaactgatagaaaattttatattacgtgtggctcacattatatttctattgggcagtgctgttttcgaataatcctgaaagtcctgtctacatccaccttaatgcacgcactgtgatgtccataagttgatattttctggtaacagtgattgtcaacacttcaaccaagaaacctagtgggcctagaatcagttcagaggttaaattcccaaggtcagagttagaccaagaggcagaatcaggtgctcaggatgactagcttgaagaataaggtcatagaaaggtcataatggcttcccaggaacagatttaggtagcacagtcaggagccaagagcatggagatgaaggatcaggtggtcatgagtgtaaagaaacttcctcctgcatgcccagagcttttatgttgttcctactgggccaggaactaattctagaatggcttacccaggtatccgagcgacagaagataattggaaacacctggctgaagtaggtggcttggcacgctccaggaaacaaccacttctgggaagtacgttgtgacagcagtggtattgggccagttagagcattcgttagattagagtgacctgaaagtgagctcccatatcccaggtgtatgcgtcgtgagttatttttgccctcatttaaacctgtcactgcacgatgttaaagatagatggagcttaattaaaaactgcaagctgaagcaatgtttatattagagacaagaataataacttcattgctatattgaaacaatcagctgacattagagttatcacaagatarctctttgtggtagatttttttctagagatggctacggtaacccctcccatcctgmgtgtccttttgcagtgtgactctaccacccctcccataagggggagagtctgtttcccctttgtttgaatttgggctgatcctgtcgccaatgcgtgcggaggaagtgaactggacagcttccaggccaaggccttaggatgctttgtggcttttgttttgccaccttggaagcagccaccacgtaaagaagcatcgtctagactaatgaacaatgtcagaacgcttagctggagaatggccacgtggaggagaactgaggtgcatccagcacccagcaccagacctgtgagggaggccatcttggccccrctgccccagtcagtccgccttggccatcaccaccgggagcagagaggaactgtcctctgagccctcttgagttcctgcacactgaatcacaaacaatcaaaaggctgcagccagccgggcatggtggctcatgcctgtaatcccagcaccttgggaggccgaggcgggcggatcacctgaggtcaggagttcaagaccagcctgaccaacatggtgaaaccctctctccactaaaataaaacacacacaaaaattagctggacgtggtggtaggyrcctgtaattccagctactcaggaggctgaggcaggagaattgcttgaacacgggaggcggaggttgcagtgagctgagattgcgccattgtactccagccagggagacaaaagcgaaactccatctcaaaaaaaaaaaaaaaccagaacaaaaggctgcagccatgaagctttgggatggcttattaagcatcagcagacagtgaaacagcctttgtttatatgtgtatttttcattaagcttctttcatacattatttacatggtcacataattggggaatatattgtttatggtaattctgttcatatcctttgcccacttttggatggggttgttgttttcttttacatttgtttaagttccttatagattctgcatattagccytttgtcagatggatagattgcaaaatttttcaaccattctgtaggttgcctgtttactctgatgatagtttcttttgctgtgcaacagctctttagtttaatgagatcccatttgtcaattatggcttttgtttccattgcttttggtgttttagtcatgaagtctttgcgcatgcctatgtcctgaatggtattgcctaggttktcttctagggtttttattgttttaggacttacttaagtctttaatccatctttagttaatttttgtataaggcataaggaaggggtccattttcagttttctgcatatggctagccagttttcccagcaccatttattaaatagggaatcctttccccattgctgttttgggtacagtggtcttgcagtatagttcgaagtcaggtagtgtgatgcctccagctttgttctttttgctgacgattgtcttggctatacgggcatttttttggttccatatgaaatttaaagtagttttttctaattctatgaagaaagtcagtggcagcttgatggggatagcattgaatctwcaaattactttgggcagtatgtccattttcatgatattcattcttcctatccatgatcatggaaagtttttccatttctttgtgtcctctcttgtttccttgagcagtggtttatagctctccttgaggtccctcacrtctcttgtaagttgtattcctaggtattttattctctttgtagcaattgtgaatgggagttcactcatgatttggctgtttgtctattattggtatataggaatgcttgtgatttttgcacattgattttgtaccctgagactttgctgaagttgcttatgagcttaaggagattttgggctgagacagtggggttttctaaatayacaatcatgtcatctgcaaacagataatttgacttactctcttcctgtttgaatactcttgatttctttctcttgcctgattgccctggccagaacttccaacactatgttgaaaagaagtggtgagagagggcatccttgtcttgtgccagttttcaaagggaatgcttttgcccattcagtatgatattggctgtgggtttgtcataaatggctgttattattttgttattattttgagatacgttcaatcagtacctagtttattgagagtttttagcatgaaggggtgttgatttttatcgaaggccctttctgcatctgttgagataatcatgtgggttttgtcattggttctgtttatgtgatggattatatttattgatttgtgtatgttgaaccagccttgcatcccagggatgaagccgacttgatcgtggtggataagctttttgatgtgctactggatttggtttgccaggatgttattgaggattttcacatcgatgttcrtcagggatattggcctaaaattgtctttttttgttgtgtctcaccaagttttggtatcaggatgatgctggcctcataaaatgagttaaggaggattccttctttttctcttgcttggaatagtttcagaaggaatggtaccagctcctctttgtacctctggtagaattcggctgtgaatccatctggtcctggacttttttgsttgataggtattactgcctcaatttcagaacttgttattggtctattcagggatttgacttcttcctggtttagtcttgggagggtgtatgtgtccaggaatttatccatttcttctagaatttctagtttatttgcatagaggtgtttatagtattctctgatggtagtttgtatttctgtgggatcagtggtgatgtcccctttatcattttatattgtgtctatttgattcttctctcttttcttctttattattctggatarcagtctacctattttgttgatcttttcaaaaaaccagctcctgtattcattgattttttgaagggtttttcatgtctctaatctccttcagttatgctctaatgttagttatttcttgtcttctgctagcttttgaatttatttgctcttgcttctctagtccttttaattgtgatgttatggtgttgattttagatcttttctgcattctcctgtgggcatttagtgctataaattaccctctaaacactgctttagctgtgtcccagagattctggtgtgttgtgtctttgttcttgttggtttcaaataacttatttagttctgccctaattttgttatttacccagtagtcattcaggagcaggttgttcagtttccatatatttgtgtggttttgagtgcgtttcttaatcctgagttttaatttgattgcactgtggtctgagagactgttatgatttccatgcttttgcatttgctgaggagtgtttacttccaattatgtggtcagttttagaataagtggaatgtggtgctgagaagaaattatattctgttgatttggggtggagagttctgtagctgtctattagatccgcttggtccagagctgaattcaagtcctcaatatccttgtaaattttctgtctcaatgatctaatattgacagtggggtgttaaagtctcccactattattgtgtgggagtctaagtctctttgtaagtctctaagaacttgctttatgaatctgggtgctcctgtattgggtgcatatatatttaggatagttagctcttcttgttgcattgatccctttaccattatgtaatgcccttctttgtcttttttgatctttgttcatttaaaatctgttttatcagagactaggattgcaccccctgcttttttttcttttttgctttccatttgcttcgtaaatattcctccatccctttattttgagcctatgtgtgtctttgcacatgagatgggtctcctgaatacagcacaccgatgggtcttgactctttatccagtttgccagtctgtaagttttaattggggcattaagcccatttacatttaaggttactattgttatgtgtacatttgatcctgtcattatgatgctagctggttattttggccattagttgatgaagtttcttcatagtgttgatggtctttacaatttggcatgtttttgcagtggatggtaccggtttttcctttccatatttagtgttctttcaggagctcttgtaaggcaggccaggtggtgacaaaatctctcagcatttgcttgtctgtaaaggatttcatttctccttcgcttttgaagcttactttggctggatatggaattctgagttgaaaattcttttatttaagaatgttgaatattggccccactctcttctggcttgtagggtttctgccgagagatctgctgttagtctgatgggcttccctttgtgagtaacccgacctttctctctgactgcccttaacattctttccttcatttcaaccttggtgaatctgacgattatgtatcttgggattgctcttcttgaggagtatctttgtggtgttctctttatttcctgaatttgaatgttcgcctgtcttgctagattggggaagttctcctgggtaatatcctgaagagtgttttccaacttggttccattcttcccatcactttcaggtacaccaatcaaaggtaggtttggtcttttcacatagtcccatatttcttgaaggctttgttcattccttttcattcttttttctctaatcttgtcttcatgctttatttcattaagttgaccttcaatctctgatatcctttcttccacttgattgatttggctattgatacttgtrtatgmtycacgaagttctcatgctgtgtttttcagctccatcaggtcatttatgttcttctctaagctggttattctagttagcaattcatctracattttctcaaggttcttagctttcttgcattgggttagaacatgctcctgttgctcagaagagtttgttgttacccaccttctgaagcctacttctgtcaattcatcaaactcattctctgtccagttttgttcccttgctgccgaggagttgtgatcctttggrggagaagaggcattctggtttttggaattttcagcctttttgcactagtttttcctcatctttgtggagttatctacctttgatctttgatgttggtgaccttcggatggagtttttgtgtggacgttctttttgttgatgttgatgctatttctttctgttagttttcctyctaacagtcaggcccagctgggcacggtggctcatgcctgtaatcccagcactttgggagcctgaggcaggtggatcacaaagtcaggagatcaagaccatcctggccaacatggtgaaacctcatctctactaaaaatacaaaaattagctgtgtgtggtggcatgtgcctgtaatcccaactactcgggaggctgaggcaagagaatcgcttgaacttgggaggcggaggttgcagtgagctgagatcacgccattgcactccagcctggcaacagagcgacattccatctcaaacaaacaaacaaacaaatgaaaaaacaggtccctctgctgcaggtctgctggagtttgctggaggtccactccagacccagttttttttggtatcaccagcagaggctgcagaacagcaaagattgctgcctgttccttcctccgggagcttcgttccagaggggcacccatcagatgctagccggagctctcctgtgtgaggtgtctgtcaacccctgctaggaggtatctcccggtcaggaggcacgggggtcagggacccacttgaggaggcagtctgtcccttagcagagctcaagtgttgtgctgggagatccgctgctctcttcagagccggcaggcaggaacgtttaagtctgctgaagctgcacccacagccacccctttccccaggtgctctgtcccagggagatgggagttttatctataagcccctgactggggttgctgcctttctttcagaaatgctctgcccagagaggaggaatctagagaggcagtctggccacagcagctttgccaagctgtggtgggctcmgccgcatttgaacttcctgatggctttgtttacactgtgaggggaaaaccacctactcaagcctcagtwatggcgaccccccttcccccaccaagcgctggcatcccaggtcaacttcatactgctgtgctggcagcgggaatttcaagccagcggatcttagcttgctgggcaccatgggggtgggatctgctgagcaagacracttggctccctggcttcagccctctttccaggggagtgaacggttctttctcactggtgttctaggcaccactaggatatgaaaaaaaacctcctgcagctagctcggtgtctgcccagttttgtgcttgaaacccagggccctggtggtataggcacccgaaggaatctcctggtctgtgggttgcaaagaccatgggaaaagcgtagtatctgggccggaatccacagttccccatggcacagtccctcaaggtttcccttggctaggggatggagttccccaaccccttgcgcttcccatgtgagggaatgccccaccctgcttcggctcaccctccatgggctgcacccactgtctaaccagtcccaatgagatgagccaggtacctcagttggaaatgcagaaatcacctgccttctgcgttgatctcactggcagctccagagtggagctgttcctattcagccatcttcaagaaatatatttttaaatgactaaatataaggacattttcattcaacactcctttttttgaaaccctctgaaatcaagaaaaataataaagttaagaggaaacttctgcttcattataacaatgaaattggacacaacttgaaatatgaggtattaataatttgaggctggtggctcagtcctttagtcccagccctttgggaggccaaggcaggaagatttcttgaggccaggaacaatgtagcccatacatacatttttagtatttttgtatactaaaaattaaaagcattagccaagtgtggtgatgcatgcctgtagtcccatctacttggaaggctgaagctggaggatcacttgagtccaggagttcaaggctgcagtgagctacgatcatgccacggcactacagtctgggtgacagggtaagaccctgtctacaaaaaaaatgaaaaagtatttgagacagataccatgacatttgaagaaaatttagagcagatgttaggaactatacacacaggctatgaattttgcacaaaataatttcagtcctaaaaaacccataaaatagtattacctattagagagaagcrgaaactatcctcatagatacccacttgtacactacacagtggcaagaaggtgttgctgaaggagaagacaatttcttttttttatgtttaatttttttttttttgagataaagtctctgtcacccatgctggagtgcagtggcaygatctcagctcactgccacctccgcctccagggttcaagtgattcttgtgcctcagcctcccaagtggctgggattacaggtgcccccgcccccaccacgcccagctaagttttgtattttttgtagagacggggttttgccatgttggccaggctggtcttaaactcctcacctcaagatatccgcctgcctcagcctcccaaagtgctaagattgcaggtgtgagccactacacccagccagaagccaattttattgtcaytggcataacctcctagccaaggaacaccgcagattgtgatctggggtaaaggcaaagtgaaagcaaacatcgccagagagcaccagggcagccctacaattcatgggctcctttccactaatcacactcaccagcaaaatcttgagaaattgtggcagccacgtcctggggcaaagcgtgcaatgaagttggtagagggctttcaragaagcctgaattaaagctgcaggctgtcctcagtgtactttcctgttccccctcctaagattcttcagggaacagccagccttgttcaagtataataataagtagaaaggcactaccccagaatctatgcttgagtgtgagtggggaaaggattgcaagaagaagaaaaggaacataagcaaacagatgcattgtgcatatcataaggggtatcattcaaaaaaattagcagctagagcttgggtaattgttctctgtagagtcaaagaaattacaggcaacatatttttgttaagtttgctgaaagcaaaggtgggcaaatcgtagtccatgggccctgtaactgttttattggaacacagtcatacccatttgattccattttgtccatggctgttttgtgctgcaacagcagagaaacagagaccatgtggttcacaaacctaaaatacttactatctggctttagaagaaaaaagttgtctgtcccctggcttaaataaagtcacaaaaagataaaaagcaacctggtagtaaacaggaaaagtatggaagagaaaaaaacccttacagaaattgaaaccatgttaccaacaaaatataaaataaattttactaaaacaatcaggtgaacaggctggaggaaatcatataaattaatatgaaacaaaacccaaaaatgattagctcggaggtgatagatgtaaaagatagaacaaaagagatatatgcataattgatgtgcatgaaaaagaaattgaatagaagagataagatatattcaaagataaatagaagaaataaatatataactagaatctgcaaattgaaagaatagataatatcctagaaaactgattcagaatgattaacacaagactaggagctgttcgattttatattgtttctagggaagagaaacattaaccccaacctggagtttttagctgtgtattcctggctagagttaaaagataaagggcaaaacaaattttgacattgcctctttctttcagtacatatggtgttgatatagaatgatatgttagcaaagaaagaagcaagagctatatggctttctgggttgtgttcttttatttttggtcctttaattaatttattatctttttttttctgttcagtaacgtcgtatctttaaaacgtctaaaagtcccttaatctaaggaatccgtgtgacacagcgtttttgcccaggaagaaaatagacatagccataaggccagactttggtttcacactgtttgtttttattagtatagttttattaattaaaactaacccaaagacctaagacctacctatgtgaattccacaaagaataaggcttggctgaccacaaaactactggaggtcctgactcaaactaaataccaggctgccatcatgaaaacagctactaaataatgtttagagatgaaaygcatgtgaatgggtacacactgggcatcctttctctggaactttaatttccatttgttcaaatttccatgatttttattagagttayttcatacatgttctcccctgaaatgcrtatacatacataagtgtgtgtgtgtgtgtgtgtgcgtgcgcgtgtgtgtgtgtgtagttttaaggtttttgtgacagtagcacgtaaagcacaaaagcaccagggtgaaaaagtaacagtcaaatagacatagttaaacataaccttcattaacaaatcttgttattcatggatgccagctcagttaataagtgtttgtggcttggatactgaactggaggttaacgtcgaggtggaagcaattgtagaatccagatttttaagacaaacacacatcccaccacmgaaggcatgcacggaatcaggtgtagtcagtcggctgtggtgatgcactttgagtgttctccttcattggtccagctctgaacagccaccagagctggcagcttcccaagcaggggagtggcccttcctgagcctcccaaaccacttctgcatccacccctcaaattaccaaatgggagactgtgagagaggagtatttttatttgacattttaaaatttaagttttgtaggctgggagcggtggctcacacctgtaatctcagcactttgggaggctgaggccggcagatcacaaggtcaggagttcaagaccagcctgaccaacatggtgaaaccccatctctactaaaaatacaaaaattagccgggtatggtggcgcacaactataatcccagctactcgggagtctgaggcaggagaatcgcttgaacccgggaggcrgaggttgcagtgagccgagattgtgccactgtactccagcctgggcgacagagcaagattctgtctcaaaaaataaataaataaataaataaataaaactaaagttttatttttacttctccaaattgratttgtagaacagatagattaattatatacttacagaagagtacgtgtccaaatttaagtaatatttatacccatcttgacttggccatcaaaagtcaatggtctggagtcagatttcccttgaacttcatttgcttaaaagcaaaatgaatgcaagacatgatttgaaaactgccctgtttttttggcaattaagggacatttttatgttaaagaatctgaagccctggcacattccttaactgatttgctttcctctctgtgagatggattaaaaaacaggagatttttttcatgtgcactggtaatcaggtcaggactgaaagtaaataagtatttgaggaagtggacaagtcagtcacatcctcaaaggacaccaaaagaatgcaggaagactgtctttttcctccttcattccttgagagacagagagaagactgacctctaaaacatgtaacctcaacactgtttctcyagtcagaagccaaagctgggtggcgatttgatcacagagtgtggcctggccatgtcatgggtcatgtggtccagcatgtgaacaggaaggtgagaacgggtgaacttttgcctcagttgtgccatccatcagggaatcaatggagcacatcaacgtgtgcagctgtataaggaggcggatggctgcgtccttctcacacaggggcctttgtctcctggacatgatctagcattacgacgggatgcactcagcctcggctttgtggtgaattactaacccattatcacaccagaacacaggatcatttatcttctaatccagagtgtcacctgttcttcatttaccagtcaataaccattaattatgctcagtggaaatttaaacaaagccctatccctctgttgaaaccagtaaactattcagtaataacaaataaatctggagttgtatatcctttctcttctcattcccagactggagtctggtacaatatgaactttagaggaaatgcctagaaattgataggtcaaaggccacagatagtctgatggagaagaaaagagcagattcttggctcttgctctagtaaaaggagaggccctgactgatccctagattcctgccgggaacaaaacaagcaccaggggacccgggccggtgtttaaagtgacccaccagtagccaacagtcaagtttctccaagtgatccaccagtagccaacagtcaagtttctccaagtgacccaccagtagccaacagtcatgtttctccaagtgacccaccagtagccaacagtcaagtttctccttttacatttttagcacgtccttgtcttctttcacatgactaaaaataggacttttttgagaccactctaacacagcggactgtttctaaagaagtaaaataagctgagtggccctgaaagacctatttgagatgttatttttagaatggaaatttgagtcaaacacattaaagtgtatttacccccttacatctaatcccgcagaagaacgttcagataggaattctagccatargcatcatttaatttttcctaaaaattctgaaggtattttggcaaaagccaaaataagtttctgtgtgtgtgtgtgtgcacgtgtgcctctgtgtgtgtccacgggtacactcgtgcgcccacttgggtgaagtgggaggctcagcttagttgggaagcrggccaaagggcaggcccgatcccggtgaagccaccatactgtgtgcattggaattcattscagtggctagacttgggaccctggtccgggacctagagagaggtcagcattcccagacagatgaggagacagggtgttccaggccgcgggaatttcacttgcaggcacagacctacaaggagcagctgctcactaggcctctgctcgtgcacacaggccttggtgcccctttcagaaagacaccttggggaacttcttgacaaacggtgccgagcctgggctgtacttcagatctcattgctctcctcagcccccagtgtttaacagtgttcagggagctaccaagccattgtagactccatctgcttgtgtggactatcycaaaacagtgaacaacttgtatttcatgccttttaaaagctcatgctttatcattagtagtagtagtggtagtataacatttaaaaagtcttgtggctcagttcaccaaccatgatttcttaaggcaaaatgaaattgcaggtattccattaatgtgaacaaatatgtcttctcgccaagataatttcatccgtcagttactttatagaatatcactgacttgaaactattaccattgtcccaaccagcatgccacatctccaaagcatrtaaaatagaccaaaatcttgtcttccatatgatttaaaacaatcttgtaatagaccaaaaatacaaaaacatacacaggaaataacttcaggtaaaagagaaattattttaaattttattttttagaagwtttctacaaattccaatgaataaaaaggaaattaaacttttttggtggcattttctaagagaaaataggctggctcattgattttagcaacttcttgtttttggcttatcaaggaacaacttagggagacgcaaaccaaacagttttgtttaaattttgctggaacgagagttcaatgcacatatcattggaggctgtgttataattaagtccttactgtttttacctattttattttgagaagtgggtggaagtgatgaaaaaatagagattgatttttttttgttttgcttcaaccttttttgaagagacatattcctgttggattcctgctacacttatttttttttttaaatcttcatctcctatctgtattaaaaaaaaaaatctttaaggtgcaattgcaagatacaggaactccaggcctatctgctgttggtaaaagctaaccacggggagcggggctgcgctggtgccaccagtcagtatcttggacatgcagtggcatttttgcccaccagactcctggctcctactgagaaagtgaacctgtatagacatccattttttttttttttttgagacggagtctggttctgtcgcccaggctggagttcagtggcgcgatctcggctcactgcaagctccgcctcccgggttcacgccattctcctgcctcagcctcccaagtagctgggactacaggtgcccgccaccacgcccggctatttttttgtatttttagtagagacggggtttccccgtggtctcgatctcctgacctcgtgatccacccgcctcggcctcccaaagtgctgggacgacaggcgtgagccaccgcgcccggctagacatccattttgatgtggaagttgagcccctggccttgaaatgctgccttatgaacccattaactccggtataaatgttttcattgcctctcagacagcttttttataatagtagtactctccattacgtggttgtttttccattaatgattcgcacttactttgttttttgactagtaccttctcaactttattgttcaaaaattaagttctacttttgaggacaaatacctgtctttaaatggtttttttccttgactactatctatgatatgaagaaaaattaaacagtgcttttagaactgctctttttgtaaataataccataaaaaggttatttgccatagacactgcttcacatcacattcctctacgttgtggtctgaggacctgcacyatgagaatcacctgggatgttaaggataaatattctgagagagaatctccaggcctctgagcccacccctctacggctgcagccctggcatccacaccaagaagttcctcatrttattcggatactcagtaaaagttgggagccattgctgttgtgcttagaatatgctatgaaattcatgctcatgttccagctgtcsatgtccatatctgattatgtgcactggaaaacaatgtgtggccactgagtgtgacttcaaagtgaacttgcctctctttccctctaggctatgtggttgatgttgcagaatgaygagccggaggacttcgttatagctactggggaggtccatagtgtccgggaatttgtcgagaaatcattcttgcacattggaaaaaccattgtgtaagtatacctgagaaatgactacttgtagctctctggcaggtatgcacctgagcttgctgaagcctcggttctggctgtcatcttcccccttcactctcctgaagagcaatacagaaagtttcagtgtagagtggggcctttgctctgctctgcatccagccctacttgtgttatttgtcaratgtyggtcagcatctaaaccaagtttttccacatttctttcatctttcttttaagatgtttttggccaggygcggtggttcacgcctgtaatcccagcactttgggaagccgagacaggaggatcatgaggtcaggagttcaagaccagcctgaccaacatggtgaaaccccatctctactacaactacaaaaattagcygggcgtggtggtgcgcgcctgttatcccagctactcaggaggctgaggaaagagaaccgcttgaacccgggaggcagagattgcagtgagctgagatcatgccattgcactccagcctgggtgaaagagcaagactccatctcaaaaaaaaaaaagaaagatgtttttactttcatttatttttaaatactattttattttactttttttagttttaaatgttttgtctcaatataagcaccttcttttttttttttttttttttttttttgagacagagtcttgctctgttgctcaggctggagtgcagtggtgcgatcttggctcactgcaacctccacctcccaggttcaagcaattctcctgcctcagcctcccaagtagctgggattacaggcatgccccaccatgcccagctaatttttgtatttttagtagagatggggtttcattgtgttgaccaggctagtcttcgaactcctgacctcaggtgatccacccgccttggcctcccaaagtgctgggattacaggcatgaaccaccacgcctggccaaaaacatcttaaaagaaagatgaaagaaatttggaaaattttccaaatttctttcatcatgttatgtgaaagaagccagacacagaatgacaagtactgaatgatatcactcctgtgaaatctaaagaaagatgatagagaagcagagagtagaatggtgcttaccagaagctgaggaagggatgggtggaaagaggctggggagagaatggtaaatgggtacaaagtaacaataagataggagaaataagttctggtattctgttgtacaatagggtgtctaagrttaacaatacctattgtatatgtcaaaatagctggaagagagaatttttaatgttgtcaccagaaagaaatatgtgcatgagctgatagagatacactaactaccctgaatggatcattatacaacatatacatgtgtcaraatatcaaaatgtaccccataaatgtgtacaattataatgtgtcaattaaaattttaaaaacaaaaataagaacactcagaaaaagagatactgcccaattattttgtgaacattttgtctcaatatacttccaattttatgaaaaatattgacaattcgtggccaagagttacataaatttgttttgcatgaaaactttgtgcaggaaactaatgacattaattatagaaaattaaggcaaaaataagatctttttcaaattttacgtataatatggggagttggaaaatagcatawagataggaagcaagaagatataaaataatctttgaagtgtaatttggttatgttgattcttttggccttctattttattttttaaagaagatacctcatttttcaaaaaaaaaaattggccttcttctcttgtggactgaaaaatgcattgttggattgattatgtttggaattgagggtttttttatacttttcaaatataaaatttatgttgcttctaagtaaccctcctttttttttttttttgagacggagtctcactctgtcccccaggctggagtgcagtggcacgatcttggctcactacaacctccgccttctgggttccagtgattctcctgcctcagcctcccaagtagctgggattacaggcatggaccaccacgcccatctaatttttgtatttttagtagagacggggttttaccatattggccaggctggtctcaaactcctgacctcaagtgatccgcccacctcggcttcccaaagtgctgggattacaggcatgagccaccgcacctggcccaaaaattttaattaaaacgtatagtttagcagaaattaatatctgccactctcattaattactttttttaataactctctaacatattttaacaaatttatattgtatatgtgaataacacagattatacttaaacaagtttaatgagaaaaataagatgtaagcataacatcttattctttaaaaaatatgtgcacttttgtttatgttctctgtaggaatcaaacatgacattttattattaggagtgtcctgttatgctccaaaagttgcgaaggatgatacgcatgaattattttttaaatgtgtgaagtatctatgctaataaaggcttaagcatagtgaaactgtttagtactatattaggaaagggagaaaagtgaatggactttcccagcagtcagagttcttctgtttttcaggaactgaaactgaactcagagtagccttaggtacctggtgctccttcagggcccctctgcttcttggctccagtgccctgggatgttgcctccatccctcagctgctccccatggcagagggcagtctagactgcctttctggggacacagcctcacacagtcaaaagaggaatagaacctttaagaacaatccacctagaaaaatcctgaggaaggactgtggctggcccttgtgggtcctgcagttatccctagacctgtcgctgtggccagcgtgggactggatcccaggccttggcctgttttcagggtgtgaggattctgggatgagcagccccactgaaagtccactgtttgaatgcgggggagcagggtcttcccctatagcaggatgctattgcagaagaacggcaggatgtgctccaagacagacagagacagcccatgctcaccgcggcacgcagggagtggttagggcgagcctggaggcatgccaggagccgcacccctactgtgtttaatttccagggctggggcactattgcactgagaaggaaactgaggcacagtgcagttcagtgctctccccaggtcacacagcaagggagtagcagagccagggtctgaaatgagtatgttgtgacccaagacgctcctctttcctttatgtgcactttttatccttcttgttcatatgctgtcaaaaaaaactttgtgataggatatttgcagtgaacacagacccaggtcttcatgcctgtgggcatcgtctccttcccaggttatcctcagtgctctcaacagctgacggtgctctgtaaatacttaattaagcacaagtggatatcccaaaagccagcttatccagaaagtcctcccagaaacacccactgtcatcctgatttccgcagatttcatggttagccttattccctctcatatggtggggacagcttgagggaaaccaccatgcttcctccctagaggcttgttggagctgtccagctaaggatgaggaggatctgcattcagccgagaacatggagagggagaggagcgattgatttgagtcttagaatcagcgggatttggtgaacagccagatgtagagggtgaaggacagccaagctctctagtctcattagcattgccattaattaagctagaaagctttctgctagctcagagttctacttgttgtgctttgtgtccttgcctcatattacatgaggctgtaccgtatcagacacaccaatcagcatctggaacattctcacttttgctattctaagctctgctgtctcttcccatttttgttatcgtttttaaaatttatccgttgtaatgttctccgaaaaggcttgacacgtgtcgccatctgtatatttagaatcgacacagatatttcctcttgaagtctttgacatcacttgagtaatttgaataatttttgttttgcatttattagaaaatagcacattaatttgagtttgggttagtagaagatattcggggaagcagatcagtaccacatgcagtcctgataaaatgtaaggtaacgttttaaattcttacacagtcatttgtattgagaaaggcagccttatgacaactgctttcttttgatagcatctgtgtgtgtgtatgtgtgtgtgtatgtgtgtatatgtgtgtgtgtatgtgtctgtgtgtgtgtatgtgtatctgtgtgtgtatgtgtgtatgggtgtgtggtgtgtgtgtatatgtgtggtgtgtatgtgtgtggtgtgtgtgtggtatgtgtgtatgtgtgtggtgtatgtggtgtgtgtgtgtggtgtgtgtatgtgtgtatgtgtgtctgtgtgtgtggtgtgtttgtggtgtgtgtgtatgtgtgtgtatgtatgtgtgtatctgtgtatgtgtgtgtggtgtgtatgtatctgtgtgtggtgtgtggtgtgtatgtgtgtggggttgcgtgtgtatgtatgtgtgtatgtgtgcatatctgtgcgcgtatctgtgtgtgtggtgtgtctttgtggtgtgtgtgtatgtgtgtgtatgtatgtgtgtatgtatgtgtatctgtgtgtgtggtgtgtgtgtatgtgtatgtgtatgtgtgtgtgtgtttgtggtgtgtctttgtggtgtgtgcgtgtgtgtgtatgtatgtgtgtatgtatatctgtgtgtgtggtgtgtgtatgtgtatgtatgtgtgcgtgtgtatctgtgtgtgtgtttgtggtgtgtgtggtgtgtgtatgtgtgtgtatttttgtgtgtgtggtgtgtgtgtgtatctgtgtgtgtggtgtgtatgtgtgtgtatctctgtgtgtgtgtgtgtgtgtgtttgtgtgtgtgtggagcacattgcattgttggggctctttttagtgctgtgttttgtttttcctttcacatcaacttaccactaagtatgtagtgtgaaaaggaaacacttttctcctacaattaagatgatagtaggataacccaaacaggcaaatacttgtcttgactaattttctgtcattaatcttgttaaattttgagaagagagttgtaagagtaccctacaaccaggtgagaaccaacatctgctgcttgttgtcgttgtgggaggtgggtaatgtttcagacatggaaagtgttattgtagtctgtggtactgaatttacattttcagtaaaagtaacaagggcaacattgttatacatcagaaaagaaacccatttctaaaatcctcctggcagaggtaacaagctgttttgtgctcatgcaccttgctcccttcatttgacactgtttcctgatggatgggatttctggaccctgggtcytaagcttcatgaagcctctggaggccgatcttgaagacagctcctgagaaggaaggcctggcagcaggttccagggggtggatcctgcagccagtgtagctactgtaatgcattcctcgggaatttgcagagcttgggactgtcaaaytcactgtgggagagcacatccctccactcagtcagttgttggtgatgaacagaactctcatgtaatgagccatacttctaagggttctatgtaggggcaaagtcaggagaaggaaactcactgcagctctgtattattccctaacctttcaatgtggtgtgtttagaccagccaccgttgatccctgagatakatttaactcccacctcagcagcttgccaaagcttcttttgatgtccatgctgtgaccaggtggagtaaaatctgtgacactgagtgatggaaatataactcaccttcattcatcgtcactcaaaatccccattagagctagaaaaagcagtcatgctgagaaaacctgcgtagagtcccatgagaactttctggagagactctaaagggactcacaccttcaagagtattcacattatatttggtcatcataaagaggttggacttttcatataagcttcaagttaccatttaaatgaggtcttcttctctttttcttctcgctttcttcctctctgtctctctacctccctcctggaaatctgaatcctactatcatttatgtttctgaacttctaagatgcttagatttttaacccttaaaaaacaaaatactacaacataaggtgatgttgtagtgcctttgttggagcaacagacttttgaattattggcacctgcaagatctaaatagagccctgatgtcatgctgggctgtgggtctgaggcaaccctcatttcatttcataggcagttgatgcaattcaccaggtcgcgggcccattttccttcttaactaagggtctgttagatcctcaaaataactgctgccttcataagtacctaaacagctggcacagcacctcacacctcttaggtgctctataaatgtgttatttgctcatctaatttcctctcaatgccaaactaatcaaagagaattgaaagagatttcctagccctggagaaatatagactctaattgggtgtcaattaataagaacacattatttacaaatatctgtgcaaatatgaagacattgtgcaaatttattatattgatactgaagtaatagcctcacaatcatgattggagttatgtttgcagaaagttagatgtaagctggaccttgtccagattgggagatacggatgataggaaggaggaagacattccaggtgggtgggagggcatgagaaaaggcatggaggcaggagctagtgcattgtgtgtgggcactgggtaagctgatgagcgagggtggaacagcctggccacactgggctcgtcaaatgcctgctcctacagttccgtctgcttctcctggccacttcccactcattcttcaggtcttagcttaggcatcctccctctgaccaacaccctgcctccacctagtctgtgctaggtgcctacctcctggctctgacagcaccctggctctctgccatcattccctcacaagactgtggtggccatagactgcaggctccttaaggacagagacatgtctagcttccacatacccgtgtccttagcaactggcttagcttactggctggcacctagcgggtgcttggtgaagatttgtggggatgggaggaagggagatggatagacacagtcgtgtaggtgaaagaggtgcagatgcagatggcccagaacagtggcagcgactctgggggtacttgggcactggtcgttttggcacacctactcactgtggcccctcaggaagcctctgtaagttttgcttcccccacacagcagaagctccatccttatccactgggggtggctaatatgccccagttgggtaaatataaatgaagcaggcagctggagcgcatttaatgagctgtgcgaggtagcgtggacacgctgaggctctttgaaatgctagctctgcgtcagaagatctgttcactgtcattttcacagccgaggagagccatctctggtcttgtcttcttgttaccattatcattattattatttgatctcttcagctaccctcagtagcaccacctcgcaaggctttttctgttgaattcatcttcctagtctgacttcctagggatgaagcataagaaaaggctgtttagaggggagcctccctattaagtaatttctcagtcctactgctaaaaagaagaaagcaagggaagtattgaccagctgaccactcttactgaaattaatgtttgaggaggcctccccacaaaaatggccatgcccttttgagagggcaccacacctttctggctcagaccacgtgaaacaggtgttgtctgggcccagggtggggcagcccagaagcctggcttggcagtcttggctccagcaccccttccccacgtgccatctgtaaattgttcagccctgtgaatttgtgttcttccatttatgcactgcagatgatggtacttgcctgcctcttggcatatgaattcagcaagtgacattcataagggccccacgatagagaaatcacagaatagatgtaggcgttaatcttaagaagtgccttctacatgaacagctgtataatggatttaaatttcacattttttgtggtagatggttattccttaactacaacataacacctgggctgagtactgccagaagccccttacttagaataattatcataaataagatggaagaattctaggcatggatggaggctaaccagcctccatttcagtagcaatgcaagaggccatacacagctaaggttctcatagatccagggttcaccgtttacactagcgctgtattttaaatgttagagtgctctgtgattaaagcagtgcttcccaagcataaaaacggcacccgccctcctttcccctgtcccactagcaggtcgccccgatgccccttggaagagtgcctcctcctggcctacggcctcagcccttctgcctgctcaagaggctcaggctgccgctcagcctccccactcagccctggccctcttttttttttttaagacaagagtctcactctgtcgccctggctggagtgcagtagcacgatctcggctcaccgcaacctctgccccccaggttcaagcaatcctcccacctctgcctcacaagtagttgggacaatgggtgcacaccaccaccaggcccagctgggacaataggtgcacaccaccaggcccagctaatttttgtatttggagacctaacatggtttcaccatgttgccccgactagtctcaagctcgtggcctcaagtgatccgcctgcctcggcttcccaaagtactgggattrcaggcatgagccactgcatctggcctctggccctcctttgaggctccctctcgtcttttatagaggccccttcagaatcggggtccctccastcactgcctggcctctctctccccctgttctgccaaaaggcatcaaggagccacctccacacacagcctcaccccatccattcagctcccgacaccctatccaagtagctttctctgatgtgcccagggccctgcttgagtccctgcatcctcctgacatctgcccatcatcacagtttggcagtgctgaccgccctcctccctgggctgctgaggtcgcatacttcaccttggcctgcctcttcccagggttgcctgctctgtcttctctgcagatttcatctgcccaccctgttagtggcttctgtggtggtgcaggatctggaatgttgatggagccaaagatgtcatcccctccccatccagaggcagggtgacaggggaatcctgtaaggaagtgctgggtctgtagcggagctagtgygacagaatacccatcyctggggcagagctcaggctggggtgtgctgaggcccatcttcttcgttgcagtctcgctttctctgcaacgtagaggggcctgcggggagggggtttgtcactcacatctgctacttacaaagctcacatttgtaattcttttttcccttctttattagatgtttttgtccagttaccccagcaccctagtcctctaatcattctacaggagttctcacaaatccctgctgtctcctacccctgcttcctccctgcccatttccctggctaagcccatctgctagggaatgttctgtgctctgctgtttggggtgctctgtgggccctttccgacatacagaaatgtttgttgttctgctgtggtacactgtcttatttaaagataattatttgtttctggaaattctattgtactgtattacaattattttggcgtttatctccatgtttccaaataacatgtcgttactgattttgcccttctgggactgatctgtcggcctcctcttattcaaaacaggagttttgccctcttcttctccccttgacccatccctccgttctcttaatactcaattgttatgttttaattttggagtcaagtcaatatttagtgctacattaccatgactgacgaatgctatgcattccagtaaaccacatgtattttatctttttttatttttatttgtttatttgttgagacggagcctcgctctgtcaccaggctggagtgcagtggtgcgatctgggctcactgcaacctccgcctccygggttcaagcgattctyctgcctcagcctcccgagtagctgggaytacaggtgcccgccaccacgcctggctcattttttgtatttttagtagagacagggtttcaccatgttggccaggatggtcttgaactccagaccttgtgatccacatgcctcggcctcccaaagtgctgggattacaggcgtgagccaccatgcccggcctattttatcttctatgtacaattgtcatttgtttactgtagagctaacagatgccttctttctctgttctattgattttctgtgtacttatcactaactttaccccatactctgctccagctgtgcaaatcacctctctaggctctcaaaccccggttgggctgtcagtcacatcttcctgaggcagtcctagagcctctgacctgaccccgtgtggactgcccagaaggtcaaaccctgctgtgtcacttcatgctcctctggggggctctcttagctgctatcctgcactgagcccctatttcctgacatcttattcaagactacttggtttggtaaagcaaaatcataattagtttcctgagaaagatacctgggaaacaaatactttgtgrcaaaatatacctgaaaatatctctagtccaatctcaaaattaataatgttgctggtatatatttctagattggaaataattttccttcagaactttgaaggtgttactccattgcctattaatttgcagtatcaccatgggaaaccaagagccattctgactcccagtcccgtctgtcccctctagaaagtgyttcagaccttctcttggtcccagtggtgtggaacttgatgtgaggtgggtctagacccattcgttattggaggacaccctttcggtgtggaaatgcatgtgcctctctgctttgatcagtattcttgacttattttaagagagttgtttgctctgctccattttttctgtactctctttctggaaatcctgttatactgactgccctgaggcactctaatgttcttatcttccttcttctggtttttcatgtctacacctttttgctctactttctgggagattagatttcctcaactgtrtcttcraaatcatctcttggattgtgaatttctatgttttgttttcaacttctaaaatcctgtgtttcacattatttctttttatgtagtatcctgttcttgtttgtttgatatctttcctgatctctctgtctgaggacgtcaaaggtggtagatgtggggattttcttgtttgttttattttgtttctgattctcctccccctgcttgttctacttcctccacgttgctttttttcagtttgtttctttggatttctatttttcatatatgtgattttccttatatatttcctgtctcgtaatacttggttttctgcttctttaaaagtggggggcctaaaaagctacttgtgagttttgagagcatagttagatcttgtggctattttattataagaggacttgacggggccttttagttggagaatctctgatgcccagaggagcctccccagtgtcctcattggaaggaaataggcctgactgtcagcccacagagagctgtgtggtgggcctcagtattcaycrtgcatacaagcacctaatttcctctgtcttcagcatggtgacccactcttcactgagcctgtagccttcagtccagccaccttctacctcagggagggtkaggcagtgagtgtcggggagggaatcaggccccagactgctgcctatggagatttgcaatcaggtctcacttcctgagcatttgggaacttctgmaagtgtaaattggggccattctcagctctcccactgttggtttaggagacttttctaggacttctgctaagtcctttaacactcatccatctgctttccagcttccagaatttggtttctcacatctctttcctgccctcttagctcatgtgagtttattccttttttgaaaggggtctgcggaaggagcaaaagtgtgtgaaaaccaccatctttatccagaagctaatgcttcctccaggcctgccttatggcactgactaaattttagctcctgcagcttcctacttccataccctaattaaatcgcctttcttcagaataatccctgagcgcttttatgatatttgggtcactacgaggagtgtgttgcccccgccccacttagctctaatagtccccaaacttgactcatggtcactacaaggagtgtgttgttcccccgcccccaccracttaggtctaatagccccaaacttgactcatgtggctgactttgcttttgttgctccttcaaaggaatgccgagttgagtagattttcatagcgctttgtcttgccttattgtccttgattctgttattcttcagtgctttctattgctatttaatgcttattaggagccaacaatttattttaaaaattgaattatacaggatccctgctcggtgagctgttggtctcaattcgtgggtagtaactcttgttaattaaccgaatcctctcctctctgtcaagccaccgtcacttcattaacagagcagccctgcttcaagtcgtaacatcacttgttaggacatgttagctgttaccttttacttgttaatacaagtgtttcatgtattgttgtaactgaatgttttttggcacttggccgaaacttttgcttactgccctcattcagacctggtgcaaattagaaagtggtttttgccaactcaattcagctttgagccatttcctgattacatttgctcattcaatgtagctatattaattgtagagggcaatgccatgcccttagagactgttttgactgtagacagcatttgcaagatgcaagttcagcagacrgcgttcagacagtggcaagaaagtcgtgcaggggagctggtgcctgttgagtgccaaagtagcaccagacccaagtctgactttcaggctgtatttaataaacccctcagagagggggtgtttctccttcagccttttcccatttcagccagtgttacaaatcccaaatgtgagtctatgaccagcaaagcaatcaaagagaatcagtagtagacactaaaattcaagcagtctagccgtgcaggccactgctataaacaggaattaaatgctttccttcagctgagggtgaggcgataccattaacctgatcggccgaagcaggagtgggcaactggagcctgtgggccaaatcccagctgaggcccttttggttttgtttttggttttttgttttttgttttttttttttactgtcctggaggtaaggacaggttttacagtcttaaagcgtggtttaaaaaaagaagaaaataataaggaagaaaaaataagaggaggaagaagaaacagaaaaagaaagaggagaaaggaaaaatatgtaacagagactatatgtgatctgtgaagctttaagtatttactgtctggctcttcacagaaacagtttacagaccccaccaaagtctaaagacccctcaggcacggcctcagtcctctyctgactcacacgctccctcctaaaacaagaaaagctctccaagtctttaccaaggctttgtcgatttaaatatgtgtgtgtgtttgtgtgtgattttttaaaaattgaattataaatagatttgaatcaccagttctcatggttgtggcatttgagatttaccagtggaagaacagtggaatattggtgcgcacataagtcagcgtggccagctacaggcgaaaaatcagtcagcagaattgtaaatggtatttctgttaacsctttgacttggttggaggtactatcacgcaagtatctgctgaacttgtttctctttgcgaagaacgaaatgtgagcaaaaatagatcaaacatgcctgtgaaatacaaatatactttcatctactgaaagcctaaccaaaawttttttaaaaggttctacttaaacaattaactttagaattagatagttatttaaaaaaaataataataatgacttaaccaattgtcctcccttcctgtggatattagctaagatttggtctttatccacaggagatgtatgagggtcatcattccttcaggttatgttttaaaacgctttcaatctccatgctccaaaacatccacttaccgtttcccggtgaattttccaaaaacttagctctgatcctacctaccaattcccttgctttgaaattcttagacctatatgacctgccaaattgatctaatcaacattaaggaagaaatgaaaacaaattaccaaacatccctttttgtgttaattaattaatataaaagtcatggggaaatgaccagttgtacagctgtatattattcaacatactgcgctatataattctctgtgtcacaggacagttttcatacttgccttgagtccattggtaaattcagcacactaacaaactgattattcctccaacggtgaaatatttcccctttgctaccaagaagtgatttgacagaacattcaggtgattcatcagaaataaggcttatgaggtcagtttatgtctttaattctcaacctattccaaaatataactgggatcaacatttaatgttcattttcagtggtgcctgtggcttacataggcaggtaactaattttgtcttccccatgatgactctgaccccgagagcacacagaattgtcctgtgtccataggattcatctccagctcataatgcaaaccagttctaaggataaacagtaaagtcaaacatgtcatacttgttaatttcttctctttctttgcaaaaaagttcatatgtaaaaataaataacccaaattctgtaatattatagacatccagacgttaccattaagtgagtggcttgatttataaaaaatgagaacataaaatggataagtagaattttagcgagaaggtaatctcgaagcatatgarctcatcctgcatagtgtggacttgaggactcgctcctgggatccttactgctgtcaaccttggatgttcagggaaggaaacttgtgtgcaaacagtatcctagctaggtcagaggaggttataggaaagtaatattgatataccctcactcagcaggaaacaaacaattagttctgtactttttggaggtttaatcatctgagacttactaagggggcccaccattgacgggagagcaggagaacttgtatgtgatccagggatgcattgaatggttaattaggttacaaaacttattcccaaatggaatgtgttgaattaactctgaatatccctaaaactacaaaagaaagaaaaaaaaagggaagacagaagacattaatttatattaattaatttataataatttattaattaataataatgaattgaccaagaatggtctagagaaatacaaaatctttgaaatccctgaaagttgcccaattttattttctggctaatctgttcatttctaaagtctcacttctgaattcgtcatgattttcttgaaaaggaaaaaaacgctgcccttgcaaaacagatctagaaaggctttgaaagtcgccgttgctttaataatcagctggagcatcagcctgtgctgctgtggttaatgagcttaagcgctcctgcggggagagggctggggcatcccaaggtgctacagcatggccaaatgttcccaagcaattaggagctgattcagtgtttatcttccttacaggtgggaaggaaagaatgaaaatgaagtgggcagatgtaaagagaccggcaaagttcacgtgactgtggatctcaagtactaccggccaactgaagtggtaaggactctctggccacccagtgcrtggccacatttggctggctggctgggcaaatgygctcatggaatgcctggtgccagcctttggagctgtcagttcagctccctggcatccttcagcgtgcatttccaaaatcagaacacagtgaattcaatttgagattatcattcttaccacaaacttcattgctctataaaggaaaacaagagttaaacccaccaaaagaaatcattgatttcagaaatggaatctcacatcacacgcagatctcctcatgttggtctcctattctaatggctggtccctgataacctacaggatgcctgacttaacaacgctgtcccagacctgcaggacatctaggtcctctccagctatgtctatgtctgtgtctgtgtactcatacacaagtgcatacttgcacactataccataaatggtctcccctgctttttataagactcaggtcagggaccaccctgtccatgtagccttttctggccgatacatcagtactgctgaaattccttcccactcctttctttgtatccacattatatgctatacataattctattatagtacctactataacccaccataatcatttgtttacatgtctttctctctttaccaaattgtgaactctttgagaatagggacttttaaaaaatatcttaaggccaggcacagtggctcatgcctataatcccagccctttgggaggcagaggcatgcagatcacctgagctcaggagttcragaccagcctgaccaacatgtgaaaccccatctctactaaaaatacaaaattagccgggtgtggtagcgcatgcctgtaatccccactactcrggaggctgaggcaggagaatcgcttgaacccaggaggcggaggttgcagtgagccgagatcgcgcgccattgcactccagcctaggcaacaagagtgaaactccgtctcaaaaaaaaaaaaatcttacactagactataacaaggtaggtacttaataaatactgactgattgctagatggatgggcgaatttctaaatacagaacttcctgtgttacaaaatggttgttagaacataacatcctcctttcctaaacttataaagctgcctagcttgctgttattgctttaatgaggtccgtcctcactatggaagcaaagctcaacatatgaaatatacctaaagataatagaaagcatcatctctagagagaaacgttcatatgtgttacctagtgaacattaactgtgaaaattgaatttttttgaaaccattttccctgtgttctgaaccaaattcctatctgttgttcaaccttggagaggttagggaaaccccagtgaggagagactgaaagtgaatcggtcatcgtttaccactctttaaaatgtcttgtttcagacagaaggaaaaaactgtatttcatgcactctaccacacaggaggaaataaaaaggaaaggaagtaaccagtgcttgggagaggtagggctgtggagtcgtgcattgtccgggcacagggcgtggccggggctctgacacagtgaaccattgttcccggtgctaatggagagtgggtgtgcctaggagaggatgtgtactggccctcagggaggaagatgccagccacgctgtgctgacatagcagggactgccgactggagccctgagctgtgctgccatttgactctctggcctgatgaggtgcgacagagatgtcaattttctggaacattgcacagatcacatatttatgcaaatgcttttctgtatctacaatcaaaaatggtcatctcagagaaggaaatttactaagccaacagaaacctcaatttttacaasttaaatgtggctctttccctctctgacaccaaaatagtttcaaaagctaggaagtcattaagaatggcttgtctgtcattcctacttagacaaggtgtgggattgataaggacacagaacaaaagaattcactgaacaggaaaaggaccctcagactaacaagactgttcttgaatcygcatcgaccccctttcctgccgtgaccgacgccgcatccctcccgtttcttttgttcattcaagtgctatcatcatacctgttctgcagctctgttgacactagcattctttgagtataagagtggtgtctgatttcatatgcttgctttatttttccaccgatttggctctctcctgagcttccctttactgtccaattttgaatcttgaactacgttttatctttctaagcctctaggctgcattaatttcattcactccacttcaacctaatattccactgggtaagcttttcctgtatggtgagactaaacttttaacctcattcctcagaacaacaagttttcctaaaacttggatcaacttgacagcctcctgttgaattgcctcaggggtgagaatattcttccagttgaaaggtaaccagaactggagactatattgtaaataagcttttagttaggtgtgaggtcccaagagccaatggtctagagccatttkgtatgagtcctgaaaagcaccaagcttctytgaggtttgtctacattcaacttaggatacatgtggaattctctcacatctaaactgaatctttccttctcagggactcagtccatcctgcacatgccaaaggcttcttattcttcttacagtctgtaaaagtgctttcaccgatcagcttaggtcatctgtcccccaagatcttctgcacagagggacactcaaaccaataactatgtcttcttagaatcatttcagaatgactgataggaaaaaaaaaaaaatgccataaagaggccgaggcgggtggatcacaagatcaggagatcgagaccatcctggctaacacagtgaaaccccgtctctactaaaaaagatacaaaaaattagccgggtatggtggcaggtgcctgtagtcccagctactcaggaggctgaggcaggagaatggcgtgaacccgggaggcggagctttcagtgagccaaggtcgtgccactgcactccagcttgggccacagagcgagactccgtctaaaaaaaaaaaaaaaatgccataaagaaaatttaaaaaaaaaaaaaaataggacacatcaggtctcagaacactgatatcctacagcaagactaaagggaaatagagctttatattatgttttgaataagactcagaatggtctcaaaaatggccctttgctcagcaaaggcaggtactagcttgaaagaggccaccagtggttccatagagggcgtagttccacatgtgctggtaatttctttttcctcattgatttagtgcctcaaaaccttcaatatcgcttctgtaccagtgtgaagttttcaaagtgtttgttctggactaaggactccagcatccaattaaagctcaattgagcaacattttttggtactctgcctacaggggtttgttaccacagagagcctgatcctggaaattagactttaaattttccatcactcctgaattctggtatttgttgatgataacattagtacttgagttctgtgccacttaagacccctgtcttgtgtataattttctgtacatgcatacactgatgcacagatttattgcattgtgtgttcattcttagagagaaagtggtaattatgctcaaatgtgggcctgttggccaaactgcctgagtttgaaacctattgattactagctgtgcgaccataggcaagttccttaacttctcagtgcctctgttccctcatttttaaaaataagattaataataggacttctttcaaagaattactggagaattaacagagtcagttatgcaaagtacttattagtacagtgtctggcacagagtaaatatctaatattgatgttgttcttaaccattcattcatgcactaagtatttatcaaacactgtgctagaccctaggagtacaatgatgaacaaaacagatacagtccccacccttgtggagattgcaaatgtagaaatgatagcagtttggccgggcgcggtggctcacacctgtaatcccagcattttgggaggccgaggcgggcagatcacaaggtcaggagattgagaccttcctggctaagatggagaaaccccatctctactaaaaatacaaataataataataataataataataataawaataattagccagggagggtggcgggcacctgtagtcacagctactggggaggctgaggcaggagaatggtgggaacccgggaggtggagcttgcagtgagccaagatcacaccactgcactccagcctgggcgtcagagcgagattccatctcaaaaaaaaaaaaaaaaaaaaagacatgatagcagttcctggagtccaggwtctttggagaagcagaacgacattgttagtgacttgtgcagactaaccagccaaaaatggataaygaaacatacttgaagcttctagtgagtattactaagcacgttttaagatgctcatttttttattggttttcagcctttctgatcctgtttctgaaagttcaggggctactcagtaagtagtacagaaatattgtgtaaatatgagaaaactactattgacctattaatatatataaaataaccacaaatatgtcgtcttcttatgtgagaatttttaacttaaaaattcacaaaggaaggattaatgaagtagtcatcctaacgtgccaaatttgtaaccacatcaaatggtcaatccactaaaaaagcaaaacaaaagaaaaaaaaagcaaagagatttttttcagtcaaacaaacaaaaagtcccttttttttctgcagagcatcttgggaaatgggataaagggacacattcacagacccaaatcaagtatttttcatgaaaagtatcttggcttaaactctactagctgatgtttactcctttttttccttgctacactgtttgtctttaacattcatttttctttttcttcccattgtatttttaatctcctcagttgtgattggtttttgttttatttacttagatatctgatatttattcctaatctttatagatatcagggaaaaatcataggttaaaacctagaactaagaaagcaataacttcaaagaagtccaacaagctagttaaaacaacaccttcctcccgtaaaaacatgtggcctgtttctgatcaaattaccatatgcttgtcgagttgtcctccccaccccccgcaaacttttcctaatatttttctgtaaatgatgttaagttaaatggcctataattgcttgctctatctcatagccctgtttagaataatgatatgtaacactttccagacctcaggaacctgatctgtcatcagaggacttatataaatgccagtcagagcttccctcagctctgtctctgcgtttgggggtgaaaagccctcaacacactcaccagcctggccttttgtcctgaaactgtcccccttttctcccatagctgttctcaccaccttctcacacttcccctcccaaagcaggaaattagatccccccactctatcccttcatctgtaccagctctgttagaagccagtccatccctcccgctcctgctccttctgacctctaaggctctaatcctcccctccacccctgctcttctttgttcctttctctgaccagcgggagccagggtcagaggatgtggagagagcagattaaggatgagtgcctttcttcctgcactcttgggcctatagaaagagaggcgagactactcgttctgtaaggtcccttcccattttaatatcctggcatcctgtgctcccataacttttggaccacagtagtgtggaatgctgatcagaatgcttcctcttttgtaattattctctgaacttcttactgcttgtattttataaatagtttatatctctaaatcactgtttatatattttaagcctccctcttaggctcctcatactaatctttatatccttccttaatcacattggcctttcctgcccttttccttccttggacttaaccaagggagctttaagtttcagtctcttcagttgattcttaaatattccactgtttgttttccatacttcataggatcgcatacaaatccccaagggccatataacattcctcctgaagcctgggttctttcctcggttgctctccccccctcaagagcatttcatatctaatgaaatagtaattgtgtactgattgtaataaccccaacttcctccttttttccttgaagtttcttttcttattatcagatctagattaaaatgatgtcattaaagactcaaaaatctttatggctatacatagctatgtatcttcccttatttaagaatattttttgatttatccttaagtccttctggtattcctagtgcagatatgtccattacttgcacccgtgaggaattcctgcaacatctgtaccttttttccataaagctatccaggtgatggctgactatcctcatttataatcataatgcagacttattgacgtctacaaaataagtttcaaaatctttttatcgtcttaaaagtctgttttagcatctgcatcaactttccataggaggaacaattagttgttgagctcaacttctacctaaagtagctctgaagtacatcacctaaagaatagaattacttatgagagatccattcgtccctgatgtgattacctgttccatctttattttcatctttggccratgacctctgtattcggaaatctaaaaaatccctctctcttttttttttttttaaacaaatcagcagtgctcttcctgttccaccaagccttatttatcttccaaaataacagcaatccaaaaatctgtgttcatggagatttcacagataatactgcctgtggtttctctcaccccgttctgcctcatgctctcgataaagttaattattttttatcaaatttgattgttttcccagcaccttctttacttgaaaacagttgctctgcagacactagaatattctggggctgaaatgtagtcatgcccatctaccgtgggctctgcgccacctttctcaccctgcatgccttctcccaccacctcactgcccacacctgtggctcatgccaggccggcttctctatccactgttacatctagtagcaaaggcaaaaactcgtctggctccttttgtcattaactgccaaggtgataggtccaccactgacgggcttccgtcccaacttagtagctctgatctgcctcctagacaaatgcttaccaggtttggcccatcagtaaatacctggtttcattccgctgttactcagcaataggaactgtccttaatagcaaaatctaccttgtacattttgtaatgctgtcatcaatttgctagtttcctgagtaaatcaggtatgccttgcccccatgaaaacctggtgtaacaatatccaaactaaaaaataagtgactgtgtgtaggtactaaaagattctgcaggttttaggatttattacaggaatattttagatagtacattgaccatgcacatttaaaatataattctgatttaccttcagcttctcagatatatatcagtatatatgagaaaatatatatatatgaaatatatatatatgtatatatatgaaaatacatggttgagttcttaacattcaattttgaaaagaatgtttattgaacattccattaccgtagaggtaagtcccagtctaacaccaagaaatttaaagatagatgagataaggtccttgtccaatagaaactctcagatgaaagggaagcagctgcgaagctgccgggacagcccggggtggggtgggtgtaatgagggactcacggaaccagggcagcccaggcgagagaaacagtgacaggtgccagaacatggcagagatggagaccatggaatcagagtggactaaggacatgtggaagagaagacagagctgaggttgactcccaggacagaggctgaaccatgtagggtagtggggaggtgacgatgctggaacccagatcagagatccagcgagaagacttactttgcagggggaggtgttgaggtgttccgtcacactcccggtgccttcrggatatctgtgytgcaaaatgagggaggcagttggagctggaggcctagtgtagagaaaagaggtcagggctagggcctagatgtgcaagatgtgcaagagctgaaatcctgacatacataaactccctgaaggagcatttctaggggggaaaaagagtgtgcacagggagctggtcgcagagccaggcaaattcgaattccaggaggtaagtctcagaaacatattttgaaaaagtaggttaataattcacagcatacacaaactaagcacttgtatctgagagccatagggccagattaatgtgtaaagagctaatatcaaagagttacattaattggcagatgattacttcatctcaatccaagaaaaactgagtttcagggggcaagcagagacccaatttcaaatcactatgtcctggaagtcaggttgcaaagcattttcaaattcttaaagatgaaagggcttttataagtgtaaggtactttgtgctgcatattgtcattttattagtcatcattattaattatcattatcatatactcttgtgaaattattagttatcaaaagacatcttctgaaaggatgctttgggctcttcaactcctgacattttttatttaaatatttattttgttttatacctatagatcttcatgcagaaaaagttacttgttccttagtactgccagctgtgtgcttcttgacccaggggtagaaaggatgatcgtggtggaaggcagggatatgctgaattggtgatcgacttctgattctgcctaaacggtatgtttcaagggagtgtgacaggcgctgagatccagcaagctctacagctcctcctagaactgcagtatccccagtaggctagagagcagccaccaaggaagacatcaggctatcatctgcttttatctgccagccaccccccatgctcctcccttggaaacctgtctgcaaaaacccatctttgtacttgctccctagagccagctgagtgtcactttgatagtctaaaatctatgttggtttactattgctgatgtaacaagtaatcacaaacttagtggcttaaaactacccagattcattgtcttacmgttctggaggtcagaagaccaaatggagtcccactgagctaaatcaaggtgctggcaaagccaccttccttgttgaggctccagagttcttggacagtgagattttctcttggcagggaatactgagttaatcacttggaaccggtgctgggctagtgttttccatggaatggatagcatgttgttaatcactttgcggactaaaccaaaatggaagacgctggtgcatcatctatttaaaattgcataatgtacacactcagaaaacaccgctgatacatttgggcaactggaaatgaggacaggtcgtacttgagcctgagggacaaggacaggcttcctaataaaggggagttttagagcagggctttggaaagatttgtaattaaaagagagagttgggggacggggtgtaagaactgggaaagaattcacaattggggcaggaggtgctgtgggaatgaaccagccgcatgaacagagacataggcagggactctgtcaggtggagtgggtgggtggcccagtcygggaaccctgagaagcaaggctggtagagccaatatcaccacaccctgccctggccaggccttctctcacgcagccagcaggccacccctcttcaccgcctcacctccaagcctgtctgtgcagcagcttagccactcctcttatttgtacctcctattttcttgcctttttctttcttgctgtcacragtcttaaaaccagtcatatgtcatcattaaactccacatggccactattctgataccattaatctgtcttttgatacctgccatctgacccctgatgggttcaaattctggaagagtgtctcctcacctgttccattaagttagttaaacaagttttgtgtttgagacaaattcttaaacagttcccagctgtttcagtgattaaaaggcagagccaggaatagggaaggccttactttcatgagagagatttgtttatagcataaacgtggatccttaacagtaactcagagaaaaccaatctaaagatgtttttaatctttttttacatattcttcgacttcataatgaaatgtttccctattttccagggattttgttgagaatgaaattaattctgtgtgaatgtttttcacagtggtattagaaagacactgtatattttaaattcaggctgtttctattattttttgaaaagaggtcagtggagaaaaatgtgcctaacatcgtcatctaaaacctgctgtttgaattttggggaatttgtcattttttctaaggcaagttactaaggtattgaagttaataagacgtatttgtttctgaatcagtttttgttgtggaggattagaaagtactatagtcccttattgaaattctaaaatttaaaaagtatagtggtagtttgaatatgtcctactagcttgcattataagttttaaagtatgtatctcaacaccttttattcccagctctcaaacttttgaagtcttctagaagctcctaacctctccttacttctgtttttcctgctacaacataacgatgagtattttcccactgatctcaataggcatgttgaaaaaactgatgcaatattagttacaagaccctgcacaagtgtcagctccttggtgcagcctgcacctgttcccccaggcagtcagcacttaccgcttatcccattgcattgtgatgggtcatttccacctggggtcctgggggaagaatgacatcggagggccttgaagacgacctggcacattgtcaggggataaagaatgaatgaatgtgcacattgccaaagaatcattcttatgctttacagccagctctgatagaaccaaaattattcaaaccagtgtattaaactattagagagcaatagtctaaactatactaaatagcaaagggaataaaaataataatgttcctctttctatttgagattccatggcaagatgagtgttaagttcactcacaacttacacttgtatatccaacctttgaaaaggtcatatttcgtttctattgctttacctctrtacatgtcttttcactaattctttcatttctgccactttcctgtctccttatgtttctgctgatgttctctccttttttcttcatctgttctgaaactcttattttcataggttctgttcgtttctccacttccctctgcacctttcttgttgatctatcccaactgtctcacacaagctcagcactccagatgtgctccctggctcctctccacaggaagacctggtgatgccatattacagccactgcagcccggctccacccttagaccactagggcatgatgcctccggcatccacagcatatgcacattgtgggaaaatctcatagtatcttgaagtcttggcagacagcatcaacaataatgcatatgcaaaaggcatccaaggttgcttctgtctgaagagagtacgactgccaactggaggcattgccggctctgagcctccataagaaatgccccattgtcagccaccatctttcctttacccactctgaggctatatttgtggaacaaagtgtcacctagcataaaagacactcagttctctggctttccccatgacaygcgtttctctgctactctgaaactttctgaattacaaagtgagaaataagttctactcagtgaatggccatcatggctggtattggtatcgtggaaccaaggtcttccggaaacctggtggcatgatattcctttttytcttcacytagaatcttcaatgtttttcttttttttttttaatrtaagtgcaaagaacttaaatatatgattgtgtaagatgatagtcatttagaacaacattttttaaatttctgaaaaagtgaggccgggcacagtggctcacgcctgtaatcccagcactttaggaggccaaggcaggtggatcacgaggtcaggagattgagaccatcctgactaacaaagtgaaatcccgtctgtactaaaaatacaaaaaaattagctgggcgtggtggtgggcgcctgtagtcccagctacttgggaggctgaggcgggagaatggcgtgaatccaggaggcggagcttgcagtgagccaagatcatgccactgcactccagcctgggcgacagagtgagactccctctcaaaaaaagtctgaaaaagtgttgggcttatagagattttcctaataaggkgtacagtgtcttcttctttgcacatccattttggtggaaaattcagtcaaatgcactagaatagtctttggatatgttttctaaaacaagtatctaattcccacatgaagagaaatggcctgattgagtatgcctgtcttaccaaaactgttaacttacagtgaggatgtgaaaaaataagaactcagataggcccgtggatcagatgaataagaaaaagagaagagactatggataaaaacagttgctgattttcctttgagatgtttgtgcttcatgccgccaaattgagatgagagaaaagccaatttcatgcagtttggcacaactgtaaaatgcagcacaaacacacgtacgtgtatgtgtgtgtgtgtgtgtgtcccattgatccaaaaagcctgtttgtctattggcaagacgaaatattatcttcatgcatcaccacctcctcctaaaggtaggatggggatggccgtcagtgccaatacattgtctcttctttcagctggcgggggtgggcagtgggarggagccacggggcggagacgcagagcaaacagtgccagcactggatcccrgcgtgggccggtggtgggtgccaggagcagccagggcctgtgcctagtcgtcacatgtggtgctgagcaaccaccaactcttcccaggaaggaggtgaaaagataacacacactggagtccagtggaggcgaggacacttcatcccacagggaccgyagtggccaagggaatggttttaatggtggtttgacttggcatacttatgaaaaggctagcgcccacccgctggcctgtgggtttatttggcaaaacataaaacagagtcagttgcttgtccttgagagtggccactatggatctaccacatttctgacttgtcagtctgacatccgtggctggattctacatagtcttgtgttgatggatttgttgctttgggagaaacgcagatatgatggcatggccttctcactatctgcagcagaaacggccttgtgtctgccccgtgtccctggtcatccacggacattggtcaggctttctgattcacaccactttctcctcagccctccaactaagtaatatttatattgttctgctaacaacctctattgaaatccaaacttaataacctattgcttgctagaaatattctcctcttcctttctgcctgtttcatgatcttggttttttttttaaagaattcaacccttttgctttttccctttctccatctttataactttttcagacaattgaacttctgtctgaacttctgagctttccgataccctcatactttgtggtcagcatcagagacatcaaagtaaagtgggtatttgtttcaaaccctgagttgatgataagccattatgtctgctgcgtcttctctccatgtgagtgacattttgcaccccaggcttagttatagggarcaagttaggaatgtgtgttttgcagtttctgttgtttatgtaaaccatcgatatcagtttattcatctgaaggaaataagaaaaaacacttcagtcaaaataattaggagctaagataagaacacagcacttcaaagttcatttagctacttacatcttctactttacacgtcatctcagcttccctatctcctaagtgaaggatgattatgataaacttcacaaaagtagtgggaggttaaattagtgtttgtgaagcatgttgagatcttatgatcaaagataccggagtattgcagaatagtgtgattactatcaaagaaaagaattcctcaaaccaagagtctggattaatctgacttaattttccagcatcttctgtatctgactgaattttccagcatcttctataccttctatatctgaagccccaaacctccaatctcttgcagttttctcttgatcttagagtccgtttctaarcattgaagagggttagagagtaggctgcagtcataaacttgtaaacagaggagaagtgttgggtgttaatgaaggctcaggcgaggggccggatggggctttggggggcatgttcggctggtgactgtgcagtgctgctctcagcagccaccgtttggctggtgctcgggtggggccttcactatgccagaaaaactgtccctccacccagctcattccttagaatcaacagggactttcatccatgctgcacaaaatcggacggaaaagatggctttccacaagtttcccaagtcacttaaggggcacggaaggggtatgcaggcagccggggtgtcagaggcaaagacaggctgatagcacagagataagcaaggtggatggaaaaccatacctagacataacgtgtgcaaaaattgcagagtagtatctccaaaatcacaggccacaaatacacagatttggtgcaaactggcaaaatgagtttgtacatttatttcccacccatgtgtttcattttgcctgtaatcatcagagctgttgtggatgggtgggttacccaagtgttcttaaagaggcaacccatttcttctcaggcaatactactactttaagcaaaaccgcaggcatcctttgtcaagggtggctaccctagtccatggttcttaagcctagtacrtcagactcatccagaaagctgttgaaaatacagtcttccaggattcatcctcaaaccacttgagcggtggaccctggaaacgtaggactctgcagggatcctgaggcagccggctctgaggctggccaagcctcggtaagtgggggcagctgtgccctgggctgcagtcagggaatgatgcacacagttgggttgtccctaaccttgttggtttcattcacctcttgaagaattagataaaagctgattccccccaggggaaaatgctcagaatacatcatgtatgtagttgtagggaattgtgcctgtccagctgtccatgcggagaaaacaaagctgaactgccaggtccggctcctttcttctccagccccaagtttttgcttggcttggcacatcctttcataggtgtacgtattttgtaaatgttcatgtccagtgattaaaactgtcattggtataatttctgacgatatgtagtcaaccccttcacaagtctgtcgttaagccctccacaaactcacaggggtgctttggaagagcttgacatccgccctccccaatggaacataagagccattcacacccccgccctgcaagggagggtgtgcttaggacctggacattgagcttggcagtatcaccagatcatttaccgattgaagttaaattgatgatagaaatgtagacgtcaagatttttgtgcctaggtagtctcagcttccctgaccccatcctcggagagctccaggtctagggggaccattcccaaggggaacctcaaaagtgtatctgccatgtcagggcagacgtgtgttttggttgtttttggtgaagccccagagggcattgtccctacacagttctctgataggcggaagctccatcaggtctgaccacagcctggttataccacggcaggtccagagcaggtggctgctcagggtttagggactgaatgaatgccgcagacgtggaaaagaaaatcaactagctgttttaggcatctgatcaatcagtgtgattggtttctttaccaagttgatgagtagatctgctgtgttctcagcagtaatgtggttaagcttctcaggaatatacacatacacaaatgttttccccggtctggtggagggtagtaataaaaagcagagcatttagagacaaagtcaacttgacaggcagagtggaggtaaacagtcttcctctgcaggagcagtgttgacaagcagtgattcttgggaagcgtacagctgtagcacgggctctgacttcagggacttcagcagtataaaaacaatttttaaatacccaaagtcatttattttaagtgtacttgtatggtttggggttttatgttatcggtttatatatatgtgtgatttttattaactatttccagaaataattctgcagttaagccaaaagctgctgcatgaagcaaaaactcttcctccatagataccctgcctcagtcgagttaggcaggtttagcccaaccaaaggactgtatttgttgagagaagagacatttgttttctccccaaacttcaagctctggttttgaaacataactctcagtcccatctctaaatcctagttacagcattaattctcaataagttcttctttttgcacgtactctcatgtaagcagcagtctaaatagccatgtaagggcagccagaggagtgggtttgtgccttggggaacagaggagccaaggcccacccacgttacttgtccacttctccttccatctgtgacaatcagctccaagcattaagggcttctcctggtcctgggggccaggcaacacgtcacctctgagatgttggcctttgccaccgtggcttctccagcacagagcctcattgtcacttcctccagctgctcagggaacatgatcttcactgttgtcatgtcagatgaggaaattgggccaccaggaagccgagtgacttgcccaaggtcacgctgtgtgctagtggcacagccagtttccaggccgtgctcccccacgaagcctctgcaacyttcctcccagatcacgtgcactgggtcacccaaaaactttgcccttctgcacattagcctctaaggacagctgctctaagcactttctagccaggcccctcagcagcagcactacaagggtggctggcactctggttctgtagacactgtctcctgccttttctcagtgctgcagtgggtgtatctgcacctacttaatggtctgaatctataaaccagcagtcagacacctgctgtgcattcaggggacataacctgtcatgcctacctgtggagytgagtcagtgtacacggttctcggcaatcaggggacatcagacagctgcaccctcttttccagtgacacaggcaccaggtatgaaggctttgagggattttctggaagtaggaagggtcagggcccaactgaacatgtcaccacagcacctgacaatggctttttgtccttttagtgtatgactggacacacttacttaccatgtaaaggtgcttcttttttacatttaaaacccaaagctgtgagatgcagcgtacagagacgtgwccccggttggccttttgctgtttcagatggcagtactcagaggaacgccagccaggcccagaggcccccggcgctcactggcctttctttcatgtgcccttggagttcttagaatagactatgagattttaattcaaaaggaatattctaccggcagtttataataggcatggtttgaggaaaacccaaacctgcttttcccaagatctaaaccatttgatgcaccagttatctgatgcagtggggctctcgcccgatccattctttggagctacaccatactcgattgtgcggtgactgacttagccccgggcagttcagacttggacccaccgtgtggcatgtttgtcctcgttgctgttgctgtattgacaacgccttcagaggtggtttcgagtgcaagccccctacccgccttccctccactcctcatctgccctccagcttctccaaacacgcttcgctgcctgctgggaatgctgccttgcaaaggagtgacgtctcaagtgtcgggaaagttacagccttcgagttgtttccttccctacctttgagatatacmcagatgccgcattttgtttcacgcttttctgtggatggtgagcaaatggctgattctttatggccctcagagccccaggagggtgtggacaagcacctttcccacttgatacttctggatatttcctttctatgccattaaaatcggatgagtgctgtatttgttttttgtttatttgtatttcatttatttataccttaccttactccagaaaatgtttaataacgcatgtgaatagtaaggatgtagcctagtttgtgaagtctttggtgcaayaacagatttggtacttgaaaacctttttctcccagaaagcgtgttttaaatgatacgagggccccagccctgccaacacaagcctattttcccaataacatgcctgaaatactaatgaaaatattttaactgcgtctagttaccatatgtaaaattgctttcagtgcaagcgcactttccaacgtccaaatctgggtgctactcacatgtgtctttcagaagagtgggtgagtggcagagctcctcccaggcctgtgtgtggtgggccatgccaggctgcctgggaggaggaaggtggggagctcctcccaggcctgtgtgtggtgggccatgccaggctgcctgggaggaggaaggtggggagctcctcccaggcctgtgtgtggtgggccatgccaggctgcctgggaggaggaaggtggggagctcctcccaggcctgtgtgtggtgggccatgccaggctgcctgggaggaggaaggtggggagctcctcccaggcctgtgtgtggtgggccatgccaggctgcctgggaggaggaaggtggggagctcctcccaggcctgtgtgtggtgggccatgccaggctgcctgggaggaggaaggtggggagcccacctccatctggttgctcaccctggacaacgccatggaggagagggctctggagcagggcctttgagagagtgtcctatgattacttctctcaactgtgtggctgttcagtctgtcactgaagcctttcctcccctcttctgtgagaccgagaagtatttctgagcaatacatagatagatggatcaacagatagatatttttaaaaatcaaaatattttcagctcacattttgacctcaaaaccttatgacttggttttgcttccttaaagtcacattaaaaagtatggttagcagagacgtggttctggtgagcacaatggagatgtaattttaattccttctattcacaaccaacactaatattgaaattttgggtaagcaacatttgagaggcactgaaacttgagattcacttaactgctaaaatactactctgttatccacaaactaccagttataaatgtttccgtgcctgattcagttgacagcaagagacttcrgaaggctataagttaggaaccagtatgagatgccaaatgcttccttgccttcccgaaaatactgccatgagagtaggcctttaaagcaatttccttcaggtttagagatctgttcgacagcatagtgtccaaccataggggataactgagcacagtccttccaaatgccaccatgcagcaaatccattaaagtccgtgtccattcagactatggagtagtagctcagggaagtgtctgggataaaatgatgggtgaaaaaagaagcataaaaatgcgcaaacagtatgatcacaaccatataaggaaacctacacacaggtgagcaaacgctgggaatcagccacgtgctgcggacgcctcgtgctcccagcctcgttccagcaaaactgttaacagcagtgttgtgttcatgatgggcctgcgaggggttctcctccgctggtttgtgttttccaaatgttcattagcgaacatgtgtgactttacaacaaaaagaaaacagtggtgaagtatgttagtcagacttcagcatcgttctcatcagttagaataaagaaacgcatgaggaaagagacaagtatttttcacaggcctcaggttagaacacatgggcagaacagcatggacacttcccttgactcccctgtttgccttgctgcccccacctctgatcagtcactaagcctgtgctgctgcctctggagtgcctgcctttgtggcttacttcttgtattcctgcctcagcacctgcccaccacctcccctcagaatcatcagctgtgccgcgatggtgccagcacaccgcacacatctgatcatacacaatatatacatctgattaatatacaaaaccataacaacccttgagaatcgaaatgaatgaaaatctgttcacttcattcattgccccaacaatttgaggcctgcccgctatagtaccaatcattctatttcctcccatattagttccaacttccaggcaccttatcaacaaccggttaattgctattcaacaatgacgaattcaactcaccctaaaacttcttcarggcttaatgccccccagatgcacctgttcttgcaagggccttcctgctgcgccgccacccttctcattgctgtgtgggtctagccccagatcgctgggtgcccagccgcctgccaggactgcaacttgatggtcattcctgccctccccagttcccaaactctcctgaagctacctctcctcctccctcaggtctcaggtttactggaacttcctctggaaagtcctccagcttcccaggagtgagctagacgttcyctcttctgttgccatggacacccacacttacagccccacaccatgcgcagtccattatccgtgattccaaaatccaaagagctcagggaaaatcaaaacttcccttaaaacccattctcctacaaaatctggcccaacctgacacaagactaattatgtagtctgtcttcttatcacttactgtaactgttcatacattttgctgaaggaatattcacgtttgattatggtgtgctggccagatggtgctggggctgctcagaaagatgggattagggtaactacaaacttaccacctgcctatcragagtacaaggggcaggggacagaggcagcaccaggacaagcctaactcagcctgtcctggcagcacagggcaaatgtccacctgtgtgttttgtgcccatcaccttgtgtctctacgagccaaaacatctcaactccaagctctccggaggctttggaaaggctctgtgcacctgtactctgattatttgtgtctatttctaccactgtctttttggctctttaagcatagggaaggtgttttgttccatttgtatccccagtgcctggcytgacatgtggtcagctatcaacacttactggtcaaaatgttcagtagtcatcgctttgtcgtttagtggtatttaataattatctatagaactagtatcctaccatcaaaagttactgagktgggaaatttccaccttggctttcttcagcattttcaacatgagtagtactattaaatgctttaataacacaaccattcaatgactcagtttcaaaggtactttttaggaagaacaagtatgtacttgaaccctcacacccctcacccccgcccccctctccaccgccgccaaaacaatagaacaaatgctgtcatagccaggtggccttaatattaatccacaaagcaagctccacgcaggcagggactgtgtttattacttccaatttacrtatttctcttctcacacatgaaaatacccacaacaacggaagttcaggagtgagcacttaccgcgtacgtattacacactggacactgtgctcaaaactcccggtgcatttggtaatttactcttttcagtgacatcacaacacagatattttcaygctccgcatccacctgtcctggccctcttcctttctggggtgttcctttaattttttgaagtttctttctagttggtcttgctgatttcctccttttgctccaacagaccatcttgaatggtactcccgtactgaccttccttcctcacagacacgctcttgctcagttaccctcagtggctctctgttgcccacccccatggagcccacaccactctgccagcctcagagtgcccagaacctggtttcctgtgcattcctcaggcagggctgccttacccccacacccaccccgccttgaatctcagtgcctttattcaggctgcccccacmcctgcggtcctctttctccttctgattgctctgttacatttacagccagcagccccaagtcagcctggagacaaccttgtgttgttgactcactgtatcatcagcgttgatcttgtccccttagcaaaaacgttaacttgttggagtcaagaacgaggtcttgtcttgctgtcatatcttcctcgtgcctgtcactgtggcagacaaatgataggtgatgatgaatagggtgatgaatgagccttagaaagtcagggtgcacagactttcagaaacacataatctggtttgcaaggacaatgttcttaaattcatttttacaagaagctaatgccraaggtgaaagaaaaggaaaagagaaatatgattactctaagtcttaaacatagatctgaacatcaagttgtgggagaaatacaacttcacagtgtgccaaaaataaaacagccttggccctgcggccactggtgagctgagtgcgaaccaagcctgtgccatggggtcctcaagtgcagctmagccctgggctgctttcacaccagtgtgatgcccaggaggtgaatgatgtccccacagtacacctggcagctgtggggcaggacacctcggcagatgccagcaggcgcatccaggcacagtggccagcgtgctgccccacagctttattggggagtagggaagaggattgtatttctttatttatacaaagtagctttgaatggacttccacccagcacagaaaaagccgtataaaaaagcaactttaagttttttttttttcttttgaatgcaagtctctaactagctgagctacagacttctctttggtatgacaaggcatgtttggatatgctgtgttaccactttcgggtggaactggagataagaaaggtgaagtcaggtagcaactgtctgccttaagaatatttacaaactatcagttaaaacatctgctctccctgaggaagagcaagagccagaggggtggaggcagggacagaggaggcagagagagagaacaaagtgagcacaccccatttaccccagctcacttttccctaccatgccctgtgcccacgtagccagcatgcaggaactcctctgtttcacacaggagttgccgacaccaaggaacccactgcatgtgcttgtcctcattatgcttaagaaagatctcggcttccttcccccaaaaggtgctactgcagctgtagctcagggcgtgtgttttgttcagcacttcaactcatctctgcacatgtggactctggtccagtggcttaggaaatcctcacggatagtgatctgggatacaaaccccagcagtcataagtcaacatgatgtattggccctcctcttagcgagggttggggtggagctgtcacagagccgaagttatctttcayagagaagcgatttccccagattgaggttagggtcaccagatgggcagtgaggcggacattatctgctatccaatgtccagagctccaagaccctgagtgctgatggcttaaatgcatccgcctgaaaccttgcagaaactttcctgctgaagctcttaagatctccccagggttcccaacaggtggccaccacccttatcaacagtagtattaatgccaccacagctgggggacccacagagggacaacgtggtggcttctctccaaggctctctgttatcttccctatggaatgagcttcagtcatagcaagtgtggatctttttggtgctgctttctctgccctcctaactactcctcccacrtacagtgaaattataaaaccgagccagaatcaatgctatcaggaaagggttctgcacatcaagctcttaaatgggcaaagaatatttttaatcaagactctgggtgagagaacagaatacagtctcatgttttaggccaggctatgctctgactgaagtgtgtgctgctttccctctgccctgactcaaaccaaggagccataccaggcattcctgccactctaaacgtctgtaattctctccaaggctctctagcagtgcctgagttaagctgcacctttacgaagagtyggagtccagctactgctgtcaaagctcgagcttgcatcaggcattgctgagaaaaccgccagctctgactggcgttgtggcgcctttcttccaaactttccttgtcttaaagggggcattccagtttctagttcgataatacccaagagaggcrtgcgtcatttgagaagaatctctcacacccccrtcgcaaaaatgttggccatctgacattttataacatcatgtctgcctgtaaaaggcaaactcctgtgttgtgaatcagctttcagctactttggaagaactacttctctttgaatcagaacatgtttcattccatataaaattgtcatacctgtcatcagtaaacagaaataattagttgtaaggaacttactttaaacttacagaaataggcacatttatagaggtatggaaaggaagaatttataaatacatttatttattataataaatatatattatttgaaaataagacctctgccccagtgacctttgatttaatggattaacgttggaaaataaaatgtaataaattatttttagttttgtcatcacagaccacgctattactccctcagaaatttgaatatgcatcttttctttttctttttttttgaatatgcaccttttcaattgtacagacttgcctttaagctcaaacactgccctaattaaggactgaagttgctctgtcgatgaatgggaaagtgtcagagtagatgcgggtcatgtgttttgaaaacatgtaagcaggcagtgtttaacaagggtggaaagacacactgtggagacattgggttgaaggacagaactttggtcattattttattctctatgggaaggaaacattatgtatacataatgacacagtgaacaatgaaagaaatgtagcctgtattttttaaataataagtgccatttatgtgtggaattggggtcagctggttaattataaatgaaagcttaacacaaatatagtttatcccttcggacagattgatgtactccacgctaagggaagggagggagaggcagagagacaggaagaaatgaaggagggcaaatgggtttagcaaaggcatgcgctgtaaatatgggaggcgggtatctagtcattctacagttaattacctaaagattcctgaacccagactttttagtccctggtttgtyaccccggcggcatcatcagcctgagctggcytcctgggattttgcacttcactgttatgatttacgaataggataagttatgactgacccttcttgactcctgccacctgtctgtcagttatcttttaaagtacagttagggtctcggatttccagaactggggctgggatggcctttgagtgtcaggcattcctgttcttggtggaggtggactgctcagcctcaggtcccagtgctgggcccgaggagggacagcgcgaggtgtgctggcacctgcagtcttctttcttgccaccgcataggacatcactagacaaaagacatcaaaatcagwtgctgttgtcccacgttgccatctctctcctcaaatcagtgtcccaatattcaggccgacttcggttcatcctgttttagctgtgcccactagaatttaaaatgtggccgtgcagctcctgacyctgctgagggtgcctcggaaccagaagactgtagagctgcttttctcccaggggagaaactaatgatttgcagaagctagtaatttagagtctatggaacttgccccaggctctcccttccctcctgctttcagtggtactgaggagctgtatttaatctgaacagaaaattccattttcttctgatgattttgtgactatatgaaaatggaattaagggattgtagatttcttccccacaagcatattttaaaatccagagtaaaaataaaaactttcgcagagtaattgagaataaaggtgagaagttttctaataatactttaaaaaattctcatatacagataaattagaagaagcatgaagacttttccttaaagaaatgttcctttccctgcactttgaatagatggacaaaattagtatgcagggacagatccaacttttgtgggagctcatacactttggtgtcggtgcggagggggtggttcttctatagaaaaagaatgcaaaaatatctcccttttgcagaatgttcacattctgcacgtgtgagctgctgttctcctcacctgggcctggagaacatgggtgagatgctgagccccagggcttaggccagctgcctctgcgtatggaggctgtgtgtgcccctcagctgtgccagggaggagtcacagcagacggcrtgctgccatcctaatctctgtggcacacaggagaatgtccccacccccaaggaagtccccatgctaattctagaatacgtggctatgtcaccttacatgataatccagagactttgcaaatgggattgagtgaagggtctggagatggtcctggattttccagggagccctaatggtaaccacaaggtccttataggaggaaggcaggagggtcagagtcagaaaaggagcagtgaagacgaagcggggtcagggtgattcaaggaaggggctgcgagccaaggggtgtaggcgcctctagaagctggacaaggcaagggaacgggttctttccgggagcctctagaggcagccagccctgcccacaccaagaacgtaagaggatcgacacgtattgttttaaacccctacacctgcgttaatgtgttaggctrgactggctccagcctctcccctctagcctctcagcaacctccacagttaggccctcctggagacccctcctggctgcctcaggccatctcctgtacatccctcctcctcccctcacccagcttgttctttctccccacccccatcttccttatttttcttcttttctttgcaacctcaaaacataaaccctcaagctcatttccgcagcctgatgtgcagtcttcctctctgtcttgtgtctctcctctcacccatgcctccrtgggggacagaaggctacaccgtgtggctctggcagcccctcactccacacagtgtaggcatgtgctgttctatcacacatggacactaagagatcttgtcaagtagacagagactaagaggacctatgtgttcatgacactttttaaaggtctgagctgcccattcagctttgcatgaaaatggagattgggagttttgaccaccccatgactgtggcttgttgtgagtgtctgctgtgaagtggcactgcctcttcacaatatcgttggaattccatttggccaggtgacaagaaagtattcacaagcctaaggaggaacttatctgctccttcctgaggaaatatgtgcccccaccaaaaaaaaaaaaaaaaaaagggaaaccaggcctcagtgtgccacagagcagcactgccactggaggccgccctctgtccagggtcgcgcacacgtgggcactggggccggatggcccccatgcctgcccttctcagagtgggctgtgctgcactctgagaagcgtctccacctcaataccaaccctgtagacttggcttaaagcagcggtcctgactcagctcacctcccggccatctcatttccttactcgggagagcggtgattctgtgtatttttctaataagcaaagtccccagagatgaaagaagccaccacaaaatactcaactctttctggaaacagaagaaagactgctgcccctatttgcagggagggaggatgttcttcccgaaacacctgagtgtgtgtttggaccacacgggtggaggacagttcagggaaaccaggtttgcgtttaaaagatcttggttccaacctcataggtgttgtacacccattccaggccttgtctccagcgctacctcacatgtataccagctataaatactgcagtgtatgtatatgtgtagatacacacaaagctaaagtatacattcaccaagataaactgtgcttgccagggctttaatctccccaggaggctgttattactggagtccggccccagagcgccagctgaggagaggaagtgagactctggtgttgggaggctgggcggcgctcctctttgtctactctttgctttttagaacatatacatagctagcattcacatgtggccacagatgaaatgatatgcttgactcccctaaaggtgcctttcttgtcagtgtgttacttyacggagatactttaaccttgatcgtccgcagccatactggattcccatggaacaagagagcaggaagtgcttccatcatattttccccgttcagtttgagcaatccaaaatggagggatcatgacaaaggaagaaagcttcctctcgtgagcttgcattgttttagttctccttggcatctagtctgacttctacttatggtctggaccagtggttctcagacttgcacaagcatcagaaacacccagaaggctcattcaaacccagattcctaggcctgattcccacagtttctgactcgtgaggtgtgcatggtgccccaaatttgtttttctaacaagttctcatgtgacgctgatgctgctggcctggtttggggaccatactttgagaaccattggttcagaacatgaggctgcagcgcgccaaggtttttgcattgttttctattaaggaatagcctataagaaataggtttctagctttttaattttgttaccagcctagactctatgattgacagggtgaccagctgtcccagtttgccctggggcacaggattattcgtgctgaaaatgagaaagtcctgggcaacctgggatgaattggccaccttcactattgatccaacttcccaaatgctttgtctacattgctggtatctggctcggaggaagccctgtgggaaaggctgtgagtgtgttgccccaggttccacaggacacttagagtttgggggacacctgccgtcaacgcactgcaacaatctttagggatgttaattgttcctcaggaggcatacgtaggaatcacatccaccttaaacatgcccacttatggcatttgggctcacacagccaaacagctgccattgtctgaagtaacgcatgggctgttgggctcctacggtgtgacagacatacttctctgcatcatccatgtaccagcctgttttcttctcactgcagcccaatcagctaattatcatcatttccatctttcaaaaacaaatgcttaaagatgccattatttaccccagggtcacagatggtaaaagtgacagaaccacaggccaaacacttgttgttttaccatgtgactccaaggagcatgaaatctgaggctcttcatccatgagattttccagccactcacgtcccttcctctgttggagatgaagcctctccagagtggaaggcagtggacctagcttggatcaggatgcctggactttgctcctgcttcttccagataccggctctatgacttgtatcaggtcatcttttaacccctctgagcctcactttccgcatctgtgaaatggacatcataatgtctgccttaccttctgccttagcttgtcttgaggagaaatagaaatgatgtctatgaagctgtcagtaacgtgtgaaagcgctgtccctrtgagcatatatgtgttaaaccttctgttattccaaaagagaggtttggcacatcaactcgaggaatatttacttaagtggaggagaaacaaagcaactaaagtagccaaaattagcagtgaacagaagaaaattctcaggaggaaaatggttcttcagctggttttgcaaggattagcaacatgtgtgtcccattccagagcagcaaatcacggcgtaggccctagccattttgctcagggaggactgcgctcttcgggaaaagttctgttgcaagtcacagattataggtgtgtggtagaaggccaagcctgagytgtcacttcctcagtgtcaaagggtctcattacatttcattacagtgattttctttttgctgaaacattaggaaccctggagcactgagccaagatcatggaacagaatcaccctctcctgcatgtttttgtttctgtctcctgcttttctgttctttttccactttctctatgtgtgagttgacttggctgcctgtagcttcatcgtcaaagctggtccacgtgggttcaacttggtgctctcactctcctccagcattgtttttgtcatcaaagctaaaattaaaaaaaaaaaaaaagaaaaaaaaaaaaaaccaagacagaaaagaatgttgtgattgccttctggccacgttcagcttgctcatggagccacaggcttcatctcagcactgtttgttctcagggccaagtcactggaaaccaggctcttaagttkgagcctggaaaagaacacgtgggactctgaagaggcggtgccaggacctcagagtgacagggcagggtccctgcacacaggggccttgcagggaaaagcacacatcttctgttgcagccttaaggattctgccaagagctacttccagacttcatttgtcatggccacatgctgatgctgatgttgagaaagaactggctgttagacgttatctactgctgcatgagagagccctctatgattaccaatataacatacagaaaatctgtgccctgtatgtcactgtcaccccttcctcttctgaaataggacacacagttgaaccattcagatgaaaaatagtgcattgcaaggccaggattacagcagtctttgcattaagataactatgattttgtagaggggattactgatgtgaggcctcaaaggtagttgaatttcattctaccgtttcaatgctattcattggttcagtttttacagaagactccaaatttaagattcactcactgtggagatttctaactcatatcagaaatgaggatcttaaacagtagccagactcttcaggattctctacgtcacctagtgaactggtggtatattgtgcagacgagctttcctggaccccgtcatgggctgcatttgtcaatccaagtaaatgaccgtcctcacacttttatcctcagggaagtttgttattttttttttaatttgctcatakaaagaaatatgactctgttctctgtgttttacactgaagagatacagaattaacaagaaaacaaagaaattctacttgaaatggcaccctcctctgtggtattgtgaggaagcattccttactcaaagaacgttagacaaacacctkccaaagcagggttggctctgggtcttactgcacaaaactaggtaggaatctataaaagtaataggtacttttcatttggacaggtgtatgtcctagtttaaaatttggttattgctgcaataaatactataagctttttctaagtttatgtaaccttcacgacgtaattgtttattcactagattgtgggcagatgagaaatgtcattctgccaacacactcatttatcctatttccacctcttgctatgctactaaagcaaatataactcctagggagcacctaggcatatacatgtgtgcagacgtgtgtgtatacacacatgggcttgacatgccattaaaagcatatgtttgattttaataggactgatttttttgacaagcatataagaagtagcaaaagtctggcactgccatttactgcagtgtgaccttagacatgtcacctacccttgagcctgagcctcagtttctacttctgtaaatgcataccacaatgactaccttttagggttgttgaaagaatcaaaagcaacagtagtacccagtacatgatactgtatcattttattgattttaatatgcatattgtttcttttttaacaatgctaaaattgagatccaccctaaaattaacggcatctaaaacactatgctgtggtttaatgggtagatttttttccttcttacggacagataaaataatagtacctcttacaatccgtagcatagtagaatcagtaaaagagagtaattggcatcattatgctttgtcaagtcatcagagaattatgtattttaacaatgctaccattgttcaaacacactttgggggcccaggatcttctctttagtgccttcagaactgcagtgaataaaaacagtctttggaattggagaaacttgttttcaactcagccctgtcacctgctagttgtataaccttgggcaagttatttgactctctaagttccagtttcctcttatataaaataaaactcatagtatttgttttataagtttgttagattaaaataagaaaaatgtacataaagcacagcctacttggagggtacatagcacgtgctcagtaaatgataacagagaaaacaaactagtaactgtgcttgctagtaacagaactttatctttgccattttattttcctgaaataagaaaaagtaatccaaagtcaacccttgccaagttgatggccgcattgagtgatactaaacactagcattaagacagccacttccagccaagatggagtgacagggacagatttgccctcctgcccaaaagacaaaacaacaacaacaacaacaaaaatatatggaaawatgttttttagtacacactggatgtcaggcaacggaggacagtaacctctgagatacaggaaacaaatgaggtgagcccttcgagtaccctagctcactgctgggagactgaacaggatgaggcatggggacaggattcgggcagagcccagcaagttccctaagcttagaggacagagttcagggcagccggactggtaagagaacgcagggcagaggtgaggagaattgcagwgattgctccagagatctgcagaggtgcccctggagcagtcagggcagtgctgatcagcacaggaggaaactacctaaggctggggaacaaccatccaaaaggattagagggaacagtactgaatgttcacacagggctgggaaggtggcctgtttccaccagccagactggaaaagattaaaatccacagggcattggtagggtgttcggaagggtcttgcctcttagaaggggcactggctgctccagacctgcctaacaaatcacgaaaggaggagccaaaagtaccgctgcttccaagtaacataactgggtcccagaaacgaagttcaagagtatgtacaggaatacaaaaatatctactgccccagaagataaatttcacaattaatggcatccaataaaaaattaccaagcttgcaaagaagcaggaaaatatatcccctaaacaagagaaaaagaaccaatcaaaatcaacccagaactgatgcagatgttagaattagcagtagagatgttaaactaatttttagarccttattctgtatgttaagaaagttaagtagaaggaagatataaagaagacactcagattgaacttaaagatgaaatctataatgtctgtcatgaaaattacattgacagaattaatggcgtattagacattgtaaaagaaaagattagtgaacttgaagacgtagcaatagggactatgtaatatgaaacagaaaaacagaattttaaaaaaattaacagagaatcagttctggaggacaacttccaatgccctaatgtacgtgtgtaattggagtccccaaaaaggaggggaggacagaaaagatatttgaagaaataatgctaaacatttttttccaaatttcatgaaaactacgaacacaaatatccaagaagctcaacaaaccctgtattagtcagcattctctagagggacagaactaataggatagatgaatatatgaagggtagtttattaggagaactgactcacatggtcacagggtgaagtcccaccataggctgtctgcaagccgaggaaccaggaagccagtccgagtcccaaaaccttaaaagcagggaagcckatagtgcagccttcagtctgtggccgaaggcccaagagcccctggcaaatcactagtataagtccaagagttcaaaarctgaagaacttggagtctgatgttccagggcaggaagcatctagcatgggaggaagatggaggccagaaggctcagcaagtctgcccttcccatgtctgcttttacactggcagctgattagatgctgaccacccagactgagggtgggtctgcttctcccagtccacggactcaaatgttgatctcctttggcaactccctcacagacacacccaggaacaatactttgcatccttcaatccagtcaagttgacattcagtattaaccaccacaaatcccaacaaaagaaacatgaaaaaaactgcactgaggtccttcataatcatacagcacaaaaccagtgataaacaaaaatgttaaaggtagccagagaaaaaggacatgatatgtttacataggagcacagataggatgccatctctttattgtatgttaattatataccttaataaagctgttagggcaaaataaattttagaacactgtaactataccatataaaactgcttttctaatgtgccttgtagacccactgttaaggcagttcccaaagggacacttaagacgtattttgaaccaagactggtataggtaatagtagacttctaagatcactttatttttatttttattttattttaaattccggggaccatgtgcaggatgtgcaggtttgttacttaggtgaacgtatgccatggtggtttgctgcacctgtcaacccatcacctaagtattaaggccagcatgcattagctatttttcctgatgctctccctcccccacaccccccgcaacaggccccagtgtgtgtgcccctccccgtgtccatgtgttctcattgttcagctcccacttacgagtgagaacatgtggtgtttggttttctgttcctgcattagtttgctgagggtaatggcttccagcttcatcgatgtccctgcaaaggacatgaactcattcctttttatgttttcgtagtattccatggtatatatgtactacattttctttatccagtctatcattgattagcatttgggttgagtccatgtctttgctattgtgactagcactgcaatgaacatatgtgtgcatatatttttataatagaatggtttatgttcctttgggtatatacccagtaattggattgctgggtcaaatgctatttcttcctctaggtctttgagaaattgccacactgtcatccacaatggttgaactaatttacattcccaccaacagtgtaaaagcgtccctatctctccacagccttgccaacatctgtggtttcttgactttaataatcaccattctgactggtttgagatggtatctcactgtggttttgatttgcatttcactaatgatcagcgatgttgagcttctttttatatgtttgttggctgcataaatgtcttcttttgagaagtgtgtgtttgtgtcctttgcccactttttaatggagttgtttggtttttttcttgtaaatttgtttaggttccgtgtagactctgcatattagacctttgtcagatggatagattgcaaaacttttctcccattccgtaggttgtctgttcactctgatggggactcaggaataagactgcacgtctacaaccgtctgatcttcaacagacctgacaaaaacaaacaatgggggaaggattccctatttcgtaaagtattgggagaactggctagctatatgcaaaaaattgaaacttgaccccttccttataccttacacagaaattaactcaagatggattaaagacttaaatgtaaaatctcgaactataaaaccctagaagaaaatctaggcaataccatacataggcacgggcaaagatttcatgacaaaaacgtcaaaagcagttgcaacaaaagcaaaaattgacaaatgggatctaattaaactaaagagcttttgcacagcaaaagatgttttctttaaaacaaatgatgctcaaattatttgtatatgtaaatgggtgcccagttttttgtgggttggtttgtttgttattgttattyttgagacaaggtcttactctgtctcccaggctggagtgcagtgatgcgatctcggttcactacagcctctgcctcccgggttcaagagattctcctgccttagcctccctagtaggtgggattacagatgggtacccagttttattttgattaataaaagcaatcttattaatcagtggtcatgctttatatgttatctacatatatttcaacttgttttctatgctgttgtaagccagtgtgaatactcatttatgattaatccaggtatgctcctcttgacctaaggaaatcacgcgtcttcactttattacaatttttcagaagacgtttatgaggtgatyatttgctagacattacagtatattaatcctttgccaaggtgaccgttgaattagaattgtagacaatgttgttggacaaaaatcctgggaagataaatagttgcaggacagaaaagcaataagaaggagatttgtgtgtcagtgagggatgggctcaaccctgaattttcaagtttacttagggttgccaggaacatatttactcctaatatccattgtcttataccagaagatacaaatgtatctgattcaaagaggtggtgtcatttctaacattatatctctatttcagttccacactgcttgttattcagggggagtgtcctaccttgctacattgctagatgacattactcatgagacagatcattcaaagaatgaaaagttactttataatgctagtgaaagctttcaagtattcattgtgaggtaggcctacacttgggtaattttatgggctctcttgactcatgtttgcagtattgggtgtggagcagtccgatgaagaggaagagagaagtggttgcagaatccttccctaaytgtattctaccaagtttgaagtatggaatcccacacaggccattcctcctgcaactctaccatggttaaaaatatatatctgacacaaccacaacctcagcttgatttaataaaaataactttgtgtctgtccatgtaaaaggtcactggtgcttattatggcccaaaggttatcgtttcagagcctcatttttcaatgcaaccctcatagcaagaacatgttataagaaagtaacctctacagtaatgatcatccacatctgcattctctaatgtcagttttaagtgakttttagggaaaatggctgatgttgaagtgctatcatttatttcccttccaaaacttgcaggaatatgtagagagctgactttaaaaaaataaaataaactcacattcctcaaacagatgctgtcaattggaaaaggcagtacccccaaaatctgcatatacctcagaagtgttagctggctatctttatataatagctactgtatcccatcttggtgcctctaatgaagaccattacagaaatacgtttaacataaattaaactctacatgggagtattaagtccccaggcaaattctttctttttggctggtatttaagataaagacctcatgagagctgcagtggatttgtgactcaatagctaaatatatgctttgaagagcgtggagaggtttcagaggagaatcacggagaggatgtaatgtagaaacacacacaaactttagaaggtggagggaactggagttgcttgattgctggaagcagatccaagtaggaggaagaaaaagaggtagaccagcttgtattccacacagcacgctccacgtgcgtgaccatagcaaggtgcggggtttccacgagccgtcgttcatctgtgtaatgggggcaaatgcccacacttgagagtttctgagactrgtagagaaaatatgcttgacacttagtaggtgctcagcaaatgctggtattctttttgctgaaaccccaaagcatcagagtcaacattgactcccctccctctctcacaccccacaacttatccatcagcgaayggttcactcactctccttcggaaatcaacccagaatccagctgtgtctcaccagcctcccaagccccgctaaacaaagccgccatcctctctgctgtggatttaagagcctcacggcctccattcttgccctcctacagcccattgtgaagatagtggcactttttacgtaagtgagaccacattacctctcattcagaacccacctgtggctttacagctctctcagtggaattccaggtccttcccgcagcttacagtgttctccatgacctgccccgccccaacctcaccccgcttagctcctgccctcttacccccatgccctctctccaaccacactgacccttcagcttcaccttggggcactgacacctgctcctcccccagaaagttagagggcaggrctgctccccacactctttcagtctctgcatcagagaagcctccgtggcttctctgaacccccctcacgttcttcacctgcctctttgtgtctctcctcccgctagaatggaagctgcatggctaagggccctgtccattgtgctggcaactctctccctagtgtcaaggacggtgcctggaacacaggagaaggacggtgcctggaacacaggagcttgctgatggcctgctgagtggaggagttagtattggccctggaatccaatgggaagcrttctgggctgaaattcagaacacctggggcctgaatgcagctcctgaccttgatacctaccacctgtctgatcttaggcaagaccttgacctagaacattggcctcatcctcctcccytggaggttggaggcctgcgccacttccaggtctgaaacccaaccagcccgtgaagtgcgggagagtctaggtagcaggtgctgttcacgtccttcctgatgttcaagccttgggggtgttgctgtagttgaacaggagctctttcgtttctgttatgggagttttttgtcagtgagaaggttcgtgaaccttgaaggggttactgatgtaggtaaggacatctctggggcctracaaacggggtggcgcctcttgtcctggaaaatattatagttgtgattttgcctaaaactgaggatggagttccagtcctacttgtgattttaaacatttgtatcttcctttaagtaaatattatttgggatgcaggaaatgaagttttggaatatttcaacagatggcgctgctggtagctattatctgactataaaaattaaatttaatccttactaatttcagtaatttcatttaaaaaaattgtattgcctccaaggataacacattagtttgtttagtcctttatcttaccagtacctcagartgaatggttttaacccttttataaagcattgccagccctgcaacctgggcagctcaatttcagaagttgctgcgttaatgtactgtgcactgtgactcagtgctgtcatagaaaatgtgccaaaatgctttactcagagggaaagatggtttgcatataagtacattccattatggcttatgccataaatacaagccaacccgggggggatctatttagatcctttaaatagatgcaaatattttcttaaatggttatacaaagacaaatactgtgactaatcagtggacacagagaaagatgcgtgcttgctagagtctaaggagaaaatgttttgcagagaatgatggccaaagtgtcagagatcccagtgacactcactcatcagcttccccccacaccctctccaaccatttccagttggtcttccagcaagaccattttaattatgyagccatgcacttgcttctgggtgtggtttccctgattgcatacttaagtgcagattacaaatatttggcaggattccttcctctgtgggaaccagacaagtcataacaccaactgaacgctctacactgttgtgcgggaaagaggccgcgtcatctcgggtttcagagtgcagagcaggagaaactggcttcagttctgctcctctctcacagccacatgcccccagccagcaaagggtctgtaatgagggctacagacttcgcttcttctgccaccactgtaaccagacccacggccaaaaagaaccagccagaaagcccaatgtggagcgacttcttgtctcagaaaatgactccacggcctgtgctttatggcatgatcacccagaatgctagagagaaattaagattcgggcatgcacgtctatgccaaaggaagacttcaccaggggatattcaggaattcactgataagcttaagaagatttttgcaattgttagctcttaaaatcatttttaattagtgaagcmgagaaatgctgagtgaaacagccatacttttccccaacttgattgggaaaatctccatcctgtgcccctccattccttcccatccttcctcttcactccgtttttcctggtaaatgttatggccacgttctgagcaaccaacctccctgtgctctgtgcggccagcttggaactgcaggtgggggaggatggacacccatttcctgtctcccaatctgggaatccatgggcataaatctgcaaacgctggcatagtcattgttggcatgaatggagacgaggaatatattgtcagcaggcctttgaatttcattttcagattaaacagttttttttaattaaaaaaaaacccttactaaagtcgcttagcaaacaaagagctatactgtttgcatcattgaaaacagaagagcaatagcagtgccagatactcctctattactttgtttgtttgttgttttttgtttttgagatggagtctcgctctgtcacccaggctggagtgcagtggcgygatctcggctccggcctcagcctcccaagtagcttggattacaggcatgtaccaccacactgggctaatttttttgstgtttatagtagagacggggtctcaccatgttgaccaggctgatctcgaactcttgacctcaagtgatctgcccacctcggcctcccaaagtgctaggattacaggcatgagccaccgcactcagcctcctctattactttttaattcaagtgtctcaaggtgctttacaagtgttaattaagtctaccttttttttaaggtgggtaagtagttaaaaaaaaaggkgggggagagagggagcagtttygtgtcatagtatttgaaggagaaaagcaacacttaagcctgacatcattgtggcttcagtggcaggcacaggttgataattctaaatggcaactaacaggaagaggatgaataatttactgtgtatatttacttggtgccaggtgctggactcggtttaacccccagctttaatgaggtataatttatttaaaataaaaatcacccactaagggtgtacatttgatgagttttggccatatacagtygtgtaaccatcaccacagccaagacaggaccatctccagccccagcaaaaagctcgctcctcctgctttgtagtcagtcctgcccccaacaccgccccttttctggtcactgtaagtttagaatgttgtgtaaatggaatccttcagtatgtgtcttttgtgctggccttcctttacctggcacaatgtcattgagatttaccatgttccccggtgtgtctgttcgttccttttcattcatttcatagtcttcgttcgtgtggatgcattgccgcacagccgttcacctgaagctcatttgggttgtttcctttggggatgatacgaatgttgctgctgtgaacatttgcattcctggtttgtgtggacatgtgtttttattgctctggttacatacgtttgagtgagcccacggttcatctgggaagtatgtctgtggccaggctcaggctgttttccacaaccgctctgccctgttgcattcccaccagcaacacgggagacttccagccgccccacatcctggtgtttccatacgacttcagcggatgctcacacagcacggtgaagtcactacttctgtgactcccacttcaccaaggaggaagctgaggcctgaagagagtgagtggtgtaaaatacaaaaaaaatagctgatagagggcggatccaggtctactgatggcaaaacccaccctcatagctgatagagggcggatccaggcctcccgatggcaaaacccaccctcatagctgatagagggcggatccaggcctaccgatggcaaaccccaccctcatagctgatagagggcggatccaggcctaccgatcgcaaaacccaccctctttctattacagtataaaatgtgttatgcctcaacttagaaaaacttctgttcataacctagaggacattaggacaggtgcagtgtgattacctgaatgtcagaagccaagagcctactacttcatctcacgagttatgaaaagttgaacgtgtccaagggaactttctaaactaactaaaaatcaagtttaggaaaaacacaagtgagacaaaagcacctctcatgtctaaaggtttttcccccaaatgcgtgtatcgtgtcatttctatgtaataaccgatcytcatccttgaaagccatgagggcagtggtcacatcctatttgctaaaggtgggagaagatggtgcatcagacccgggattcctggccctctcacatgtttcccaccagagtttcttgggttaaaataatttctccrttatgacagggcttgaggcagatatcctaagacctttaaaactagagccatccaggccgcgcgcggtggctcacgcctgtaatcccagcactttgggaggccgaggcggacaaatcacgaggtcaggagatcgagaccatcctggctaacacggtgaaacccggtctctactaaaaatacaaaaaactagccgggcgtggtggcgggcgcctgtagtcccagctactcgggaggctgaggcaggagaatggtgtgaacccgggaggcagagcttgcagtgagccgagattgcaccactgcactccagcctgggcaacagagcaagactctgactcaaaaaacaaacaaaagaaacctagagccatccctggagtaaaatgtgtgctgtaggagccagtcccaaagagacaggatgtcgacgtcggcatagtgagactcccacgtgctcacccacgtgcgtggttttaccccgtctccatgacccagccacgggtcttatattgggggcttctaggaccaactaggccaatagaagtgctttctttaattgaattaaaatgtcagtaaatttcacccaaatatccagatttccctttctaaaaaaatgaggccgggcgcggtggctcacgcctgtaatcccagcactttgggaggccgaggcgggcggatcacgaggtcaggagatcgagaccatcccggctaaaacggtgaaaccccgtctctactaaaaatacaaaaaattagccgggcgtagtggcgggcgcctgtagtcccagctacttgggaggctgaggcaggagaatggcgtgaacccgggaggcggagcttgcagtgagccgagattgcgccactgcactccagcctgggcgacagagcgagactccgtctcaaaaaaaaaaaaaaaaaaaaaaaaaaatgaaaggccatcagcactggggcagattcctcactgactggcctgcccgcctgcctggcctagtgggcacacagagtccccggtcctcccagtggcaatggcaccagcatggccagagggcacaagcctcaatctctttcatgtgggctgaccagaaatgccagcagtgaggctgagcttggtagcagtggaggcctgaggaggcgggggttggcagaggagctcgtytgggctcagacactgctgcctctttctgtctgaaggtgttatgaagtgtacctatcttttgggacatagattccttttactccttcctttgtatttgtcataaaataaattatagaataaaataaagacatatcatgaaattactcataattgcattacttgggaaggtaaaacataggtatttaacaaacatcaaagttttgggaggaaaaggcatttcataaacctagacatacgcaatactgaaggccaggagacttgtaagtgaaggggccataccgtggagccaggtcttctaaatctaaatctcatatctttccatattaagaaaaaaaaaaagccaggcacagtggttcacgcctgtaatcccaacactttgggaggcgaaggcagatgaatcacttgagcccaagaattgagaccagcctgggcaacatagcaagaccttgtctctataagaaatacaaaaattagccgcacactgtggtgcgtgcctatagtcccatctactcaggaggctgaratgggaggatcaccagcgtgcagggaggtcaaaactgcagtgagctgtgatcgtgccactgcactccagccttagtgcatttctgcacagacacactgagtggtgttttgaaaatcagattcacggcattctctttagcaccttccagcactttatggtgggggttgctggtgagatcccctggcctctctgcctggggctgccagggagctggcggatgccactctccaccggaggccttccctggcagtcrtagactgttcccactgtgcgcctgggtctaccgcctggtcctcctcacctggagccacactgatttccatcttgtcctgaatggcagagctttcataatttcttacaacctcagattctgacctctgtaggaccactttcttcttgagccattttgggactgtagatgctagaacacagcagattgaaaatgcagtgacatatcccaccatgtaacagaatctgtagtaagatgtcacccatggcagccaagcagaagcttttatcacagcccaacaagtaccagcgtgtcttggcggcagggtggcaggacactgygaggaggcaggtgtgtagacacagtcctcttctgcattggcacatgccctgtgctcatcgcctctcggtgggggaggtgtgtgtgtgtgtatataggtgtgtgtatctgtaagtgtgtgtatttgtaggtgtacgtatgtgtatgagtgtgttgtgcacttgtgtgtgtatgtgtgagcatgtgtatgtatattcgatgtatgtgagagtatatttgtgttacttctttctttttatcctccctgccgaggaggcaacagtaaatgtgaacggtgagagagaacagactagttgttacattctgtctcacccactgatgtgacttttctttaggaaacatcatccagggtaacctgtcatgaaaagctgccttttaggtcacttatgtccatttcagaaatggcaagggctctgggcatccaccaggcaccagrccctattataagaagacccctttgcagtcatctttttgtggtttgttcaatgggcacatgctgggcaaaggcacttaccaggcaaaccattatgtggctctggcggctcaagtgatgcacctggaacatacgccgttcatgacactttgcctttatgggcccctttaactcgaggatctcaaagggcctcagcagtatgaccttgcgtgtcctggcygggcrcccaagggaggraggccagaaggtccacgctgctttccgtgtgagaagtcaggtcacggtgccggatcagaactaacacctggcctgcaccctcattggtgtggtactttggaaggcagaggtataagaggagaactagcaatgttggcaaatgctgatagttggggtcaggatcccaaaacatttaaattctgataggggtcaggccctgtttatttactgccactcagctctctgcctgtcctgttcattaacctgatgacttagagtcatgtctggatggtttggaaggtgccacgaggaagcaggtggatgaagggcgcacatcaagaattcatggtagcacagagaaatgcctcatataagtgaagttcacctctgaggcccggtctttgaatatctggatgcctattttcttaggcagtagaatttcctctttgtgaccagctgaaaatatcatctacaaagtgcgcgtaatttcagtgtacaagacttagcctaatgtgtgaaattacagactagttgaaattaatgatcaatttggcaggtatttgttcaatgtggctatggcttatccaggctgtgacatccaagaacaatatatttcattgtcaatcttttattttgttttctttccttttttttccttgtctccaggagaccaattaattgttcaaaggtaatatatagagatctcaagagcatttactttggcacagtctctgcccctttgtggtctggctaacaataaagctaagatttgttttgtaatgacggttccagttggactggaattcctttgaagttcctgaagtttgctgttgtgagagctcaagatattatttgactgcaatgaaacactctctgtgtattatcaaaatatcgtatacactgaactgtaacaacttgcagtaatcagacttctccttcgaggtggcctgcgtgagtagagagcatccacagagagatgagcttctcccaacatccatttagtgttcagtcatcacgggccactcatggatctgaaccttcttacaaggtcgataccaacaggtatgaggagcagagagcagatcagcacggagcagcattagctggggccyccttgcctggcctggcagtgaagatagagcaccatgccagttgttcagcttctcagcgcttgcrtcagctgacctaaattatttaaggatgttgtcacctctaaataaatatagtcattgtcctggtctctatttatattttaaaactctttcccagcccaccccgatggcctaaaacaattcatatayttcagtagaagagggtgtcacagggctatttgcacaggtttggatccagtgccagcgttagccttcacacaagttacactcctctgagatgtaactgtctcctgtgtatgagtgccaaagtatttgataaccgccatctgtctgctctcaacacaggtttcacaagcacagtgatgtcttccattgtgtgcgtaacaactgtgtgtgtgcggagagagaggactctgtacgcatgcacatgtttggagctacataaatctgagaagcagttttgtctagtgtcgtttcagtaaatgggactcatttagtcagtttgctttgctgtcagaatcatattccagatatcagaatgtgctatggcaggtacttgtttaaaacaagtaataatatccttgtaatgtttagcaatacagctgactggtctgtgttccattacttgtgtaaaaggaaatatgtaaagcttttaaaaataagtttaaatgatcaaaagagatgcctgaaaatatattttggcacaggaaattacaggaatttataaatgtgtcatgtggaaagataattacaaagtttattttaatcttttatctctgactgaatcttaagttaaaatattcttcccggcatcctgtctggtttttgccactgtccctgctttacgtgttacctttccatgttgatctgagttgcatttagttgaggagaaaaaaaaaaataaaagtccattgaactcacttctgattccagcccaacttgtaaggagcaaggaagttgtcactcagcccccacaacaagaagaaagccaaacacactgaaaatcagcagctcttcctggttcctttagtgaatcaaggtcaccagggaaccaggctgctcaaatctgagagatcgatggatacaaagaatcagagcttgccaggagcagcagctgccactggagccagcattgggtgggaacattgggagggtgattgactaagggctacagackcggtgtggactagcttgaggggagacctttgttagggagaacagagtcctctgggtatatttcaaaatggttacttttctcctcctcctgccagaagcacaggggattttttcctgatcttckccttgagaacctactaaggggtaaaactcacgcaagttgtggggtccctcctaaggctggccaccaagagtttttgatctctcaagctaataaaaaccagagcagcaattaataaaaatgaaaacaggaaattacaaatataaaaagttaaagaagttccatcactattaatcccatcgatatgagaaggctaacaaaggaatttttttattcaaatgtttttatttatttttttattatactttaagttctagggtgcatgtgtacaacgtgcaggtttgttacatatgtagacatgtgccatgttggtgtgttgtacccattaacgcgtcatttacattaggtatatctcctaatgctatccctcccccctccccccaccccacgacaggtaccggtgtgtgatgttccgcaccctgtgtccaagtgttctcattgttcaattcccacctatgagtgagaacatgcggtgcttggttttctgtccttgcgatcgtttgctcagaatgatggtttccagcttcatccatgtccctgcaaaagacatgaactcatccttttttatggctgcaaagtattccatgatgtatatgtgccacattttcttaatccagtctatcattgatggacatttgggttggttccaagtctttgctattgtgaatagtgccacaataaacatacgtgtgcatgtgtctttatagcagcatgatttataatcctgtgggtatatgcccagtaatgggatggctgggtcaaatggtatttctagttctagatccctgaggaatcgccacactgtcttccacaatggttgaactagtttacagtcccaccaacagtgtatttctccacatcctatttctccacatcctctccagcacatcctctccagacctgttgtttcctgactttttaatgatcgccatcctaactggtgtgagatggtatctcattgtggttttgatttgcatttctctgatggccagtgatgatgagcattttttcatgtgtctgtcggctgcataaatatcttcttttgagaagtgtctgttcgtatcctttgcccactttttgatagggttgtttgattttttcttgtaaatttgtttaagttctttgtagattctgtatattagccctttgtcagatgggtagattgcaaacattttctcccattctgtgggttgcctgttcactctgttagtttcttttgctgtgcagaagctctttcgtttaattagatcccatttgtctattttggcttttgttgccattgcttttggtgttttagtcatgaagtccttgcccatgcctatgtcctgaatggtattgcctaggttttcttctagggtttttatggttttaggtctaacatttaagtctttaatccatcttgaattaatttttstataagatgtaaggaagggatccagtttcagctttctacatatggctagccagttttcccagcaccgtttattaaatagggaatccttyccccatttcttgtttttgtcaggtttgtcaaagatcagatggttgtagatgtgtggtattatttcagggactctattctgttccattggtctatatctctgttttggtaccagtagcatgctgttttggttactgtagccttgcagtatagtttgaagtcaggtagtgtgatgcctccagctttgttctttttgcttaggattgtcttagcaatgcgggctcttttttggttccatatgaagtttaaagtagttttttccaattctatgaagaaagtcattggtagcttgatggggatggcattgaatctataaattaccttgggcagtgtggccattttcacgatattgattcttcctatccatgagcatggaatgttcttccatttgtttgtgtcctcttttattttgctgagcagtggtttgtagttctccttgaagaggtccttcacattccttgtaagttggattcctaagtattttattctctttgaagcaattgtgaatgggagttcactcatgatttggctctctgtttgtctgttattggtgtataagaatgcttgtgatttttgcacattgattttgtatcctgagactttgctgcagttgcttatcagcttgaggagattttgggctgagacaatggggttttccaaataacttcttcttggtttagtcttgagagggtgtatgtgtccaagaatgtatccatttcttctagattttctagtttatttgtgtagaggtgtttatagtattctctgatggtagtttgtatttctgtggaatcggtggtgatatcccctttatcattttttttttttttgagacagagtctcactgtgtggcccaggttggagtgcagtggcgtgatctcggctcactgcaacctccacctcccgggttcacgccattctcctgcctcagcttcccgagtagctgggactacaggcacctgccatcacacccggctaatttttttatatttttagtagagatggggtttcactgtgttagccaggatggtctcaatctcctgacttcgtgatccacccgcctcggcctcccaaagtgctgggattacaggcatgagccaccgcacccagccagctaacattatacttgatggtgagaaactagatgctttcccccaagatcaggaacaaggtaaggatgtcccttcttccaccaccatgattcagtgttgcactggaagccctttctaatacaataatgtaagaaaaggaataaaaggcttgcagatttgggaaggaagaaataacactgtctttgtctttcacaagtgacataatggtctatatagaaaatcccgaagaaacaaccaaaaaaaaaaaaaaatcctggaactaatttatagcaaggttgcasgatacaagtttaatatacaacagtcaattggttttccatattctaacaacgaacgagtgcaattttaaatttaaaacaatgtatcagcactttgggaggccgaggcaggcagatcacctgaggtcaggagttggagaccagcctgaccaacatggagaaactccgtctctactaaaaatacaaaattagccaggcgtggtgttgcatacctgtaatcccagctacttgggaggctgaggcaggagaatcrcttgaacctgggaggtggaggttgcagtgagccgagatcgcatcattgcactccagcctgggcaacaagagcaaaactctgtctcaaaaaagaaaaaaagaaagaaatttaaaacaatgtaatttacattaacacccccaaaaaagaaatagttgtaagtctaaaaattatgtgtaagatctatwtgaagggccagccatgttggctcacacctgcaattccagtacttttggaggccaaggcaggcagattgcttgagcccaggagttcaagaccagcctgggcaacatggtaaaaatccatctctattaaaaaaaaaaaaaaawtagctgggtgtcccagctacctgggagactgaggtgggagaatagcttgagcccgggaggttgaggctgcaatgagccgtgtgaatgcatcactgcgctccagcctgggcgatagagcaagactatgtcaaaaaaaaaaaaaaaaaaaaaaaagagagagagagagagttgatgagttggaacttcagaaaaattaaaaacttctgctccatgaaagacactgttaagagtgtgaaaagacaagtagacaagtcaagactgggagaagaagctttgcaatacacatagtcagtaaaggactgattatctagaatgtacaaagaactcttaaaactcaaccacaagaaaatgaacaacctgatttaaaaatgagctaatagacacctcaccaaagaagatatacagatggcaagtaagcatatgaaaatatgctcagcgtcataygtcactagggaatttaaactaaaacaaccatgagataccactacaatcctattagaatggcaaaacattagaatactaacatcaaatgctgactaggaggaggagcagcaggaactcttgttcattgctagtgggaatgcaaaaggtttagacactttgcacgaatgtttgcaatttcataaatagcacgatggtttcactacgcaatcagcaaccttgcggctatgtatttacccaattaagttgaaaacatgtcctcagaaaaacctgcgcatagatgtttatagcagcattattaataatcaacctaaactggaagcaagcaagacatccttctaatggatcaacttctggtacgttcatccaatggaatgctcttcagtgataaaaggaaatgagctatcaagccatgaaaggccatggaggaaccttaaatgtatgtcgctaaatgaaagaagccagtctgaaaaagctgagtactgtatgattccagctatatgacattctgggaaaggcgaaactatggagagagttaaaagatcagtgtttgcccagggtccaggggagggatagaggaagagcacagggggcttttgtggcagcagaactattctatatgatatagtaatggtggatacatgacattatacgtttgtcaaaatctgtagactcatgccatggagtgaaccctaatgtaaaaatctatggattttaggtaataataatatcagttcatcagttataacaaatataacactctgagatatattgttaataggggaaattgtgcaagagtggggtggaggaaaggtcctgtgagaactctctgtactttctgtgtagtttttctataaagctaaaactgctctaaaaatactaagtctatttaaaaaaaaaaaaagccctttggtaacctaactgaggagaagtcacgaagttgaaaaaaactgagtctcctcatgccaaaaaagtagtgggatggaggggaatggatgtggtcccctgatcacttggccctgcaatttgttgaaccaagcagccacagtgttgtgcaggcatcggtcagctgaggatgagcaggctggacagcctgagatactagaaaacagagctggcattggtgactgtctgaaactggagagacctctctgagatcttaaacctcatctcttttcactgaagttcaagccactggtgggcctgctggatccgctgccagctgctgttggctgatcaatgtttgtttcatgctgtttgaaaatacagtatagacttcgcaattcccaatcctcgctgaaatgcccrgctgggagtggtgggagtgcacagccagcaattagatgtttcttttgtcacatccagaaaggacaccagggaatgcctttattccagccctgtgacatctccagcatctgactagcatctcagggcagtttcctaagaaagggtcagaagaatgcagcgtcagacagagcacagttaaccccagaattttgcatcaccactgttccattgcctggtgaggtgcttagattctctggcaaacstatttgaacaggagggttttcactttctggaaaggtacccagtctggtggtgatgaaacaggttttctctctgtactcccgggtgaaccctctgcagtctgccatttcttggaatcctcttaaccaatcttagaattatctcccagcatcagattttgcttattaaggaaaccaggcattgtgaaatgctcctttctacactaatctgaaagacataaatagtggcagagaatgttagacatagagcgggaaatttcagagacttttgttggaagaatcatcactctcctgcaggaactgcaaaaaacacttgatctctgtttacacatgcctgcagacacacagagaggccctaatcagcggcttgtggacagccttctatcatagctacccacttttctctrtgaccttccctgttcttccactccatgtctatcctgactctcattcacgcatcacggcttggacacttgtgctgcctttatcatttgggaaaacatggcgcagcaatggcctcaagtttgtcagacgtctcaaatgctccacagtcgtcgtctctgaagccagacccaaatgtagttgtcttggtgattactgggcattgtctaatccaggaaaaaacactcttttgtagaaatataataagrcagtgtgggtggtgctggatctgcagttttgtcattttgaaatttattgggttgatgcaaaaataatcacaatttttgccactaaaagtaatggcagaaagtaattaaaaataggccaggcgcggtggttcacgcctgtaatcctagcaatttgggaagccaaggtgggcagatcatgaggctgggagatcaaggccatcctggccaacatggtgaaaccctgtctctactaaaaatacaaaaattagccgggtgtggtggcgcacacctgtaatcccagctattygggaggctgaggcaggagaatcagttgaacccggggggcagaggttgcagcgagccaagatcacaccactgcactccagcctggcgacacagtgagattccgtctcaaaaaaaaaaaaaaaaagtaattaaaagtatggcaaaaaccaagattacttttgcaccaaccttaatatcttatacatacttagggatggacaaaatgctttcctctcaaattctcagaatgatatcgttgattccgtgtttctacgtatttgcttggtggtttacatttatatacattgtgactgtaaacccagaaaataataatgccctttagtagagtagccttttgtggtggggtgcrtgggggtgggtgttgtttttggcttgatcccaaaagcaaggcattcaacctgctgaagattgtggggcttcccagagagcaccccagcaggggagcagtcttcagtcgctgcttcctctaaacagggcgtcgagtgagaagcagcctcctgaacacatgcaccaacatgaatgtgtctgtaaactcctaattgagagtgataagccgccaccagactctgaagggcaggcgtctttgtaggtcacaggttgccgagaaagctaagctcagtgccgctgattgacacttggagcagttacattgttctgtggccttcgtgggttactgtggtttgcaggggagctgccatcagatctttgcctgagtctgtaggctcaagccttctgaaggcccccacagtcgctgcaaggggagcaacatggaaatgagcttcattgtctagaatttcaaaaagccctgcagccatgaggtgacagcaaaactctgagcaaaagtccgggcgagcagggaactatgaacaacttgtaagaggtgtggttcattgaatccagcctcagagcaagagttttcatgttttcagaatgaagatgcattttttaaaaacgtactaggtacttacccgaggccatggtttgacctgcagatgacttcaacgtttggaactatggaatgcagaatgaaaactaaaagyatggctgaagacaaaaggcacgaggagatggttatctttctctctagcactactgaactattaccttaggaagaatatatttagagcatggaagtctattaacttttcctcattttaaatgttctttttaattacagagccacttagaaaatattctagcttttcatatcagtgttttcttctctgtcttatcccggtgtagataagccaatttcttttacatatctgagctgctcattaattaagaaaaacwcagcattagttaccrttcatgagtcctcaaaaacacaaaattccacattccagcatgtgttacattaagtggaaaagatttgtctaatgctgtcctcatttttagtgcaggtgaaaaaaaaaaaaaaccaaaaaaaacccagaaacacttgattttgaagtagctctttcaaatcagggcaagaaaaatattacttctgaaagtcgtatgcaacacctgtaaccagcgcatcccttcttgtctgtggtcctcattacagtcatttcacaccctctcacccccttgtcccggaaggctgctgggcagaagtccccgagctgctggtgccacagggaggagttgagggggtggggcagtgcggtgcacgtgcgcagcgctctgacttgaggcttccaggagacgtgatgkgtttcaaaacagtgtgcaagatctcccctcgtttgtgacaccaagatgttcctatggagcccacccagcccctcccgaccacctgcattcccaaggaagccctgtgacctctccrgtcacccagccatcatgggaccggcggtgacagctttttttttttttttttttttttttgagatggagtctcrtctcgctttttcacccaggttggagtgcagtggcgcgatctcggctcactccaacctccgcctcccaggttcaagtgattctcctgcctcagcctcactagtagctttgattacaggcgcctgccaccacacctggctaatttttgtatttttagtagagatggagtttcaccatgttggccaggctggtcttgaactcctgacctcaagtgatccgcctgcctcagcctcccaaagtgctgggattacaggcatgagccactgtacccagctggtgacagctcttgatgccaagcccctgtttgaacacagaggtgcctgagctgcggtgaagtgctcagcacatgacgatctcattttcagcacccccatttttatggcaaaacatgcaatatgtgtttctatttacatgacataggaaggtgtcatccacaaagtgcgtttttctctctaaacaaacgtttcatacatttattgaatcctaaaaatgggaagaacctcagagatgactgattctgaagtgtatcccagagagtatgtgtgcctccagagtgtagactcagagtagtggagcctgaatgaaccccagaggccatctcctctgaagtgcatgcttggctgaggaggctaagccccaaaaaggctgaaattcccaaaaagcaccccagactatgatagccaacccttgtcccagcctgcccaaccctgctttgcgcttttttccattattgtgtgaaatcaatgtcttctgtctcttccttccagagaaaaattataataattcttttaatcagggcagcaagacatttgacaaagtttccttagaccttggtattagattttaatgttgcagagagttcttcactagtgaaaacagtactgacatatgttagaaatatattccattcaggtctgtgagtcttcactaattccagggtgtgtcaagttcagtgtaaaagtctctttggcaactcactggctctgttctcctgagctgataccttggtacttctctgatttggccagaattacctgatgtgttgctttgtctagttatacatctttacacatatttcaagaaagtttatttctaaattcgtagcattgttttcttccccttaatggagagtgttctgttttaatgttttggctcctttttattcccagtggttttttttgtttgtttgtttgtttgtttagacagagtctcactctgttgcccagtctggagtgcagtagtgcggtctcagcttactgcaaactccgactcccagggtcaagcagttctgcctcagcctcccaagtagctgggattacaggcgtgcaccaccacacccagctaatttttgtatttttagtagaaatggggtttcaccatgttggccaagctggtctcaaacttctgacctcaggtgatycgcctgccttggtctcctgaagtgctgggattacaggcatgagccattgcrcctggcccccagtgtgtcttaaaatattacattttctacctaatttttataatctacagtttataattcaaaggcctttttatcttattaagatatattacgaagtcatttctaaaagagttkataaatcttcaacatttatttgttctccagtatcctattttagcattttaacagaaagtaacagtatcctacttatttggaaactcagccacaaagtaactgaataaactttttatacaaagcaaaaaaagaaaaaagtaaacacctctaagatcagccttctcttttgaaatacctttacactgaggtatatttatttacaaagacaaatatatgcttacatttttatagaacatctaagttttattgaaatattagcaaatcaatagccaggtacgatcactcccttcattcaccctgggacttgtgcataggccagactcccgggatgtcagccgcatgtgatgtggagataactgtgatcttattatctgaaatgtttgaatacggagagggtcccagtyttcattagaaagaaacttaaccaggacagtaaatatgttcaattcctcttaaaatgtccaatttactgataagtggggcacattttttttcatttaaaaaaaattggaatggccaccttaaggcaaacatttgagaagaagaaaaataatacaaatatattacttacaaaacaatacaaaagtgtctcagaccaaaaaaaaaagaaaaaaaaatacaaaagtgcccattccatgttgccattagaccagttagtcttcagacaggactgtcaccatcaatttttcatttttaaaggattttaattctttcagcatgttcatatggttttataaagccccagatacccagcaaatccccttggtgttgtaagacaagwttgctgttaaaaaatgtttaggcttagtcagcttcttctcactgctgacttcacgaggggctctgggaaatggtgtttatactgagcttaaattgatagggcaagtttaatgcaattgggtcaaaggtacaactgcttagctggtctcatcaaccactcaggtttcagcatgggtttataaagagcagtctgtaatgataacatctggctgcttgagcgtgactgcattttgcctgctatgattgaatggaatttaatggtgggaggagaaaagctggggcaatttcatttttgagttatggttctagatagataagacaaaatggtagactttgattggtctgaggccggccatctcgcagattgcttaacagacctgcttcttctatagaaccctaccgtcaccactctcaaagacagctgtcctcattgagtcaatggtagaggcatggggtgggcacagctgctctaggctcatgtgtgtctgcacgctaggcctcctctttggcattgctcttctcgctgagttctggtttgttgctctgtggagactgtgaaggtcctagcgctcagcagaaaacacagtgcccttcccccagagggtgctccattaatgggagagttgactccattcactgctgggcagaaggtggatagaaagccagtgccaagctgarttcaggctgtcaaagagaggagatgaagaagttagttcccagtctccactatcgttccgcttagaaggacactgtgaccttgaggaccaaaaatgtaaatgtcataagtcagccgtagacgttayaggagaagcctactacgcaacacctccagagagggaccagcttaaactgtagctccggatcccaagggtccttttcattctgtggaaactcggtgattccattagtgatcacaccaccgtcacgtgaaaagctgactgtataatttcatattgcctaaggtcttttatagtcttctcaacttcacctttggatcattgagtgtataaccttttaaatttgcaagaacttttaatataaacaagtaggtagacaaacaggtagggatttacctccctggtgtaactaggctgagagggtagaggaarggtcagggctgtacacttagcacttaaccatatttcctccataaataagaaatattcttggtcttggtgcatcatcaggaccaacaggagaggaaccctagcccaccagatccacactgtaaaataaagacggcacagaaaaggaggggatgcaggtactgtggtgcaggggagaggatgctgggcagagcaggactcccgtctctaggatctcagagcgacttgaccctcagggactctcacggcctttgctgcttcatccataacaaggggcaaatgcctaatcagttcacttcccatacactcagcccacttatatgaaagccctcctgtagaccggaagccctacatgaatggaagtgtcgttgtcactcctctgctgatgacccacttggctgtcagtgtgcccagaggtcgagtttaactcctccaagtcgctgaaattaaaaatacggtctccagaaggaaatagtctatgtattataggactcaacttgacataccaaatccaaacctaccagatatattaaggtgatatttagaaagtagttcttatttgagctcaggaragctttttcacacagcgggcttccttgtagcctgaagacatgatgatatgtacacagaccctgtttttctagggctgtttagctattatgtgtagcaaggcacacgtgtatcctccttcatccagttgtggcccatcgaggcaggagtatgtggcccccagagagcagaaaggaggcctcctgctctggtcctggtaaaggaaggaaaccaagacatggaaaacaacagcaaagccttctgccccgtgcaccttcctggcagatctcattcctacccaaatgggtaggaaaatgggggaaagtaatgtataaagtgaaccccaagtaagtattctgttgtactaacaagccagaggtctgtctcccttcctcttttacattcatatttcattgtcactttcgattcttaggctggcccattacctccctcaaacaaggaactgaaacaaatctctttaaagcaatcatggttatacattttatatttcattgtcacttttgattcttaggctggcccattacctccttcaaacaaggaattgaaacaaatccctttcaagcaatcatggttatatattttgtgcccttaaaagtataagccaggaggggggagagatagcattaggagatatacctaatgttaaatgacgagttaatgggtgcagcacaccaacatggcacatgtatacatatgtaactaacctgcacattgtgcacatgtaccctagaacttaaagtataataataaaaaaaattaaaaagtataagccacctctgaatatagtgatcaaagataaactgccaactgccacttccaccagtcatactctgtccaagagatacacgtactctgtggtagagatgtgcaaagccagctgagtatgcagaagtctatctgtattcacatagcacgtgtggtgtgtgagagcgatcctggtgaacaatagtgacgtgaatatgttcattctacagttaggacgcttctaactttagtttcaaaatgtttctactgcactataccttggtatcaatgagatttttaaaaaatctctacccacatgtgaagcctctttactactatataatcactagtactttccaaattaaatattatgcttacattattaaacattagcattgccccctgttaggccagaactgtggctgatcagggaatagtttacatgagtctcaaacatgtcaatgtgacagagtgacacagtaaatcacctctaaccagtatggcttatactcaaaagcacattgctttcagcttcgttatgtgattgtccgtgctgtgcctgtaggagtggccagacaccatgaatcggggactctagggagaacaggacactcattcatctcasgcctctctaaggagaaacaattcctctcctctgaagagaatactcrcggtctcccatgtgagtgaacgatgaagttgtaagaacactcccccacctcactgttggtgacagaggacagtgtggttccaggggstgggcaggtgagagggtccagagagtgaaggagatgcttggatgatccagaaatctggggccagctcattggcccagactttcattagttttgactgaaggctgacacaagattcaagtagcaaagggcagattctcggccttacagagaaatgataaagattccaagagttgatttttgcagtaagaatgggtaacatttaagaaacaccaaagtaaaatttgactaggttacttctttttctttttataagcaacttttagcctaattattgtaaagaactataacggggcatgcatgtgatttatttgttgaaataaatgtaagcacttatccaacaaattcttactgggtgcctaccgtgtgccaggcactgctctgggtcctgagggtgctaagccagtaggtgacttattccaacaaattacaacaaataaattacatgctcccattcatacaggagggcacagaccacaaacatgttaataacatgtcaggaggagatctgtgccatgaagaaaaataaagcagggtaaaggtgatcaaggaaggcctctctgatgagacatttcagcagagccatgaaggaaatgarggagcagggcacacggatcttcaccagtcaccgggggactcctgtgcaaaggccctgtggcaggtgtatgctttgccagttgaaggaacagcagtggggccagtattcctggcacagagaaatggtgagggcagtagccacaagcagtcacataaggcggtgcaggccagtggtagggtttggggttccaggctgtgaggaggagggccgccgtgtacttgcattcacaaaaacatcactggtacctttggaaaaattccgcaggggcaaggataaaagcaaggaaaagggagcttggtttcctgctcttctaggagagatgatagctaaaatctcttctagggaactttgggacgtttcakttaagtaggtgagaacaagaagcaatatgggggtgctttggtgaaggaggtcccacagttcagackgagctgggctcctaaatgaaaacagtggctgccttttctgagccaacgacctgcacggtgcttctgtgcgttgccatcacttcccagcatccctaacgaagggtgcagagacaccccaagttgaatttatctccctttccttatcagtgcatgttctagaaaagccataagacactatgaaaagctacagtctgctcctaagtatcatatttgagcagtaagttctaagaaattctattttaggtttgacatctggctaaaggaaatcagagaaagaaatgtcatatttgaaacagaaaggtcaaaccccttacgatatccagaaaggagggaagtaggaagcttttagtaaaataaataaatgcaaacctatatccttattctgacagtctcgttgggaggattcatgcactatggaagttttgcttctgaatctgtgctcattctttattcaacaaactttaattcatccccaaagtagcattcctcccagctgactgccctcagcatcttggcaggagagaacacaaaatgttatgcagcagtaagccctaaatttgtgtttctgtcaaataattgggaaaatgttggaatgatttttttcagctcatctttgttgagaatttaaggcatttcccttggctctcaggacagtttatatacatcaacataaagcagctgatgtcatatacagagtccacttgcctgcttctccttggatgttccagtggtacagacaggcctggacctcccactcccacctctgggccctccccacctctctgagactgtcctcagatcaactgtacttctttgtgtgggaactctaatccttggattccaaggtactggtcacccatgccacaggttccagaattcaaagtggagcccccagcacacacggtgctgctatcatttctccagctgttcccaagtctgcaccttctgcagctcttcccagaggccctcctgccatgtcactgtttccaacgtccagagtccttacctgtctgtggtggtgtgggatcactgtcatcatccacacatggactcgattctgatcctgcctgaaaactcaccattgccacctcagtttcccagtgctaagataagaataagatgaagtaatgttcacctgggggagctgatctgaggattaaataagtgaatgctgtaaaggtctggaacacagaaggcaccgagaagtgctggctcccttccttcctttcccagtcccgcacaatgccttccagccacgcagttcctctctctccaccagcagcttcggagccarggcgagtcgccatttgtgactcccggtgctcctgctgtaggatttcatctagttctcaggtccttcctccatctccccagtgtagctgtctgtcatgggtttttgatgaccctcagatgatagcctcctccatgcttcctccattttctgccccctcaggcacccacccgccccttaacaatgacatccgactgtccactgcctagtccgcctcagcagcagggaatgctgaagcaagggctgcaccccccatcactgcagctggacccagcagtggatttgctagagcttgctcttgctcactcgctstctgtcagactcttactaactcttttgggttggaacgtggttgaggaagatccgggcagggtcctcggacagcctgtcagcagatctcctgcagccacagtcccacttgctggggatggcgagggctggggagtgggtgagcttcttgacctgccactagcacgcctccgtgtgtgctggatcaggtgcttccaaactacattcccagacccactcgggcttgtgtggcctcaagcaagccgcttaacctgtttccttatatgtcaaatggaggtaatcatacttaacgacatcacaggggtgtcgtctatattaattaattaatgtttgtagtgagctttgaagatgcaaagctgcttaartgttgaggtattctgatgatagtccttgcrtgttattagaaccttcccaggttcctggaccatcactcactgattacaactaggatctaatagcayctgctgtgcaatccactcagggatctatggcacgacccatgaggatytatcccaaatggataattgaaaaaggtatcagtgaggcctgtacgcagacttcaggccagttacagcrctccgtagcagttttccagaagccgagaggactgccccatggtatttgctgcaaatggtgttcgttgtaatcacgtgggaactctgatccttagatgccaaggtaccagtcacccaagccacatcttttatgtggcgctgctcagatatggattgaaaactgcttgctgggacttgtgatctgcttgggccatatctcaaggtcatgatgggaggaaatggaggccatctgttgtgatcagctgtgattcatttacaaacctgtggaactatgctggaaagaaggaattactaccatggttgtcttctaggcagctctcaaagactccaggtccgcatgagaatattctttgccgccaacatctcctgtcatctcgtattgcctgtacttcacaaactaaatcagtaggttgaattcagatactagatactaataatcagaacagagagaatccactcccacatcttgtttgagatatgcctcttattcagttgatctgcatccccgcgtctcgcagctttcatcacactgcctgactacttgaaccggaggtgtgattcctgtgccttttcctcattgacacatgttttcattttctcctactggatgagccacatgtgaccccctacatccgttctcctccccggcctctccgcagaaactcatcccgtgtctgcagtattgtcaaagtttcagaaagccaaaatggcgttcttagttttctgggcacattgtgttgtttttgtttcttttggattttggatgctgtcaacctaaagacactaaaagcccccactcttcaagatttgtgtgaaaaattaactctggatgtttttaaattcctacagctgaaatcctagactttgccttaaaaaaatgatgctggtgccaataggaccccttgcttgaaatgtaattggcacatggtttggtggctttgcctggcccatcccatgatgattacccccagatatggtcagcaggggctttccaggaatgctttagcaaggaaggatgcgggtgtacataacacagcaagcatatcatcttcttcaaggtgccacttaggcacctcctgtaagaacacaagcaggtccgcggctggggagccacgtgacgcatgcagggtgtctctcactggacgttggagtctaggccaccgagacttccttttggggtgcaccacagggagcccaggtttaaaaaggacttcctttttctggttaacatatattaacatgtcagggaaactaattgggtttaaaatggctgttactctttcttttttttttaatggatattatgtaacaattatgatcatctttttactagaagtttctgagcttcagttactcagtttcctgaataacaaagtctttctcaagtmattcagtgttgctgagagaaccattgaagtttattatgatacatggtcagggtgaaaagtgtcctctgcccgaaacagattcactatatgggagtatggggcaggggggcagtgagagaagcagctaccctatcctgttgccccctcagtggcatctgcccttggtccactgggtgctatcacccagctgccaaccttttcctgtccacccagccccttccttgcctgaacctatctgggtagacagtatggatattgcttattggtacaacaccctatcacacccaaagcaaggtacccaggctgtaactgggaggactgggatggaatgcatgtgagacaggcccctcccgagacagccatagtcccaagagacctgctttagttgaaactctgtccccatgggacctcattgggatgaaaggttctgacactgatgtatcatgaagcttgcacaaygtggtaaagttactaaaggccactgaatcgtgcagttgaaacgagtgaattttatgatatgtaaaacatgcaacagtgatgtttaaaaaaaaaaaaaaggccctgccaccgaagagcccacagcatccagtgtcccctgcccagcctccctccacagagcaggaactgcatacaccccacagaggcccatggttcatgaggaatagcaggaactgcatacgccccacagaggcccatkgttcatgaggagtttgccactggcccacaaggctgccttttccactctcagaaggccatcagaaagttgttttgggktttttttcctattaaactcaaacctgcctcacgtgacttctacatatatctaccccaagtagttccagcccctcacagccttgtgagagccgttcaggtattccaggacgtctcttttctctaagcaaactctcattgctccctggatgtttgtaactgcgagcttggctggggcaacagtgccatgccggcaaggtgacaatagtcagaatgttggccttcccaagcgtgtgcctcagttcctgtctgtgagcagaaagccgagctaaatagtctcaagcaacttaaatattctagagtctgtgatttgagacaaataattccaaatgtatatgttgattttttaaatcttactctagaagtatttttttatttttctgtgaaagtattctttaagaaaacaatatcattacccattcagaaagactgatgtttcttttcattcaactgagtgtgtcatacagtagaggaagcattccataatgatggagagcttccctctgcctgtccaggaggatgcctgtgatgcactctcacctggacacaggtaggcagagcgctgggctgtgtgggcgcagggccgaatgccagcagtcggtgggatgatactcttatgttcctcagcaaggcccaggtgggaaagccttcgggaaaatgcgacttcgcaaattgcagcttcagctttgaaacagtgaacaagttgaaggrtcctcagtagagaagcaacatctgctgggtgatgactggtgttttcatcccaatcccggtgaagagatcrtgctgtggacaccttcagtaggaaggacagtggcatgtataaaggcagctcacgatggaccacccaaattgaaggcaaataaccctcaaaattatgtcttttcacttggaattcagaggcacgttttctagataatcattcaggtatctatttgcaaacacacacccccrgcactccctgcctctgagcagttccaagagaatgctccagaaactccagaccccggcgctacgcaaggcaggcctgtagaggcagccagtttgctgccatgcgcagagctcacttcactttaaaaaggggagggggatgggatgccacttagtctaattatgggattttctttttytttttttttttttttgcttgagttctttgttacaaggatcttttaggagtaaagaataaaagaaatgacagagaattttgcccaactctccagggagagagaaagtaagtgggatagaaattggtgagtgcggggcacctgcccccgactgtcatttctgatggaaacgttttgaggcgcccacatggttgctgctcccacaggaatacttaggacaggaaatctggtctcgcctcacaaactcagccagtgaaagagccgtgtgaacaccagttaataaatgcctatgtctgtctttaacaatggagggtatcagtgtcctgcttgaaagcattcctaggctagtcaatgctgtaaaataatacagaaaactgacatttttattgtggcacgagttaccatacagcggctatctgctggctcatctggtttttataatctgccatgttgctgtcatactgagacttgacctgctgtcttcaggcacagcctctctcatttcagcacctgcctaagtgcataagcaccgcttccagcacagaggtcgatgggtgctgtccaccktgcacctgcgctgtctctttctcccttcagtcctcactctccactctgtctggggaagaatgtccttgaaacagagattccagcaggcccatgacacatcgtcagggacttcatgcttgtcagkagtctagtggcatcaaagatctctttaagaggattcgtggtcagccatccatgaatcagtcaagaggaccaaggctcccaaggagccaatggtcatcctgtggcaaaagaaaccctcttgctgtccccacaccaaggagcccctctgcaagtggacagggcagagtggccttgggtgagatgtgccccccgccactgagacctccagcatggtgctcttggcgccagacttcagtctttccttgtggctagtgaaggtaaagattgcctcctgggggagaggctgcttgaagggacactcagcacttctccaacaaagtcctgtacaggtagtatctcagttatacggtagaaggaggcaccgtgtacagccaggagccaagcccagatccagaagatgtaatttttttttttttttgagacagagtctcgctctgtcgcccaggctggagtgcagtggcgcgatctcggctcactgcaacctttacctcccaggttcaagcgattctcctgcctcagcctcctgagcacttgggattacaggcacacaccaccacacccagctaatttttgtatttttttagtagagacggggtttcaccatgttggtcaggctggtctcgaactcctgacctcgtgatctgcccacttcagcctcccaaagtgctgggattacaggcatgagccaccactcccggccccagaaaatgtgaatttgtgtttttttgtgttttccaacaatcatatcaatcctacatgaccatgtatactgattcaccatttatggaactcttcacagatgttgtctcctttgagcctgaatttgtgatggcaaatctgtctggtgaacagcgtgaaaaagaaagagggcaaaaaccatttttggagctcttggagacagtagtgacatttcaaaggctcaaacaccagggccaggagaccactgactcataaggcatttattttctgttttagaaagttccattaaccttatctgaaaaatgggctaagttttggaaaattaatcttattagttaagatcaacttgtataaataaaattcaggctaatacatttggcagatgtcctagagccagggccatggagacaggtgttctgggttccagcatcagctccaccacgcactctctgtgtgacctgggtccagttgctcacctctatgtgcctcagcctccacatgtatgacctggctgtggggtgtgcgtgacatcacaatgtgattctgactctgaggacattatcattaacacatatacactgtggccaaattagaaatcatgagttgttgaatctgggaatgtatccgcaggctcatcatgctcttgtctccggttttgtataaaaatatgttaaagacagccaggcgcggtggctcacacctgtaatcccagcactttgggaggctgaggtgggcagatcacctgagatcagaagtttgagaccaacctggccaacatggtgaaaccctgtctctactgaaagtacaaaagattagcaaggcgtggtggctggcgcctgtaatcccagctactcaggaggctgaggcgggagaattgtttgaacctgggaggcggaggctgcagagagccactgcactccagctgggcaacagagcgagactccgtctcaaaaaaaaaaatatgtgtgtgtgtgtgtgtrtgtgtgtgtgtgtgtgtgtaaggctttcaaacgtaaggaaaaaaactaatgtaaatattttacataaataggaaaatgtgtcaattgaaaaaagaatatatacatgtcagtgcaatatgaaatagcttagtgagtagccttagaaatttaagaaaagaataatcagaacccacgtattcatccctgcacattatttttaaaatttcgtttacccagttcccgtgatgtaaccagcactgtgctaggcactaatgatacaacaattaaggctcagatacccccaaggaagtagctctagtgtgacactttttgtcttttttgaaaatatacttttaatctcctttttgaaaagaaaaatgagagttagtgattcagtatagtgagttattttatktttcaagttaagtatcagtggaatttttttttttttttttgagacggtatctcactctgtcaccaggctggagtgcagtggtgtgatcttggctcactgcagcctctgcctcccgggttcaagtgattctcctgcctcagtctcccgagtagctggtactacaagtgcgcaccaccacgcccagctaatgtttgtatttttagtagagatggggtttcaccatgttggccaggatagtctcaatctcttgacctcatgatccgcccacctcgagctcccaaagtgctggaattacaggcttgtgccaccatgcctggcccagtgggatattttttaaataatggtaaagtacacataaaacttacatcttaaccattttcaagtgtgcagttccgtggcattaagtacattcacagtgttgtgcagccatcaccaccacccatctccaggactcttttttcctctaaaactaaaactctaccccattttctccaccccaagctctggcaaccaccattttttccatctttatgaatttgactactctaggaacttcacgtaagtggaaccatggagtatttgtcttttcataatgggcttatttcacttacagcatagtcgatgcatgatttatccatgttgtagcaggtgtcaaaattgtcttcctccttaaggaggaataatattccatagcaaatattaccacagtctgtcgattcattaatctgtcaacggacacttaggttccctccacattctggctgttttgaataatgctgctgtaaatatgagtggacaagtgtctatttgagactcagctttcagttcttctggttactagcccagaagtggaaatgccagatcatatggtaattctatatttaattttttgaggaactaccatactcgttttccattacgactgcagagttttacattccaatcatcagagcacaaggattccagtttctacatattcttccccaatacttattattttctgggttttttgatagtaaacctcctaatgggtatgagatggtatctcatggtggttttgacttgcatttccctaatgagtagcgatgttgggcactctcttatttgcttgttctttcttttgttgttgttgttgttaagttgtaggagtccactttgtctgcttttactcgtgttgcccatgcttttggtgtcatatctaagaaatcattgccaaacccaatgtcatgaagctgttctcctgttttcttctcagagttttatagatttaagtcttatgtataggtcttcaatctatttgaggtgacttttatgtacgatgtaaggtaagggtccagctgtgttctttcgcatgtggatatccagttttccagtaccattcgttgaagagactgttctttccccgtagtgtggtcttggtacccttgttgaaaatcaattggccgggtatattagggtttacatctgggttttctgttccatccttcgtatccgcgtctgtctttatgctggttccacactgttgtgattactgtatctttgtagttttcaaatcaggaaatgtgagctctccaactttgctattgtttgttgttgttgttttcaaaattcttctggctattcagagtcccttgagattccatgtaaatttcaagatggatttctatttctgcaaaaacatcattgggattttgatagggattgcactgaatctgtagatcactttgtgtaatgatctttaccctaacaatagtaagtcttccagtccgtgaacacaagttgtctttgcatttattggtgtcttttgcaacttgcatttgaaggcctattataagtgaagtacttgtaagtgaagtatatgtggtcatggaaaaataatttaatctttttcctacggcagtgtacagtccagtttaaacaataagacaaattgtacaaataagagtgtagatgggaagtgacactggcaccttggggacgtgccacgggggtctgtggagggaggcatgcatctgtgctcctcaaggctgccgagcagtaggacctgtgggagacaacaggagccacgcgggccaggtgtctagtgggtcggagacctgggtgactgcaggtggcccggaaggccaaaatacaatgcaggcctgagggatcgagagggacatacacagacacacgtgacccaggagggcaggaagaaggccagcaagcacacatgagtgtggcagcctgtacacatcccacaagcagaagcaggacaaacagcaggtccggacaggagggagacctcagtgtctgagctggccagaaagaaatccagtttattaaggtgtctgtctgtctgtctgtctgtctgtctgtctctctctctctctctctctctctatatatatataatatattatatataaataatatatattatatataaataatatatattatatataatatatattatatatattatatataaataatatatattatatataatatatattatatatattatatataatatatattatatataatatatataatatattatatataatatatattatatataatatatataatatattatatatataatatatattatatataatatatataatatattatatataaataatatatattatatataatatatataatatatataaataatatatattatatataaatatatataatatattatatatatattatatatatatatatataatatatatatatattttttttttagcggagtttcactcttgtcacccaggctggagtgcaatggcacgatctcagctcactgcaacctctgcctcctgggttcaagagattctcctgcctcagcctcccaagtagctgggattacaggtgcctgccaccacagcaggctaatttttgtatttttagtagagacagggtttcaccatgttggccaggctggtctcgaactcttgacctcagatgatccacccgcctcgcctcccaaagtgctgggattacagacatgagccaccacacccggcctgttaaggataatcttagaagatttctgatcttagatctctcagttccaccaagagaaagctcagattaacgtttctgagttctgcactgctgccagcagagaaaacatcaaacaaggaactttcattccccagcacgtgcagtgcaggagacacccgactgagtgtgtgatgttgaagttcattgtttctatctctaaagcacccttgaaaaacaaggcatttgggcagctatacttttaaataggaacaagcgaatattgttgtttatcgagtgccaggtgtagggsttttgcatacacattatctcatttacttccttacaactctgtggggtagggctcatggrtcyatctgaggatggagaggttggcacggagatcacctcaaagatggtaaaaactgaacagtcacatttgtgtgatgccaaccacaggctcacatctgaatctgttttctcccagaacagagatgagggccagggcaaaagtctagcttcagacctggacaggatgagccaagtatgtcccacgccctgggtgcggcccccaacaactgttcttctagttaaaggagggtgtgcccatgggatggccaggaccctggtgacaccagccctggaagtgaagatgcacagagcatctgagaaggaggctccaggagaacatctacctcccttccctgttctttgccaggaaggttgagatgccagtcccaggacagtgtgcacagaactattcctgtgagacaccatgctgggccttagtgagccatgccaggctgctccctcacaccagccggactctttgaacttgtcattgaattttccaaaccagcatgatgggtgtgagctgatgacccagtgagaaggggtgcatgctgccactggtgtgggctgctccatcaaaccaagcacaatgccacactcctggtggagctgcggcccagcatggccatcgtcatccagatagcagctcagcagggcaggtgcacccactcaggacaagcctaattttcctcccatgcagggcccaggaaaaccactcaccaatcttcactgtagagctggccctgccttctcaggggacatggcagggttgccgagtacttttctgtttcattcatctactcatttgcttttcaatctaacaagactgttttattctttagagcatttaatcttaagagtcagaggatgagaatagaaaattggctgggcacagtggttcacggcyctaatcccaacagtttgggaggccaaggcaggtggatcacttcaggtcaggagttcaagatcagcctggacaacatggcgaaacccccatctctactaaaaatacaaaaaaaaattagccaggcatggtgatgcacacctgtaatccagctactcgagaggctgaggtgggagaatcacttgaacctgggaggcggaggttgcagtgagctgagatcacaccactatactccagcctgggtgacagagcgagaccctatatcaaaataaataagtaaataaatgtgtttaatcagtagacagtaagggttaagagggtttttcctctgtgcttgaccattaaaatgaacgaagaattggtaggagaaggctttgagtgatttggattctgcctgaatctgaacggactggaatatttcacacgttcttaaaaggtgccactgtaccaagccatctgatgggacacaccaggagggctgagaacctaaggagtctcttatgtctttaaaggaagaaataagcatataattaatggttggttttttttttcctgggcatgagttggatcaaaagagagctgtcagagccatgggcaggagatgatcctgtcagtctttgctgggctcacggctgccctgaaagttaaaactcttggtacgataaatgcagttgctgatagtattggcaccagtccccacgagctagatgaggaaaggaaaaggaggccatctcagagctgcgtggccgagggaacctagatgattacggccagcattgccactttacagctgaagaaactgaggccgtggaagtcgttgcttgcccaaggtcagacggcaagatcatcacttcggaagttactttcagaaggcaaggtgcacattcactggccaggagactgctggaaagttccagtctgctctttcaaggcctctcttgacagagggatttagaaaactgtgaagccaggcactggccaccctcataaagtgacaagtcacctaaaactgttttcctgcagagctgtcaggagcatgatatctaaggggtgtcttcgaagtgcagtaaaaatgtcttgattggagaaggaggcaataaactttctttaaaactaaagaagagacagtttggaaagaacctggggtcattggccttgtgtttgagaatgagttggaatgtagcaaagggaaaaagatgccctttggcctgcacatraagatgcagtaattagggcaggagcatttggatctagtgcatctgtgccttggataacgtgccttcatgttacaaggtgcaaagatagcagatttcaattcctctaggactcttgctttaatggcgtattatgagcaaaattaaagtgtattattaaatgtgtcctgaaakaggctggatgcacagtgtacagtcagttttaatgttcatggcataagtatcatgagttaaatttagagttgggaaattatcagatattctgacctcaatttgaactaaaggcaagtcattgacctctgagactgagttttcctgtctgtgaagagttaatgacatacacttgaaacacgggttgaggtgaatcacagcaagactgtataaaaccccaaaagagtaatcggctaatgtcttcctagtacccaagcttacttcctgacagtacatcacagtattattccaaaccaggacccccagtggctagacagggttaacgtgtcattcctgccccatgaaccctagacttactggmaagtgatttgcagcataacccaaaacctgatgtatgaataatatttgaaggacagtgtcataaatttacactttttaaaaataaragttgtaattatatgtgtgtaaatgtgaatgactgccttaaacgtaagctcatgttctctctctgattctgtatagtgttgccttgagaaccattatatctggaaatgtggagcaaaaaagtcaaataagagctctcggaagactgtatgttttagatcttttatcagcaagatctctgggacagctagtggagaaatcaaacagggaggcagcaggccagtgatcgccrtaatagtttaaacttagaccagtaaaacggagctattttacaaaaaactgtggcattctaaatcgttgaaagttacrtttcattatttgggagtggtaattagctagacaatgtatgattaaagtattatgaaactaacggatctgacagttctctttgcaaagaaggaggcaagagccatgcttttttgtgtgcagaggaagacttcatcgcatattctttacgtgttcaaaatgattccttgctattgatacttgttctaagttttccccacataaattacagtagcattgtgaggctagttgtgaaattaagccatactttatggagctgcccttagtggtgatgtaaaataatctttagagtctcttgtgttactgagtacagatcataggcagcttcaaataagtgggcagctacatcagaaagcatgacgctggagagaaaggtttccttccgaccaaggtagaacctgaaatgtccagatatattggaaacatgaaatgtatccagcgtaacttccactgctatctgccacacagaacaaccacactgtttatattgtcacttctgaagagtaatagtgaggagatcctgaggagagaggatatgataagccattgcccaaattacagagccccaggcctattccatctaatcaggagaaagagctttaggcgaggatgtcctcactctctcaagagatatattttgagtcctcactataggcaaataggtatgggctctgaacagggtggctaatgaacaagaccgagttcctttaccgtcgagaagcccctgcaggtacagagcacccgagcatcagggatgtgggaactgtgctggtccctgagatgagaacagctgtggttcaagggaagaccagaccgctagcatcgttgtactctgagaggaggtggcattcggctggcactggagggatcagtacagtgtcggtaggtccggatgctgagaaggacattccaggaggaaggaagggcttgtccttcccccactccggcctgagaatgtgtccgagattcctcaggactcagcccagatgactccttctctccagagcattccgttccacacaagagtgaggactcacaccctttcctactttccttccactgtgcccaggaactaagtcagtgtcttgtcacactacatggcagttactggcatatgtgtctgtgtccccttgaccttgttcattagccaccctgttcagagtctagtacctatttgcctgtagtgagtactcaaaatatatctcttgagagagtgaccatatcctctggtatagctgaaggtattaattcttatttcagtatcccaggtatcagcttccagacccttcagcctgctggggacactctttttttaggatttgggggtggggagaagctgcttaaattcctgttcccatccagcaggaaaccccatgtctccccagtagctctgagaatcacctggctccagtgaaactccgaatgccctgcagcctccatttcctacgttccacagcaaataagatgttctataactgcaggtgttcagcggaggggttatgtcttggttaagaaaccactttaaagccacatcgtggacaggcctgttctcgaagcttcctggtcattgtttcttgcagaacactggttcctctgggaggggatggagttcttctccctctgcacctgcccagctgccctgagcagcccttgtcacctttatgcaaagcagtccagccctttccgccatccttcctccctagccagggcaaggaaggggcaagaggcctggctaccacccgtgcccacaggagccatcaaggtggtctttttgtaagagactgagtgagcccagtaggccccctctgacctggcttttgarctaacctccccaccccaccccccaccacatggggtgcccaggacccaggcattcaatgaattcctcttcagggagttttctaaatgtgcagaagtggggagtcttcagcctatgcctgattcctggttaatctgacttttcctgmatgcaggatataggtggaaaaaaatgggaaataaacctggaaaaggaggttgggatcatattgaaagatactgggctgggcatagtggctcatgactgtaatttcagcactttgggaggccaaagtgggtggattgcttgagcccaggagtttgagaccagcccgggcaacatggcaaaaatccatctctaaaaaaaacataacacaatttagctacgtgccgtggcatgaacctgtagtcccggctgcttgggaggctgcagtgagccatgatcgtgccactgcactccagcctaggtgacagagccagaccctgtctcaaaacacagtggtcagatattggaggtcagsgtgagagtttggcttttatttggcaagtaatggagggtcctgactaagggactgtcacagaaaagccctaggtggaatgagcacggaccccagagcaggggagggctggtctgtgaagcgggaggatgctgtcatcctccaaggacacgggaactgagggcttgggccacagcagtgatgcagaagaggtgcaaggaaagcctgggtgccagaggtactggaagtggcaaaatagagaagaaggagctaaaggtggctaagattttaaatctcaaggatgggagtgagtgagaggaatggtaacagtgcaacaggaaaagaacaattgcatttagttggggggagatacattgacttcagttttaaacatcccttgaggcattctgcaaataccgatcgagtgcctctgcgtgccaggcacagtgccaggtcctgaagacagaggtccatatagtgcactcagcactgatgttctagggaggcagacgacagggtagtgggtggattggcaaaataaccacagattgttaacaagtcctcagagaaatgagagggacactgtgctagagagaagcgaagttgcatgtggagacttctcacaggagatgcttgctgtagacagggtgacgctgcggtggccatgggcactggctgcagttgtcaggctggaaagaagaatgcagccctggaatccaggagaaaggcaaaggctgaagatagagtgatgtcctcacatagaggccatagttgaagttgtctgcagaaaggggcccgccccaggagagcctgcagaaagcagagacactaaagccaaggttggacccggagagtgggaggaaaagagcaagtgaggcaaggcaaggacagcacagggaacaccaggcgagggctccggacctccaggaggacagggtgagcgtccccgggcactcgagcatgccgtgcacatgccatcatgggggtagaaggcgccatttgcacagtgattgaaaagtgccttctgccatcaagacagcatccgtgggatattttakcgctgatgggtgcaggaagctatgctaggcacrgcacgggtgactgaaaatgggcaccatagattctctgcccatggggggcttgcattcagtttggggaaggaagtgtgctggatgacagggtataagaatcaagcaggctgggcgcggtggctcatgcctgtaatcccagcactttgggaggccgaggtgggtgaattacgaggtcaggagttcgagaccagcctgaccagcatggtgaaacgccgtctctactaaaaatacaaaaattagctgggcgtggtggcacatgcctgtaatcccagctactcatgaggctgaggcaagagaatcgcttgaacctgggaggtggaggttgcagtgagccaggatcacgccactgcactccaggctgggcgacaaagcaagactccgtctcgtttaaaaaaaaaaaaaaaaaaaggaccagagtctgaatctcatcctgatacaccccacttcctaacctcgtgactctgggcaagttactcactaagcctcagcttcctcatctgcagaatgtaggtgctggccaggccctgagagccaaagctgtcagagcttgcagtgggtgcaaggctcacagtacaggtgcaagaaacggcagtgggggtggccgtgaaccctggctctgtggtcaccagaaaacctcacagtccctcctcttcrccataaatcagggaccttgggatctccttcctgggcgggcagcagggattagagcagctccctgtgggacggtacctggctcctcccgacaggagatgctgagaaatgttggctgacttagagcacaaatttggtcttctaaagtggagagaatttcagctggggaacttgggaagggaggaaaaagtgcaaggtggtgagaaaggcaggagcaaagtgcaggcagcagcaaagttttragcctgtggggagtgcagcctagcggctcatatgcagcctatttatggcratggtgagacgccaacaggaaggcaggaaggctctggctgtgttgagggcaggtttggatgcccagcagagggcttccaggtggcaatctgcagtccacctgacaggccctagtcacagctgcagtgccatccgctatcgttcacacgttcgctcgggtggaatcaggggtctcccctggcggtggagggccctccccgcgtgggtccctggaggaagagtggatcctcatactggtggctgcaggctactagtatctgcaggctgaggtgccgtgctgacctacctcagaccgggggttccttgccagaagagcaggccgaggacacggggcaatgtcagtcacagcgctgggccctggggctcagaggggaggtgtctggggacaacgggggctgggtaagggccgtccgccctgggagccttgtcagctgaggagtcaggcttggcctctagagagggcccacctgcagggtgctttgctcctttgtttcctctcagggtttttaaaaggactttttttttagaggggaggggagctgggaagagactttcaactttttttaatttttaaacaattttattgaggtataattcacacatcatacagttcacccacttaaagtatatgatcaatgggttttagtctgctcagtgtgcagccatcaccacaatcaactctagggcattttcatcaccggaggcaaaaactccataaccattagcagtccccagtgtcccccccaccgtggcccaggtggtcacctctccacccctgtctctatgcatctgctgattctgaacttccgctgtccccacctagctataggtgtgtatcctttgaccagcatccccacaactgcctaaggccctggtaaccacatcctactctactaaaaggactctcgaaggctctccttgcctcatttatgccatgggagccgaggaaggcatgagcaccttgacagccacctggagatgagcacagttgcagcaacagagcctcgggggctcagctgccccrtgggcagtcagggttcgttttcaggaaggcgtaaggaaattgcatttccttacaatgcctgtgtgtcctgccaaatgggctgggtctcagggacaccaagctgagtgagatgctgtccctgccccccacacttgtctggtctggtgaatcaatcctcagacaccttctatgagggcacccttggagattccggcacatctcacctggctgaggacctcaccaagctccacttttcacaaactccacaggatgtgttgagaatcaccagtttctctggggagactcaggggaagagactcaggataagaaaataaaaggaagtatggaccggctctgcaggatgcccccctcgtcagcagatccctcatgatgtggttgtgttaactctgctaagaccagggctgtttaaaagcccccaaagattctctgtgaagagctattttaaaataggggaaaaaactcagtgaggaaggggaytccataaggagtaaagggaaggggcttcgtggggcccggctttaggagcagagatccgaggcccatcctgatcttcctgttggacttggagagacagaccgtccaggcccagcttgcctgtcgcccacatgggaccagcacagctgcccacctgtgctattcacaaagacacaagaagccatcatgaagcaggctttataaagtcaaaatattactccacgtctgttatgcataaggactcaggacgatggtcaccatggaaccccgttctccaacctagaggacaaagaccaggttgaccttcaccttagggggaaggtggagattttgaaggagaaatttattttctccctgacaaaaccaaaattttcagacaaatctgagcaacagttatagaacctttggggtaggtttaaagacggaaactggccgggtgtggtggctcacgcctgtaatcccagcattttgggaggccgaggtgggccgatcatttgaggtcaggagtttgagactagcctgaccaacatggtgaaaccctgtctctactaaagacacaaaaatattagccgggcgtggtggcacattcctgtagtcccagctgcttgggaacctgaggcaggagaatctcttgaacctgggaggtggaggttgcagtgagccgagatcacaccactgcactccagcctgggcgatagagtgagactctatttttttyttaaaaaaaaaaaaaaaaaaaaaaaagatggaaactgcccagatttcaagagaattgaggcttgctgcgctccccttagtttctgaagagcagggttccaagtgagcgaggacaggatgaaaaggagagtgctacgcagggcgatctttctgagccaggggccagtaggaaaggacaggggcatcctgaaggagcaggtgaaacgagggccttcttcggggttctgaraacttcctagtgtgcttccactgtttgggacaaaagaagtgtgccgagttgttggggtatttccgcttcacctttcatgaaggtaagtcagagagatgcgtgggggagccccagggcagaccccaaatatccaacaggaggctgaccaatatttaaaaacctgactttcaattaattaaatcctgaagaaggaaagggagagagaagagggatagaaaagagagagagagagagagagagagagagaaatcatccgagagacgcgagctgtacgcgcctgactgctggaggtaatgccttgagcagcagaatggagcgctcctgtctgggctgctcagggcctctccacgggaccttctgtgcctgctccatgctccgcccttccccagtgctaagcactgagtcacctgataaagatcgcagtggcccttcaggttctgccacaggctggggtcaggcaggcacttgccaggtgcacggcaccctgaccttccacaaggtatttccctcctttgacaggaagaagataaagcttttttcctgtccattctgagacgcaggctgtgctgctccatggcactttctgagtgccaccagctggcagggcatatttctctccatttatcttcactaacgtgacagtgacatagattgtccctgaggaacacaagactagcccctgaattacatccttcaggacctccagggtgcacaggaatggatgaggacctcactgagccccagaagcccctgaatgacagcatgtctcaggatgtcccaaaatgagtccagtccaatctccagcatgtgagtagccaccagtttccccaagggaactcctaagaccatctgcaggcaaagggtctaatgagcacccagaggaagaaatatatacagggatctttcctgaggaagccagaaataattctcacagctgtggagccaacgccacctgtaacagcttccctgaccccagccccatggggtcactctggacttcagggtttctaaccagccggcccttcagggccctagcccagcctgctccctccacctcaagctttacccagggcagcccccactgtcaatcataactctgcctaaacagtaccgtgttggcattcgtgaccccccccattacccaattttctttttatcagaggccttgtaaccacctgrttgtttccttgattgcctgtttactgacagtgcccccacagtagaacatgagctccccgtgtgtctggttggctgctgtgtcggcagccctgggcctgcgctgtggggatgcaagggcacattccatgtgctctggaaccacacctgagacagcctgccctgctgtttataagaaatgtattctctccaaaacgggcacctagaaggcacagccacatccagcatgttccacgggcatgggatagcctcagagagccgctcagcagagaggtcagggaggttcaaggctggggagtggccaacacttaaagagggacctgaggcaggaggagagcgagcatacgtggaaggccttaccccgtgacaggtgcataacacacctgcaggtgtggcatgcctgaggatgaggacaccaagccacctcaaacgtggtgaatctagtgtcaacctaagtcyctgtgaccctaaatcccatgtgcttctccacgggcacagtttcagtgaagaagaggaagcatattccaggctgtcgggaaccaactgcatgaggagggcagcagattgctagaactgaagagtgatgtgggggagccttgggcaacagtgctgccgagctggtgccatggactggtacatccttctggggtctaactgcatcccctgggccccagtagagccgtcactgactgtgcagtggcaggagctgctgtctgtcgggcacttacccaacatcaggcactgattttatctctgatctttagcattggtcgatatcattcaacaggcttatacatcrtggaacctaggcccagtgaggttcagggcatccaggaagtaagtggcagaactggaattcagcttggatctgtgttttcattttgttttgttttgttttgagacaaggtctggctctatcacccaggctggagtgcagtggtatgatcttggctcactgcagcctctgtctcccggactcaagccatcctcctacctcagcttcccaagtagctgagcctacaggcatgcaccaccacacccggctggtttttgtagagatgggctttcaccatattgcccaggctaatctcgaacttgtgagctcaagcaatccacctgccttggcctcccaggtgctgggattacaggcatgagccaccgtgcccggcctcagcttggatctgactccaaagctcatgctcagctggcratgactgctttgcacctggggggtccacattcagcaaacgagagagttccacttggcccccagccgtactaaacggggcagttctgggaggttctctaacaccactgggtccttgaacagctgtctgcatctggactgttagccttgcacttcrtctycctaccttctgctcgttcctcacaacccagctcagggaawatcttctctgggaagtatttcccaagagccctcayttcactggcctgtgagcgcctcctgcgtcccactgtgaaggtagcttaatccttccacttcccccagtgggaaaatgctaggcacgtcacccagtatctgtttctgcaagtgcctcagtggcatccttaacatggtgcgttgtggaggccaccacacagccctctctcctccgctcctgctcctcttcaagcctgagccctctscccgtatccacaggcacccacctccttatctgctagcctgcccttgttgcctgccgcagacacaggtacctgtcggagatcaccatctatgtcagtctccatcactgaccttgagcttctgggctgactgcatgtatgaacgaatgttggccaggatggaataagaagatttcaaggtgtctctttctttctgcactctcactatccagactcatgagctaagtagttgtagataaagtctttatgtacctccagactcactctactcatgcaggtcccattgacctgaaaacatggtctccctcagtctccacaccctaaggaatatttgtgtttctgttagtagtcatggtggtagcattaataagacccagagagttctttctaattctgtgacttgggttcctttcatagaaaagagtgctctgaagggaacagataccaagcaaaggtcccttggtagtatcccaaaccccagagttcccatgtcaggtggctctgagtgttccttgccatcctcaaaggcaatacttccttgaataatgccccccagagcccagtcctgcctgaggaagtctgggagtctcacggcctcatagtgtcgggggttgggggggtggggcatagaatgaatccatgggcacacagccagtggcctgtgtttaagctgctcataagtataaagttcaggatcatggccatcctgctggcactcgaggagctgatcagtgttttcgagaaagctacgttaattaaccaaatcaaagatgctttttcttcagccagggttccctctgtgaaaccattcatctccagctggagaaaagcagtggaatttttgttttgctctaaacccagggcggcatcaggcttttttagtgtggggctttgacatgaagagaccatgctcatttctgcctggtgtctctcatgccccccacctttgtttctaactcttaggttccattcctgtctctgctctaatctaatctggacccctgtagcgcagaagcacattctctctcttctgtccgtgttgttggcaaatgctttctttacacacctcagcctctacctggtggtgaacgcatggctttgcatttattgttaccaagtgtcagcacacataactaaagagagaagaccctcaggggaggtggtctaggttaatgggctagtaacctagtctttggagtcagataagcctgggtttgaatccaggatccacctcgagtggcacacggcaagttacccacttaccagcaccgccgtttccttgcctacctcgtaggactgttagaaggctgaaggacagggggcatgttgctgctggtctaagggccctcggggaacccttgtctaaactggtaaaaaacccattctgaacagccagtgcagggactgactggcccactgcagagggaactccccttgggagccttctgcatggaggcctctgtccccacaacagtctgcagtaggtcaggcatttggttatgatctgtgctggtgcggaacgtgcttccccttgtgccattatttatgtgtgatgcaagtgcttcagtgacctgctccacccagggcaataaggtgccacaagtgtccgctttatagccacgagagagcataagcacccagagagcctgacttggcacaggtgacagctccccggaagtccagccgtgccttcacgggggagagtttgaagcagtagtttcctcggggccttgttcagcacamcagaactgagtcagacctctgccctccaggccacctgcctcctcacaagtgctgtctgcggggccggccgggaagcacatgcccagctgcggggctcctgggcctggagagatgcctggaaaggccttactgggcagaggtgcagggagaccagggccaagggaggcctctccaccctttgccacctgacaatctgctgagtcacccagctcmcccagacacctggcttgactcagactcagtgcagacaacgagccagatggagcccagctgggacaccttcagtcctaccactctgctgccacagctgcctggagccatgcctggcgctgggctaggaggcacagtgcggggtccccaagrcaagaagcagtctcaaggtgttatgcgagcaccagcaggcctggcagaatggcaagcagtagcttggagaggggccgttagagttcttccggtcccagcgatcccccgtktgcaggtgaggcaagcccaggttcagagcttgtgctacagggccaggcctaggcctcacctctcctccctgctgccttccacgccattcccattcctgcacagaaccttgggcaggtgaggcatgggcagaccttccggggcccactggtacgggtaagaatcaaacttgcaaggacataaccgtagcgtggtaagggctgcctgtgtggcagccagtgcccccaatcctaggctcatggtgtcaggctaggccctgagmtctccatcctgggggctcatccctccatgggagcccgttcctccatgggggccgcatcagcaccaaccttccaggcaccttcaggacggccagagaggtgttggtggctgtgttctcacatgagtctcttgatcatcttgtgagtgatcttcatgctgcacgcttccttgtataacagttaaatgaagtgaaagtaactttgaattgagtccaagggttgatttttgcccaacttcagcctcaggctagccctttgtcagccctggctcaatctttatattgtctgtcttctccaaactcaggaatcccaagaccttcagagtgggcattactttgcaaagatgggcctactttctacgccaacaggctttttagaattgatgtggccagatttctagaactatcccacactctaggccacccttgtccctctttcctgtgtttatttggagagcatgttgtgcacatcaaagaagaggttcctgctggtggtttcatcaaattactgagcaagagaagcaccgaagagatgcagacattcctggaacagattcctcgtggcacgcggatctcatccctttatttctatttccgctgacattctgggaatgtctcttttctgtcgtctcctagtcctctttgtgatgaggagggctgccacggtggcaggttactctggaaatgcgacgtaggaaaagtgccttgtgaggaaagggctctaaccaaacagtagtgtcctaaagatagccccagctgagagcagagaagagcagctcccagacgcagtgctggaggtgccgaggctgggccctgcttgcctggagtggctgtgggttatgtacaaggctgtaatcagtaatttctcacatttggatagagctgtcttttccaaagcgccttcacatccaccgcagtatcattttaggcaagttggcagagtatgaaccaggctctcgtttgcatctgcagacttgagggccacaccccccggtgggctttgcacagcacagaccctcagccttgtcagtgaggctggccccgacggcaaacaaagcacctgccaagggtcgccgcacagtgtcgccctcggagtccccaccaaagctcccatcaaagtcagcctgattattttccactgcattttcctgaaaggatgttatgattttctagatgtttggtggccggcgataaatcaggcttttatgatgtcatgtgaaaggccccctctcggacttcctcctgctgcagccggaggatgaaagtgggccatgttggttgcgcagtggacacagcttgccttaaccctttcctcgcctgtcccgtggaccagggtcacggaagaagacaagctgtttcccctcagcctgcctttcacaggagcatagccaggacatgtgaaacggagcccctttcccagagctaagcagacttgctcagcagagaggctttggcctcaaatcaggatcaaaacaagaaggcgtgctccatggaatgatatgagagatcacaggtgattctctagaagtaatcttttggaagagtccctgttctctaatcttgaaatcgtgaaaaaggagatgacacgtaatgctggcagggctgtggtgagaggcacacgcagactccactaggagaacttcgcttctggcattgttgattcgtagaatgtctttgaaagcaataaaaacgttctcattcagatgaaaatcctaggagttctctgtcagtcctctttcccccaccaccgcctccaaccccagggaggccttttctgctctttctccaagatcatctcaagttcacccacgmctttccgtcgctatgtcccctccccacccctcgtgtccaggccaccatcgtctctcaccacatctgtgactggagtctcttagctggtctctcccctgctcttgcccctctttctaacccacaggcagcatctgcaggcatctttgaactcatgcatcgcagcatatgcccccagcacttaaaaccccactgtggctctaagcaaagcccagactccatattggatgtgctgggccggtaaaggatggagttcaaagtgagcgggttctcactgtaaacgagtggacttttacatagtgcacatggacacagagagacacacccagagagagacagagaaaracacatacacacaagagtatggtaaaaatgttttcaaaacacagrcaggtttcagtgctgtgcctcatcctcttgagagctactgggaaaggagaaggcctttaaccagcaaggggagctcagggtcacagcttcactkcaggcaggaggaaatgaagggtggagcggcatctcagtagccttcagaggctgagcgtgtcctcakttggccagaagagggacagccctatcacagcacaccctagcaggtgctggaataggatggccaggttactgcctctggtgatccctagtctccatgtctttcagggccagctgggtgcagtcccgctgcagtggccagcacctgagtcgccaggtgcttttaggttaggtggaccaagcacatcaaagagtggcagattttccaggggaagagggattatgtattagagttgggccatgcagggcaagaacgactcgtccacctttttaaaaagacacacagctaaatgacagtttatagtcagttccatactttcaaaaattggcaccagaaagtcagaattgtaagctccatcaggttgaggtagccagctttccaacctccagccacagcctgcaggcggtagatactccaaggcagtcactgtgaccagacagcagagccttgtgaccacgtggctttgctgggaaaggcctgggctccatggcagaaaccacccgggaggccaacagtgcctgcctctgtgtccctcccagcctcgtggtcatgggctcctctccccgtcactccccatgcccagtcacagcagccttctctccggggttcccttaaggcctttttacctgcagtgtccccaagagaccctcacaccccagatctttctgtgaccggcccgtgcacattgtgcagatctctgatccagtgacctctgtggaaggccttccccgcccagccagtacagagtgccctcccgccctccaacaagccagccccctctgcagtcgctccctcgcactcccatcagccgaaactcaggtctccgccaactcttgtgctgccagaccctagaacrtgggcttcatgacagccacggccttctcttgtccacgtttgcttctccaaggcttaaagcagtaaatatgtggcaacaagcaagcaagagactgtgaaatgtttgcagaaattgagggacagcagagtacaaaawcttctacactctgttacagctattcagaaaatgattatctaaaattagaggaagggttggggtgcagggtaaaagttgcatgtaagtatcaaagaaaaactataaaacagcccacttaaaaatattacatcttcatccatgatgttactgcaagaaatgaaaagaatcgtttttcctacattttagtgataaataatagcctyaatggaaagcctgtataggatgaattagaaatggttctagctgttaaaagcagctgtgcaattttgaattctcacacaactttgcaagccttgctgtccccgttttacagatttaaaacctgaatctcagagttattaagaaagagttaagtggttgagccacgttgtgattccaggtctctccagcaatgccgccatgttggttgtgtccacgaatttttcttcctttagaggcgaagtctcattctgtcacctaggctggagtacagtggtgtaatcatagctcactgcagcctcaaactcctgggctcaagcagtcctcccacctcagcctcccaagtagctgggaccacaggcaagtgccaccacacccagctaattttttaaagttttttgtagagacagggtcctgccatactgcccaggctggtctcaaacttctggcctcaagcagtcctcctacctcagcctctcaaagcactgggattacaggcatgagctatcaygcctggccacgtttttgtgttgagataaaatctatatactgtgaaatgcacaaatgttgaactgcagtttgatctgttctgacaaacrcacacactcttgtaaccgacactcctattcatataaggagcatttcctcactccagaaagttccttggtgaaccttcccagtcagtactcctcccctgtcctccagtctcgtttctataaccatggatgcctcttctgggacctcacatacagcaaatcatacaatatgtacaatatggactcttctgtgtcagtttccatccagcattaagttgatatttctgtgtgttgataccatctattacttagagacctctttgccactcaaattaatgtgtgtaaagtgtattgtttacaacacattctacagagggttttgtcctattgagtgttgtgactgctggactaggaatggcagaacctgaccactagatgactttgtgacattctcaagtacttggctgaaatacctctgcagatacatttcggtataggactttgttcctctcatgaagatgtaaagaaggaatgccaggtgaccatgtagtatagacacctgacaaaaccctctgagccttcctgtgatgatgggtggccaaatgagtgataacagaattatagtaaacctaaagagttgtcatcatgctcatctcctctccatacctctccaaaaatttgctaacagatatcayagtaattgtcttaatcttttctccaatataaaagtccccagagaaatggccaaaaagcaagaatctggatgtggtcaggtgtttggctaggccttgagttgcttaagaagtggctgagggaatgaatatttggaggagcctgtgggtatatgtttgatagaccctgtttgaatgaccctgttacgttatttatatttggattggggagaaggaggaaggggagtgagggagggagggaggaaggaaggattattgaagtgaggtgtgttgaattggaggacttaatatactgtatacattgagaaaaaccacaaaggaaaaaaaccccatctacattgtactgtgtagtactcatgtccgaagcagtggtggtggggcggagsgggggacatttctaagaggtgggtagatttcctaacaaactagaaggaaacaagcttaaggaaaattaccttcctcttatgcaattcaggatcccctgtggcctaggtaggcattcctagatgagaaggtgcggggtaaagataagccagatgacaagtactttagcttttacctccragatactttgctttgcacagaactttcatctctaggaaagaggccacctgcaacagatacaaaatctcttaagttgcattttggatgtgattgttttgtggtttaattagctgatgtctataaagcgctttgagggtagaaagccctaagtggcaagagcacagcggccttcctcttgtatccagggtgccacttgccagcgatgtcacaagagtccctaatcggtccactcaaaggcgctttatctcctgtcctcggggttttgccacctccttccagcatgggtaaatctttacaccctagatccagttattaacagtaaccagtaatttccgaccaacrtggtgctggctttgaagcctggaatgctgaggtcactgacaaccttatctccttttcattaaatggcccccgcatcacaactatgagtcagccaccccccatctcagctcgtcagagtggagatcagtgaactaaccggaaccaagagggctctagttacagtcattaatctagctttccccaggctgatgctactgtaagcaccggatcaagaaataaagctgacaaaaaattaactccacgattgcaattcagatgtagaacaggtacagacagacgcagcaccttgtaaataggtatgatgcaagatgacatccccaaagtcttayatggttatttcatttaaagaaacctgttagacacctacctatgagtaggcagctccccaaaagcttcccagcgcagcctctgagaagtgctttcctctgctcagctggctcagactgctgcctggttgaacggggaaggcctcaaagttgcacagggctggacagggcagacagtgggcatgttcctgggctgggccccactcaggaggtggggagcatgctcctctgtcccagtcaaaggccaggcagccaatgggcaggcggacacagccagggcaaccgcctggtctggggaaaggaacaagctttggggtggcataaactgcataggccacatgcggttcgtcccatggaggaaagaggaccgccgcactcatctccacacatctccagcatgtctgctagaaagggctttctccagaatatgttttaaaactttgtttaaaaggaagttaacttgcttaaatcctgtatttctcctaaataattatgttgtctgtgtagcttatgagccctttttgcttaactacaattcttgttttatgtcaactatgtcaaccatatttttaaaatataaatgaaaaaagatccatttatatgtaggttgcactatacatgccattaagttctcctttcctgaagtgaacacctgtaactttttttaccaccctaagctttattgacaagtaggcatataatgaagaccacgttctcatttactttccacgaaagctctactgtactagccggactttgtcgctggtttctggggcatgcatacggatggatgcatttctttccatttgtttagtagtgcttaacagccgctgatcccaaatgacaaattctaccgagatcccatcagaaaagtgggatcggcgagaggggtggtcagaggattttaaagtgcccattaggcaccatgcaggaggactggaccgcacgtccggagtcatctaaggaggctcccagcagaggtgacagtggcgacagtgggagtgtccagtggtggttttattccaagtctacaccgtcgctgattgccacacggcagcctccataagggtggccacggacgaggccatggtgcagggcctgctcctccctctgccacttcctctccactgcctgcaccctcctcgggccagtgctgactgactccatttccctgaggctgcctgagcattgtttgagctctgcckacggacagtcccaccgagtcccgcttcctgagcagacaggaccgcctgctgttttcttctcctctcttattgccccttgtcatgaaaggagaggtctgacttccacttcagtttgtgtggatagacagcagtaagggaacagaggggaaatgttcattaccgctgttaacaccacagcatttcttactgctcggacattcgctccctctttgggaaggattaaaccaaaggataaattcgtgagcatgtaaggcttcaagctacacccaagaagagatgtcgtatattgcaaattttctgggggatctttcagaattcattttttgttatttcccagtcttattctcaactatctggaatcttgactaggatactctgtgagacttgagagctttttcctgaggctttttgttgttgtttagcagctctgcctttctgaaaaagaaacattgccccaagagtcaagctttcctattcactctacactagcagaaagttggatcaagaaccaaattcactggcattcttttattcccttggaacctgagctattcctcaattttgcttttctaagaaaagtagaagggaaaaaaagaatattaagcgcccctcacagctctgtatcttaaattcctgaagatatttcgccaaggctttcatcagtctcggctttccttattaacatccctgtccatacatcttctcctatttagggcatcaagagtcaatttcttccaagatgtacattagaaatttaacaataatctgccaaaagatctcatactcttagaatatttctccacctaaacagatgttctttgcaaaccttataagcagacctgttgaggaaatgtggcatccaacacctagtttgaactaaatattaaagttttcccaaagcaaactcagtgaaaaggggagaaaatgaaatgagactgtgaacctcaaaaaatcatcctatgtgatacagtctgttgaatagcattccccacaatggttttagagaaagtgrtatggaggtgggaggatcccaggcaataaatgtgttaaagaaggatcaaaataacatcgggggaaggaatgaaaactaaccagtgtgattttaaagctgcgttgttatctagatgggagagatctgaggaaagggacctgtcgttagggtagaagataatggcacactatggtctctccttttctggagtttgcgttaactactgtgggctcagaaacaggcttaatgacttttccagcatttggtctggcgctttatcagttcactttaacaagaacgtaagccaggaaagcctaaaaaatggctgcagccraacatgccctcctccatgctgctgtttgcagctctgtaaatgtatgcctggatggtacagctaaaggacaactcccgaaggtcaaatgaatacacacagtccgtgagtcagaaatctggagggctgtgtggacggagacattgctcctgctgttttgctgctgtgaaatgctcagtgaaacctaattgaatttgacaattataaattacatattgaaaccgtatagttcacctaaggaatagcaatgaaaacagtgaagacaccagaagccagagttcaggaaatgtcatattcacatagaaatactttaaatttttctcaaagctttattttctcttttttcaagaaaagctccagaccacccagttgcactggtggaagtccttttgggaagctgtacataaaatcatcactttaattcagcttttgcccccattgtcatactaaggctgtaagcatatgtataatgaaggaaacgaactgtcaaaaaagaagaaaagagcacagtagataagctcattcttctctcttgtccttaggagctgattataccctattggaggggatttgtggaagttcaaaaatctttaagagggaggtaaagattaaagggacgtgtatcatggcccacgctcccctctcactcctcacagttctgtatctgagcacagcagtttggaccccgttgtatgagcatttgccaccacctaattccttctcagcccaraggaagccttatttaaggaagggaatccacatccttgctctccttctagagctgtgtgygctttcccacacaggccctccccacrccaccctttaagtatgtcctgtgcctagaaccttgcaggatgaaccattgactatatcttttctataaatgacmcaatgggaagaagtaagaaattccttcaggaacagttaagtgtaaaacaagctgggatgctcgtagtctttccttaaaagttgattggaacataagcttactgcccagtccagatgtcagcctaggaacagctggcatagagagccaatgttttgttctgaggggacctcatcctttttcttcccaaggtctcttggtctaattaaatttcagggagacagagccttggcagaaggttaaaggaagcagctagactgcagtattggagctaggctcaaaactaaattgagaagtttaactgggtgcgtctctggtttcaatgaaatacttttacagtgtatggtagcaaggtctgtttctaagcctttgaaaaacatttttctttttccttaattgtagttccctggttgtttttatattgtgagctacttgtagaaaactacaggaaacataattacaatacaaagctccatttcccaagcctaccaagattatttgaagccaaactgggttttagggttttgctgactatgagttcacagccatgaaatgcatcctatgtcgtgctggttgatttacagccagtgtgatgtgattaaacaataaccatgtttctccacaccgtctagccgctataggattgagagaggggagggatgggctgcatgactccacattgcacagcttcctctggggaaaaagaatgagtatctttgtgtgacgcttatagcaaaatagaagcctgtagaaatatatacaagtttatttagggaggggaaagaaaaataaattacttcgtttttctgcttatattgctatttccttgtagcgctatgttaaattgctaattactactttttgtattctacttttcctgaagaatctgtatatggacttttagggccagcagaaataacttgttttagtaytattaacactctggggaggaaactggtacttcagtgtattgcgaaatgcaaagcgtttgaaaaagtagtgatggatgatgagaacgacagcgagagtcgctgcgtgtactgctgcagccccattgcaagcccacggtgcagacattcagcaggatccagacagcctctgctctagaaggctcagcagagaaggtgagctccaaacccagggcaaagcaggtcccacccctgccctctcgaccatcatgaatctagaacaaattccccacctgccaagtttcagggaagtctgaagaaaataagcaggaaaggctttcagtggcagcttgactggctgttactttcacacgatgaaactccttttaggctgttctttaatttgtatgtagctgaaatagaatgatcgagtatttctcacctttaaagatcggctattttcgtacggcctttgcgttcggtttatttcgaggaatcacatctgatgtgttatttgacgagtacatttgtgtatgcaaaagctaaatatttatctcacttctagcaattatgtatctcaaagtcttttttctttcttccctcctttctttcctccctttctcctttcctcctttcttccttctttcctattttgtaattcatcttgaaattctcatctcaaccttcatgtcagtcagtcttcacagagctgtaasaaagacattggtgagtaggggctgagagcaggattaagttcttctccrytggttttcttttagccagccttccttccagggaagcctcttaagtcgatggagatgaaatgcccttgtttcctcgagtggagcagttggggaaagcgggaggaggaaggcactgccagaggggacggtggcgggcagtgcggggtcctgcagagctgctggctgcagctccgctcgtggaagtacaagtgggtcgagatcggcattttcttaggaacagaatcgaaccgagtagaataggggtagaatagaatagaccgtctacagcgttcctggacgctaagcctaagaattgcttcgtgaaactccagtttcgttttatgaacgcgtgtgtgcgggaggcgacgtgaactgacttnactgtgggtacgaaaagcccaaagccaccgcccaggaagaaccgcgcttggctgcggcccgggaagaaacatccacggccgcgttagaaagagggtcgcacgctgccgccgaggtagaggggtccccgagtcctggggcctcgcgccccacagcccgagtcccttccccgcggggctggtggctttgggtaggacgcgcgcttggcgcggccagccctgcggcaggagctgagcggcgcagggacacgggcagctgggaggggcgcctggtgatttactcacttccctcctagccagagaagtgcagcaattccaaacagttctcataggagcgtccctgacaacttcatgttataaaaaaaaaaaaaaaaaaaaaaaaaagcwttaagagcccaagggacgccttggggaraaraggtgtggaggtagctgggggtggatcgcggtcacggtcctcacgggtccgcacagcacattcttaaccgcgacctagtgatttacggcgccgagagccgcaactgaacgcgcacagcagggaccgaaagcagggaaacccggagccttgtgcgcccagagggagcggaacggtgggagttcccggggctcgggacctgctgcccccacccccacgacccacgcctgcttcgtctccccctcttcttccctaggactttctgcagggcgactgcaccaaagcgaaacagaagctgaactggaagccccgggtcgctttcgatgtgagtatctcttagggcgcacgccgcccgctgcggggccccgggctgcagggcggcagctctcagggtcgggcgcctgaggcgcctgcgatgcccaaagcccggaaggcggggtgcgggagaagtgaggggagctggaacgagggacgcggaggcctctctggggccgacacccggggtggggtgtcaccaggrgagagtggcagaagctcctccctcacgcccacccctgtgttgcaggagctggtgagggagatggtgcacgccgacgtggagctcatgaggacaaaccccaatgcctgagcagcgcctcggagcccggcccgccctccggctacaatccccgcagagtctccggtgcagacgcgctgcggggatggggagcggcgtgccaatctgcgggtcccctgcggcccctgctgcygctgcgctgtcccggccgcaagagcggggccgccccgccgaggtttgtagcagccgggatgtgaccctccagggtttgggtcgctttgcgtttgtcgaagcctcctctgaatggctttgtgaaatcaagatgttttaatcacattcactttacttgaaattatgttgttacacaacaaattgtggggccttcaaattgtttttctcttttcatattaaaaatggtctttctgtgaactagcattcacagggtcagtgtggatgttttctcccaagttatgaacacggctataggggtccccaaacaaccccacaatccaggccttggaatgagatcgctgtggtcaggccttgccctgttttgagaaagcccttggtgggaggactcctgcaaggctaaggggggcgggggtgctccggcgagcctcctccttagtctttgcctgggacatttctttccccctcctggtgacaagtcactctggaaacctagttcctgcagaagggaggaattcacaccctggctggtctctgctgactataattagaacccaagggctctcacccatctgaaaaagaagtcttgagaaatagaggggggtcagaagaagaaacttgaaggtaagcaaatactgttggaacattccatggcaaagccaccaagttacctagaggtctctgagcctgtgcctttccttgtggtctagaatcttttacacagtgcttatttgcagcctcttcttatgactactaggtcactttttaaatctcagtttaatgtattcattcagccatttatgttaagtgcctaatacatgccagacattgtgctatgcacttgaacgacatcagcgttaatttgaagctataataaaaaggtttaaggctcagcctcagatctctggatctggtttgtttgcatgcatcatttaggtggcctgggtaagaccacaggtgtgtgctcctgagctgtgtatggtgtacagctacaggtaggctgacgcacacatgtgcaggacacccacaggcagcaagcaaggattcatgtacaggtgtatacctccacatgaaatacagtattttgccctagaacaaattaggtcaggacacttctccccctcactccccttccaagcaaaataaaataaaactttatagcaaatggaattccagcctttgcacatgtgtgtgtgagtgcgggtaaactatttctgaacgtcttcacaggcaggtttatgatctgggggaggaccgagtctccaacgactggcgcaggagagagggctctttgtgtggctgcccagttgctgtgaaagcttgctggccgggcggcctcgccctcgatggagcagaactggggggcctgagctagcccacccgctcctcagaagctgtcccaggactcgccttctctgcactcccaggcgggatgctgctaattggaaacacatggttgctgggaggccgggcctcagcctgggcgggatagtgggcacacacacagatacatactcacacattggctcgaacacaaacatccatgcacatccattcacaagtgcacatacactccacaaacatgccatctcacagtcacacattctcacaaacacttgcaaacccaactcccaaacccactgtcacacacatcctccaacaaatctcacaaagagtcacattcctcttagccttgaccctgatgggcaggcaccccctctcctctgaccaccggaacctcccttcccacacccaggagagactattccaggggccctcaggcttgccatggccctgtttaattcagtgttgcttgtttggacacctagaatcaggagagattctaggcaggggtttatgcagctccagttgagccatgatgttgaattctacttctccaaacggatggcagcatccatgtttgaaggaaactaaaaagtatttttggttgcaaccttctcactgctcctgcaccctgagtaatggaaggagcgggagttcatttggcttcctggtgtatgtggtttaaaaggagaaaaggagaatcgatttacttcggcattttttatctatttctgtgctatgagagaaattcatttggacatccttcaagacaattcttattacagggtttcttctatcttaaatctcaattaaatttcagtaaacttattttttcctgctctgccagactttggctgttggtttcaaatgttacaaaacatcttccaccttgatatttttaaggaaaaactgagaaagttaaaccttcagttaaactcacataccatggcaaagcaatcttgcccgagtttgtgcaggaggtgcgtggaacccgggtaggccaggccccgtcgcgggctctctctgctgccctttgtctttaaggaattgcgagcgagctaggcccagcataataaacctgtcacacctctgcagctgtttaggggctcaggctcagccgctgctgctgctgcgcgcaagatggctccttcggaaggccgggtccgcttggcckcgggcgctggcgaggagcgggtcggcgctggcaaaccccacaggcatggctttgggttctttttcgccccttttagtagccttcgcctacaccaaccaccgcgaacctcgtggaacctctggcagccagttggagggctcctggcagatgcaaggagtgttattatcgcactaatgtgttattagagcttggagcaggcagcactttaaacattcacttgaaaataaccttaaatgtattgtttacaagtaactttttaacacccctccccccaagtctcaaagcaccctacgcactttatttggatttgggagtgcctactgggtgaattctgttttaaggtgcagcccacacacgtccaggtgttttctacaacctgcatccttgattggtacgcgggtggcatggaggggtggtggcagcgcccatctaggttttacaaaatgagtgtccctgtgtgtgcgtggacgtgcctcacaaagagaccttcacgtccgtacatgccacccgcaccctccaaaaattgtggattgccatcacgggggtcgctaatacttttaacaagcagcaggggcaatgggggacaaaacggcgctaggaactggtccaccgtccacagtgtgtcccctgagaacacccggggtctgggcctgatctccaggagttggaggaggcgcccccgccccgtgccaagcgggcccaaggcccgaggctcccccgctcacaaccccggtgcccggaacacgtcttcgaggggccgtgctgtcggggttattactcgcgactggacctcgcgccgtgttgctctcctcgggccccgagcccgcccagcggtctgcacggcccaggcctgagctgcgggcttctcctgtggggcgcgctgggagtgagctctatccccaaagcccatttcaacgtcccaggtatgactacgacggcagaggccggccgcccaccctcgcccccttccccggccagagcgcctttgccgggagccgacgaccgcggcctgaccccgggccccaccgcctactcccggctcccgcccttcctccacggtcaggggtcacacacagcggacgccccgttctcagccgcccctctgatctctgaatttgggagccagcgtgtccgctggggcatgcactgccacgggcactgggacccctttgctgctgcggggaggagccccgacggcaggtgggaagacctagcctgcccgcgtccccgctccccagctcctgcgacccgggccgaggctctcagcccctgggcttccccgctccgggtttgagggaggggccgggccttcgggcctgcagacccgccaccgcgcgtgcgcatgcgtcggccgcgagcccccgggtgcaggcctgggcggctccggcccgcgcacttgtccaggcgctgcggctcagcgcgccccaacctccagctcgggcggagagcgggggcgggactgaagcaccgtgttcctcaaagtatcctctcgccgtcggcagccctggcctcgcaaatgctccagcgcgctcaggcgcacgcagagactggcgcggcagcctccgggccaacggcacgcgagcaaagctggttggcgacctgggacacgcagtagaagttggggctgcaccgactcccgccgcttcgggggaggcatgggcccgggcaggcctaggaggaagctgcacagcccgaggcccgggcgggagtggcgggccgcgggcaagggaaygtatatttggaaggggtcaggacctcggctggagtctggctttttatggcgaggaagccgactgggaagggccctctggcgaggctttcctgttgtgccacttttccccggcagcgccgggcgcggggaacgcggggctgcaccggggcgggggagggggctttacccggcggctccgaggactcgactctggggtcgggcccggcgggtaggcctgcccaggagccagctggcaaatgcagcggactgtcacgttattccactgtcaccacttactgtaaatcactgtcctaagcctccgggagaatccgtcgaacctgagaggggggagggggatgggggtgggcgcgcaggaagccccacaggcaccagggactggtgacccaggacatcagcccctcgagttctctctgggaatttctagcacccagactgtccctgactgtagggaccacggtggggcgtcttccttctaagctctccccgggacaccgggcgcgcccccctcgcccctgggttagcgcacactcctccacgcgatgaccagcacagccactgtgaggcccggccttggccgcgtttgtcctttgcgagtgataataataaaaatcattggaattgcaaggaagcccctggccccggctccccagccgctgctgtcctgggtgtcccggctgcggaaagaccccgcagccgggcccgacccacgagtggaacaccgggctgcggacccagccgggcctacaggactggcgcggggctccggggacaggcctcgcagggccctcctgcgcaccgtctgggacgccgattttgccaacttggaggacaatttttgttttcactctaccagcagatttttaaaaatccagtcgccgctgaaacgtgcttcccacccgtccggtttgtttgtagcctttgacgagccccggcacagcctccgggaccaatgacctgcttttataccgaaggaaatgtggaggccttaagagttaatggcgctaaatgtgttggttttcctgctttttccccggggtaggtaatgggaggggggatgtccctctctccacgtcttccctccccctctctttccatctccctctcccccatctcgggatctaagtcgtcctcaaagctctccaaaaaactccttcctttcccaaccttgagtacagggaaccacataaccaccccgctggagcccctccctggagcctcctccgcctctctaggccctgcctggggtcccaccacttgggtcaagccagaggcctcactgcctggtcctggctcccgctctgatgctcacttgctgggctcacaaattgctctcccatgcccacccaagtagcaccaagctgtgttgacttagggggccaaggagcagcccactgagtcccctcagtaggagcggcctgcagtggcagctgcaggagagggtgggcccgtcaagtcctaatgacacccatggggaccagtgggcttggaggggcccacggacacgccagagaaagaagatgctctttggagaaagggaggcatcctctggaccaggagggggcccgggagaagccccattgaggcttgccaggtcaccctcccaaccccaggcagggagattctgagctgggagcaattccaagccctccccgaggaccacacagacccagcctcttctctctggctgtgtctccctgtgtgagctccagccttctccaagacagggccaggtctatgtgcaaggaaattccagatcctactgcatctcccgtaatacgctcaatatgctgcaaatttgaaatcagtgagggaaaaaatcaagtaaacaaccaaaaaagtaatataaaccagagggtctctttggggccagggtaagatgggaaaggagcacaacaaaggtcttaaattgagccgtacgctccccgcgtcgtactttggtttccaataaggtagatatggtacattttgctcaattttccagtcgtaatcacgttgagaaggr

SEQ ID NO: 94110 - DNA, 33936 bp, Homo sapiens
aaaacgaccactggcctctaatactcaggacagttgagtttggatagcctagtttctctactgagaagacaattccataaagaataagggtagaagacccaacttacagttctttttcaggcttttcagccacctttggtctggatggggacgatcatttccaacagtctctagctggtctcccgcagctccctgcccagttcaccctctgccttgcaggagtgacttacgctgttttcctgtagggtaaagtccaaactcctagcctgataaacagggtcttccacagaccttccagccttccactcttccagccttgccacgcccctcacagtcccctaaatgcctctttccatttccagtcctctggacctttatacatgctggtctctgccttcaatgcccttctctccatgctcctgtgtgcccaatcaatgcctgctcttcctgaaagacccactcgagcaccacctcccactgaaggaatttttctgccccttctgtgggtgctgtaccatgtagacagctctgtcccagcatgcatccagcacaggggctgacctctcttcatctatgcatccccctgcttggcccagtaccaggcaaacagaaagtgctccataatgtttgtggactgaaggctgaatgaccaggtcactgctgccccacagagaggcctctgaagagaaaacaatgtggagaaatcatgtcgagaatccattcattcaagaacaactgtggtgcacctacatgtgggaaatagttttttaaacggtaaaaacccggttcccatttcaagaagcacagagttgcaaataaaagctatattcattaaataatcataccaggtggtatgaccaagtgtcaagtaagttttgacaataaaaaatcgctgagaaagtcaggcaggcctggctaggactcaatcctagatctgcctcttataagcaaggtacatcgggcaagttacttaacttgtgtctggctcagtttccccatctgtaaagcaatgatgaactctgatctcctgttctatcactcccactccttccctctgccacagccactctggctttcctattgttccccaaactctaacatcatgtcttctgtactgtttccactcacgacacttctgacaccaaatgtgtggggtttttcttcacaccaaccaatgctctctctccagacactaactgggtgccctacaattcaattcaattccgacaccaaccatctggagttagcacggaccccacaggtaagggctcaggcccacaagaccacaagaatgcccacacttcacatgccagtcgctgggtctgggccatctgtactcctgaccaactgtaaagtcaggaggttcctacaattacctcctcaggttgggtaatttgctagaacagctcgcagaacttaggaaagcactttatttaatatcaccagtttattatacaaaatacagctaagaaaccaccacatggaaaagatagggcaaaatatgggaatggaggtttccaggagcttccatatcctttccaggaaccaccttcccagcaccttgatgtgttcactaacaggaagctctccaaaacccatcatttagggtttttaagaaagctctatttgtgatccactgcattggttaaaaaaaaaaaggccaggcacagtggcctcacgcctgtaattccaacactttgggaggccgaggtgggcggatcacgagatcaagagatagagatgaccctgaccaacatggtgaaaccccgtctccactaaaaatacaaaaattagctgggtgtggtggcgtgcgcctgtaatcccagctactcaggaggctgaggccggagaatcacttgagcccgggaggcacaggttgcagtgaaccgagatcccgccactgcactccagcctagcaacagagtgagactacctctcaaaaaactaaataaataaaaatttaaagaaagctctattctgccggcatcactgattagatcattgtccactggtgattggcacaatctccagaggttggagcacggggctgaacattcgaatcccctaatcacatggttggttcttctggcaatcagtctccatcctgaagctatctaggggcctatcaagagccctctcattaacagaaactcaggtaggggtgaaagagacttgttatgaataacaaaagatgctcttatcaccatctctcaggaaattacaacggtttaagaagctctatgtcaggaacttgggacaagaccaagtatatatttcttcttatcacatgactgccgtaggactctcacactttatggtttctcaacctaggctacttctctgaaatctgaatcattcaggtctctactcaaatcctaccttccaagagaaatcattccctgaccacctacttaaaacagcatcttcctctccacccatgtcaatccctatcttattcccttattctgctttcttttcttttctttttttttgagacaggatcttgctttatcactcaggctgaagtgcagtggtgggatcacaactcactgtagcctcaaactcctgggctcaagccatcctcctgcctcagcctcccgagtagctggttcgacaggcacacaccattatgcccagctaatttttcttttttttttgtataaacgatgtcttgatatgctgccaggctggtcttgaactcctggacccaaactgctttattttcttcatagtacttactagtacctgaaataaagctattgaaggaaactaaaacatttcacctcaaaacagacttattggaaatattttgagatggccgttcagagggcctacagacaaaagtagtcctactgtgagggagatgagcatctgttgagaacctccattgacgcagccagtttttctcagagggcccttccttgtctggatctgggtgagattagctgaatttggcaccttcaaggtctgaaacatttcttctccctgagggctgctacctgtgaggtttcatctacataagaccacctttgctagccaggtctcctcttctctccctcctataacctgatttacaaccataacctgtttttggccaagcttagagcccccacactttctgtaacctcaggatagtataattgtggcaaccaccttgccttcctttgagatcttatgttgtaagactctcacggcacgttagtaaatgtgtatgccttctctcctattaatctgccatttgtcagttgatttttcagtgacgcttcacggggcacaaaagttttcccttaactcctacgctatacatttgtttatccctttttttttcctatctccaactaggatgtaaattcatgagggcaaggtctcggtcctacctaaatccccagtgtctaaaactttgagtactatgtgtttgagcacatagtacacacaaaaaaatttgttgaataaatgttgataacaagatataatacctacatcaaagggtttttgtgaggattaaacgcgagagtgcacatagagggatatgagtgcctaacacaatgcccagcacacagtaagctcaataacgctggtcaacgctattatcagaggattccagaagacaggtcaacatgggcaggagcagttacagaacgtttcaaggaggtggcaggtcttgagcttgatttggaaggataatgatttctttctctaggtggggacactgtaggaagttgaaatctcctctgtacaagccacccctcccaacatttcttcatactcctatcaaatgcatagtcatcataccctacaaaccacctactaaccagcctctctctgtctgtccactaatccattagttttcatttctgtatcaccggagcctagatgaattcactactaaagggcacccagcaacgtcagtgaattagtttcagaaatctgtggaaaagaaacagcctactgttctgtccagcaatccaggcctaagtatctatcctaaagaaatagtgtcagcattaaaaatcatgtacaaagatgttcacttgcaagagagagagaaaaaaagtagcaaacagaacgtccaccactaggaaaccatgaataaactatgatgcgtccaaactgtgcagaggttgcactgaattagacagttagtgaaacaatctctaagatatatcgttaaactgaaaaaagagaatgcacatacagtgatctcatttaggtaaaacaaaaattttaacacctcatacaaatgaaacctaaagatttctctgaatgtgtgcatattacatatagatacatgtcttgttaaccactgtatcaactcaacactgtgtgcctgaaacatagaaagttctcaataaatatttgccgaatgaagacatatgtacgtgaatagaaaaagactgaaaaatagatctgctttttgtgcaaaatatttctgtgctgtttccatttttaaaagactgtcttaatgtattacttgtacaattaaaatgaatttaaaacagttataaaagttccaggacctcgatataccatatctggtccaagcaccaggctctgagtaacttctccaggtaactaacttcatcgttttgagccattagggctctagcacagcaactcgacgctcactttatctctccagcatcagaccccttaaaagcataaagatgaattttgaggtgcggggttttccattgctcccaaacatcagttgacggcacactttttctaaagggtccttttctcccacgccaagacatccctggagctggggtctggctcggccttccctgcgcaccccctgggggcgagtaagcgccgaacgcggggaggaaaatcctcctggtgggagtgagcacgctgcgcggacgcgggggaacaaaactcactttccgactggccccttctctggctgtgatctgtctctcctgctcaggcatcgtcccgcacggacaccgaattcttctctgatctggctcagagcaaaaggtcacctggtcggtggaggagagcggggtgttaaagtcccgggagaggaggcgcagagtgtgagggcatcggcgcggctcggctctaaagcaaacaggggtccgggaaccgccccttcatttgggaccggggaagccgcagccctcttcacacggatgattcaaagttgcgcgccgccgtcctcccgacctgggggcacggggatgagagcgtgaggggagagtgggcctcggaccctcgcccactccccaggtggctgggagtgcccaccctggaactgccggccccgccggtgccacagtgttctctgccgtgccagtgccacaatgtcctctgccgtgccggcgccgcagggcggaggcctgtcctcctccgcggtctcggccacctcgcgctggtgcgctccgacactgtactgggatctcacgcgtgtgcgggagcgggagggcaggtgagctgcgcagagccgggccgcagactcagctcccagggctcacccaccgcctgcggggaaggtgcccggcggcgccgcgtcgggtccgctctgcgctgccccctcctcggactctgcgcctggctgccggacgccgtgggtcccaaaggaagcaaccgcggcaagagtgaactccgcacctggaaaatcgatccgctgtgcgcaaaggccagccaatggcctccaacgggcggcgggctttgggccgggaacgggggcgcaggcgcccaggcgggggcttctagtgggggaggtggccgagggagggagcgacggctgtcaatcacaggccacgccctcctcagcccaaccccccactgctgtcccgcccacgggggcgggagccgtgtgcgccacgccgaacactagtctacgcctcggcatattctattggctggaaggccgtgggaagcggctaccagtaaccaatagtaacgcacaattggcccgtgggggcggggcgagcacggcttgctttctcaggagccaatagggaaaaggaaagtgaagcgtttcctgagttcgggggtcggcggaagatggcggccggcgaaaggagctggtgcctgtgcaagttgttgaggtgagcagccggtcgtgtgggctcacagacgttttctcttctgtaggggtacttgcccgtccagtgtagctaaattttgcgggcaaatggccttccttgtcatgaatctaaggtaatttctcaggccaatgagcagtctttctttttcttgggggtcttctatatagactggaatagactaggtcttaaagactcaatttaccgcgttttcttctgcttcactgttggccgaggggtcgagttcccttccctgcttcagctttttttttccctttcacactccagttagtctgtcataaattattcatattcattccttatttttctttacgattgagccacgagacattttccaatctatcatgtctcttttcggtaaagaagaaaccggatcttccttctcatcttagtttctactcttaaactcaccaaaactgccattgttaacacgtcacttaaatataaagcttatgttgaatcctctgctttttgataatctgttactttaatttttatgatgtaagaagttacataaaatattattttatttgtattacgtgtatatgctgtttcttctagaaaaattagaaaatagataagtaaaaggaaaaaaccccaggaatgctaccatccggagatagccactgttaacattttggtgaaaaaactcccaggcttttttccacctttgttgttgtagtactactgtattttaaatgccttgccctccactaataaaacagaaggcctagtatattctacctacctagtttttttaccacctacatatttttgttcaggctgaaaatttataattaacaccatagcttcctgaatagcagtatatacctaattctttcaaaagttcaggcatttcttcttcgtttttgtccactctacttcaaattctgtaatcattactttaaacattttgaatgagaaagtctgttatcagagccttttggttcttccctgtcatacgtaatattcctcagtgctttacattataatgtttaaataaactcactaaccagacttaaaggacaggtttaactttagttattatgcagcttttaagttaaatgtttaatagttcagtttgaaaagcttgtcacatgaattttcccacctaaattatttgaaggaattgccagaaaaacctttacattatatgggtcagctgcattttaaataagcttttgaaagattgtcctgagaaagcaaactgtcctctgtagtgttgcttttatgaattcatatattccaaatgttaaataaatgataaatcttaccacttttgtcagactctgttcatcctttaaggcagtggttctcaaattgtgctccatggaccatgcaggtcccaaggcccttcaatggatcctcaacaaatctgtttttataataacattaatgtaatatttgcctattttactatgttgataagtgcaaaagtgatagcggataaaactaagtgatagtggattttaattaacastgtgaaaaggtcattgatagggtttcagagtctgtattgcaactgacattaagaaactgcataacttgtcaaatgtggtctagcatcagagaagaatatctgtaactagctgaaaagttaaatatattttaaacataagatcaatatatattaaaatatactcccttttcctactacatgtctaagttagcctgaattttcttcatatacttcaacaaaaacaacatatcactagattgaatgcagaaacagaaaggaggagccactatctggtttcacgttaagccagacattaaaaagatttgcaaaaagtgtaaatcattggcacccttcttgctaaatttctttttttggtttggaaaagatagttttttaataaaaatatgttaatgtgttatgaaagaatttttattttcaaatgaattcataaaaagtttaaagttctttagttttcatttctaatatgctaaatattggtagatataagcagtgtaaaccactggttctcaaccaggggtgatttttgcccttcgcaagacatttggcatttggcaatatctggagggctttttttttttaattttttttttagagataagagtcttgctctgttgcccaggctggagtgcagtggcatgatcatagcttactacagccttgaactcctgggctcaagcaatcctcccacctcagcctcccaaaatgttgggattacaggcatgagccaccatgcccaactgataattttgattgggagggtgctactggcatctaagtgggtcaagaccaaagatgctactaaatataatacataggacaacctccgcaacaaataattatttggtccaaaatgtcagtagtgtcaaggatgagaaactctgatgtaaacaaaagctctattgtatcctcagtaaaatttttaagagtataaaggtgtataaagaatataaagaccaaattattttagaccaattatttcagctttgaaataaagtgctcatgtgggatttcaaatagagtcaaatacctcttcaagtacacagtaggaaatcccacatgagatttgttcacaataggaacaaatgaggatttgttcacaataggaaatcccacatgagaactttatgtcaaaactaaatatcaataaaatatttacttctggccaggtgcagcagctcatgcctgtaatctcaatgctttggaaggccaaggcaggaggattacttgaggccaagagtttgagaccagcctgggcaacatagcaaaaccctatttctacaaaaaacatttttttaattagctgggtgtggtggcatgcacctgtagttccagcttctcaggagtctgaggcaggaggatcgcttgagccaaggagtttggggctgcagtgattgctatgattgcaccactgcacttcagcctgggtgacagagtgagaccctgtatctaaaaaaagcaaaatttacttttctgatgaatttgtatgttttcatgtgggcagtgaaaactatgtgatatggtttggccgtgaccccacccaaacctcaagttgaattttatctcccagaatgcccacatgttgtgggagggatccagggggaggtaattgaatcatgggggccaatctttcccatgctattctcgtgatagtgagtaagttcacgagatctgatggggtttatcaggggtttctgcttttgcttctttctgatttttctcttgctgccaccatgtaagaagtgccttatgcctcccgccatgattctgaggcctcatagccatgtggaactgtaaatccaattaaacctatttttgttcccagtttcgagtatgtctttatcagcagcgtgaaaatgaacttggtaccataaattagtaccagtagagtggggtgctgctgaagagatacccaaaaatgtggaagcgactttggaactgggcaacaggcagaggctggaacagtttggagggctcagaagaagccaggaaaatgtgggaaagtttggaacatcctagagacttgttgaatggctttgaacaaaatgcggatagtgatatggacaacgaaatccaggctgaggtggtctcagatggagatgaagaacttgttgggaactggagaaaggtgactcctcttatgttttagcaaaggtactagaggcattttgcccctgccctagagatttgtggaactttgaacttgaaagagatgatttagggtatctggtgtaagaaatttctaagcagcaaagaattcaagaagtgacttgggtgctcttaaaagcattccattttaaaagcggaacagagcataaaagttcagaaaatttgcagcctgacaatgcagtagaaaagaaagacccatttttttaggagaaattcaagctggctgcagaaattttcaaaagtagcaaggagcctaatgttaatcctgaagaccatgggggaaaatgtctccaggcaatgtcggagaccttcatggcagcctctctcatggcaggcctggaggcccaggaggaaaaagtggttttgtgggccaggtgcaggggccctgtgctgtgtgcagcctagggacttggtaccctgtgtcccagctgctccagccgtggctgaaaggggccaatgcagagctagtgctgtggcttcagagggtgaaagccccaagccatggtagcttcacatggtgttgagcctgcgggtgcacagaagtcaagaatggaaatttgggaacctctacctagattgcagaagatgtatagaaacgcctggatgcccaggcaaaagtttgccaccggggcagggccctcatggagaacctctgccagggcagtgcagaagggaaatgtggggttggagcccccacacagagtccctactggggcactgcctagtggagctgcgagaagagggccaccgtcctccataccccagagtggtagatccactgacagcttgcaccgtgtgcctggaaaaacctcagacactcaacgccggcccatgaaagcagccaggagggaggctgtaccctgcaaatctacaggggcagagctgctcaagaccatgggaacccacctcttgcttaagcatgacctggatgtgagacctggagtcaaaggaggtcattttggagctttaaaaatttgactgccccactggattttggacttgcatgggccctgtaacccccttgttttggccaatttctcccatttggaacagctgtacttacccaatacctgtactcccattgtatctgggaagtaactagcttacttttgattttacaggctcataggcagaagggacttgccttgtctcggatgagactttggactgtggacatatgggttaatgctgaaatgagttaagactttgggggactgttgggaaggcataattggttttgaaatgtgatgacgtgagatttggaggggccagggcagaatgatatggtttggccatgtccccacccaaatctcagtttgaattgtgtctcccagaattcccatgtgttgtggaagggacccaggggaaggtaattgaatcatgggggccggtctttcccatgctattctcataataatgaataagtctcatgagatctgatgggtttatcaggggtttccgcttttgctgcttcctcgtttttctcttgcccactgccctgtaagaagtgccttacacctcctgccgtgattctgaggtctccccagccatatggaactgtaagtccaattaaatctctttttgttccccgttttgggtacgtctttatcagcagtgtgaaaacgaagtaatacactgtgtaactacacaaaacatcccctatttgcctaggctactgagcagcccagagcccagtctgctattcactactatgtatgtaaatacagcctgcatacctgtgtccatcatcaaccaccatcccaacatacacaccatctttattctattttcactggtcctgactttttattatttaacttttggcattttattgtttttaaatcttataagccctcctcaaatcctttataaaggataggcagagtatgaaaaatattaagttagattccaactgtattggcaaccctaaaagaaaagcaccttggcattttattttaacacattttaagcaacatctgaagacgtaataaacttttgcatccgtcatatattcattggatgccttctctgtgccaggcatcgtacttggcattggggacatggtatgagcaagcctgggcccttgcttttgcagagcttcaatcgacctgacagcaatggagaaccttttaacagtcactttgtgaatgagtttactaatgagtattaagtagaacattagtgggtttttggcagctcattcagaggtacataagggaaggtagtagtattagatcatgtaaatagagcaaatacagaactggaaatagaagtggagaaatctaagttccattcctttatcccagaaattgttctacttgaggtgaagtgatggaatgaaaaagatttactatcttaccagactttagtggaatattgatcgttcaaaagacatattttttttggcatctgaccctcaaaatgacagtatataacacattcttaatcatgtcttgtttagattaatagttaaatttgttttaatcccataacatatatactaagtcaggagaaagggggttcaatgttgatttttactgctgattaaagtatgttcaattggtaacatgctacaggaattggaactaaaggggacttatcctttcaatgttggatatttagcagcattagaattttcatacttgagtattttgttagcagactcgttaaagacaattctctctttgttactaatatataaagtagatatgtaaaagcagactttaatttgtaatttttttaatgtatatatcacattgattctcaactttgtcctcttatttcaggtttttttattcattattcttccctgggctcattgtatgtggaactttatgtgtgtgtttggtcattgtcctttggggaatcagactgctgctacagagaaagaaaaaattagtgtcaactagcaaaaatgggaaaaatcaaatggtgattgcattttttcatccatactgcaatgctggtggaggaggagaaagagttttatggtgtgctttaagagccctgcagaaaaagtaggtatccatctttcttagctaatttgctatattgttccatttcttaaaaattattatccagaaattcatctttttttttttttttttttttttgagacagagtcttactctgtcacccaggctggagtgcagtggcacgatgtcggctcactgcaagctccgcctcccaggttcatgccattctcctgcctcggcctcccgagtagctgggactacaggtgcccgccaccacgtccggctaattttttgtatttttagtagagacagggtttcaccatgttagccaggatggtctcgatctgctgaccttgtgatccgcccacctcggccttccaaagtgttggtattacaggtgtgagccaccgtgcccggcctcatctttctaaagtacctaaagtaaaaaatgaattcctttttaaactgttcttcaataagaaaatatttctttcatgtgcccacataccttatatgatcttatttgaytttagttactatgataaagaaatagacaaacccaggcatggtggctcacaccagtaatcccagtactttgtgaagccgtggcaggtgaatcacttgagcccaagagtttgagaccagcctgggcaccatggcgaaaccctgtctctacaaaaaattatctgggcatggtgatgcgcaccagcttctccagaggctgaggtggaaagattgactgagcctgggaagtcaaagctacagtgagccatgattgtgcactgactgcactccagcctgggtgacagagtgagaacccgtctcaagggaaaacaaaaaagaaagaaagaaatggacagtggatggggaaaacatctgcccttttatggcataaattaatgggaataactggtccccttgggagagcatatacagaagagattaagtaattgacagaaatataccaagtatgtcagagcactttaagcctgaatactttcaggcagttgtggcacacaggaataatctttatgaaagtatctatttgactcaaatttttatatcattaccagctggatagtctcaacttaccatgttagaaggaatatggtgttatacatcttttaatatttgaggcttcgtcatcaccaccccccatacccccaaaatatttatgattctcttttagaaaggaaaaagcatagtaggttccattattttatcatatgaggaaaactgttactcttcatggttaccctacttcctggtacacacccttcattcagtgccaaggccttcacacagaattacctcagctatacttttctgtaatcctggcccatcctagcttccaggccctacccctgtatttgctctgccatcttctgtaactgcctaaatacaaagaattctcataattcccaactccgtgatgcttttcctactctcgttgataatacttttttcttctctaaccagattatctacctcttgatggcggtggtaaagtttcatgatatctgtacacatagtccccagcagcctctattactcctaacccatctacaaggagaaaaaaaccaaatcattaatatgacttggaagatactttttcatcttgctctggccacattgcgtttctcatccctccccattccttcacaggtactttactctgacatgcagaacaaggagcagctccctsaacacatcatgctctctctcgagtccttccctttctatatagtgttcttttcttctgaaataacctttttctccccagttaatttctacaagcctttcctaactcaacacatactacagtgcacttttcattcgacctagcagtatttattggggacctgctatgtgtcaggcactgttctgggggttgagattaagagaacaagatcgatcaagtccttctctcctggacgtttgattttagttgagagagacaagataataagcaaagaagaaaaatatcaaatagtgagacgtgctatataaaaagttaaaatagggtaatataggagtgacttgatactttagatagagtgatcagggaaatatctgataacaatcaaaatctgaatgacaaaaacagctgcattcactgcgtgatgattgtatgttaggtattgtttgaagtgctttacatgtgttagctcacttgatcctcagaacagccttttgcagttgttaccattatcctcatttgacaaagaagaraactggggcactagagcccatgttctgaaccacatgctaaactgcctgccttatgaaaagacagtgaaaatgagaaaagagarttcagagtagagagaacaaccactgcaagtcccctaaggctggttggagcttggcgtgttaaaaaaaaagaatgccagtttggctgcaccctggagggcaaaggagagcatgggaagggaggtgacagagggaggcaggttccagatcacacaggacttgagtgagcagggaaattagtttagattttattctaagtgctatagtaaaccagttttggggttactgttctgtgacatggtttaggggctgccatgtttggtctccatcatactgttgcaattagatggcagctggggctggaggcatctgaagcctttttcactcacattctggttcttgggctgggataactggacctgctgggggctgtcgggcatctctctcactgaggagcttcttcatgtgacttggttgtgcttgcatacaacatagcaatctcgggctggttggactccgtacatgacagctgtcttctcctagcatgagcattccaggagacaggaagtaggagctgccagtcccttagagtctatgttgggaaactggcacaatgtcacttttgccatattctgttggtcaaaatagtcacagagccaggtgttattccaggggaggggacttagatgccacctctcagtgagaaaagtatcaaagaatttgtggcccgtccgggcacagtggctcacacctgtaatcccagcacttcaggaggccaagtctggcagatcacttgaggccaggagtttgagaccagcctggttaacatggcaaaaccccttctctacttaaaaaatacaaaaattagctgggcatggtggcacacatctgtaatcccagcttctcaggaggctgaggcacgaaaatcacttgaacccgagaggtggaggctacaataagccaagatcacgccactgtactcccgcctgggcgacagacagagcgagaccctgtcttaaaaaaagaaagaaaaaacaaatggaatttgtgggcatttttaggctaccagagatcacaatcttttttcacattttaaaaggctcattcttgctgctgggtaaagagtgactgggaaggggccagagaggagcagttagattgtcatcctttaggcttccccagcatcctgtgggtgtctttatcaatgcgtagcacacagttttgcagttatttgttttgcatgtctgttttctccactggactgaacttctgaagataaagactctctctcatctccatacccccaaaacctggcatctcattactagatgcttaataaatttgttttttttttttttttcagatggagtttcattgttgttgcccaggctggagtgcagtggtgcgatcttggctcaccacaacctccgcctactgggttcaagcaattctcctgcctcagcctcccaagtagctgggattacaggcatgtgccaccacaccacacatattggtcaggctggtcttgaactcctgacctcaggtgatccacccgcctcggcctcccaaagtgctgggattacaggcgtgagccactgcacccagccaataaatgttttatgactcaaagaataattataaacagagggagaccaaagtattacaagtcattaaagaatatacttttagatattttcatactaattatatctaattgtgatataggcacaagatctagcttttaaagacttgcatttttcagataaaaaccctgagtattgctttagtattgtgatcctatctgaagacaggtttgttgaatcttaattcttgtttatagtattttattaccattttttttactaagaacactgtcaaaactttttagtatttctttagaccatctcattcataaatcaacacttactgttgatgcctgttctgtgtgaaaccctcagtggaggaaatagcaaagaactagaagtcatggtctcatttgaaggactgtacttctaattcaataaaaaatgtagaaaacatcatttttagtatgaccaacatggagaaaccctgactctactaaaaatacaaaattagccgggcgtggtggtgcatgtctgtaattccagctactcgggaggctgaggcgggagaagcacttgaacccgggaggcagagattgtcagccaagatggcgccattgcactccagcctgggcaacaagagtgaaactgtctccaaaaaaaaaaaaaaaatcaaatcttctttataactgtaagaaaatagttatctacaactttttgcttgattttaacctaatatattcttttttttktttttgtttttgtttttttgagacggagtttcacacttgttgcccaggcaggagtgcagtgatgcagtctcggctctcagtctctcagggtaggtagcaggcttttttttttttttttttttgagatggagtctcactctgtcacccaggctggagttcggtggcatgatcacggctcactgcaacctccgcctcctgggttcaagcgattctcctgcctcagcctcctgagtagctgggattacaggtgcgtgccaccgtgtctggctaatttttgtaacttaatatattcttaaccattacattctattttaggtatcctgaagcagtttatgttgtttataccggcgatgttaatgtcarcggtcaacagatactagaaggtgctttcagaagatttaacatcagattaattcacccagtgcagtttgtttttttaaggaaacgctatcttgtggaagattcactgtatcctcacttcacactgctgggccaaagtctaggatccatttttcttggctgggaagctctaatgcagtgtgttcctgatgtttacattgattcaatgggatacgcttttacgcttcctctgtttaagtatatagggggttgccaagttggaagctatgttcattatcctactatcagcaccgacatgctctctgtagtgaagaatcaaaatattggatttaataatgcagccttcattaccaggaatccttttctcagcaaagtaaagctcatctactactatttatttgcttttatttatggacttgttggttcttgcagtgatgtagtcatggtcaattcttcttggacactaaaccatattctctcactatggaaagttgggaattgcactaacattgtttatccaccttgtgatgtgcagacatttctggacattcccttacatgagaaaaagatgaccccaggacatttgctggtttctgttggccagtttaggccrgaaaagaatcatccattgcagatcagagcctttgctaaattgctgaataagaagatggttgagtcacctccttcgcttaaacttgtcctcattggaggktgtcgtaacaaagatgatgaacttagggtaaaccaactgagaaggctgtctgaggatttaggagttcaagaatatgtggaatttaaaataaacattccatttgatgaattaaagaattatttgtctgaagcaacaattggtctgcataccatgtggaacgrgcattttgggattggtgagtttggcctttaaacaacttgtttggtgccatgagatacacattttaagttcttttgrtaaaatgataatactctggaaatctgcatcatgccctaattctcttgccctcatccaccaaatgtgctttcctcacttgagaccttgtaagatagtagttaataatagcagctagtatttattgaccaattcctgtgtgtgggccactgtgttgagatttttacatgtattatctaatttaagcctttctaaacccgtttgataggtgttattgttattcccattttataaataaagaaactcaggcacaggaaggtttagaaattgctcgagttcagttacacagtaagtggtagagcccggattctaacccagatagcccctgctcttaacagcaacattttctctctccatctaaccccactacatacttactggtacagattcctgggccctaccctaatcctacagaatggccaaatgagaatctctggacaaggcccaggtagatgtattttgataatgctgcttaagtgattctgttatgcatcaaaagttgagaaccactgtttgcataggggcttctcacagtaactcttttagtcttttattgattctaccctcaccattggaatggctctcctctttgtgccagattgcatcataagtcttcaacttaaatctccttgcactttagcctttcttgtttattctggcacaaactgctatctctattctgacctgttaagcacacattttgctataaaatcaagtactgctttgtgtttaatttgggtccacatatatttctcaagcgctttgtgcctcacactgttagttgttaggggaaatgaggataacataaaagtgacatttcctaaactaagacttcaatttctcttatactctttttactcctagttagtagtgtagtgctaggcccagacattaagcaagaacttgttgacccaacctgttgcatgggatctgacctcctgtgcttccttccatagaaacttactaagcattcactctgctgagcgcttgggtggatgctagggatgtggtggagacaggagctgcttggcctgtcagaggcttcccaccctctggtggtaccaacaggctacacaggcaagtgccgtgccgtgctgtgccgtgtgccaggtgctatgctaaggaagtgcagggtgatgtgaaagcgccaaagagaaacctaacacagacttgtgcgggcagggaacagttgcccaaggaaatgatgtgacacttgagcaggacccgaacaatagaggttagccaggagagaggggagagtctccagcagagggaacagcactgtgacaggagtgacaacagatgcatcaataggaacattcagcaggaagacaacagagaggtgatataggccaggttaagccagtggaaaaaaatagcaggattttaagtattgcacgtaaaagctttctgatttctccagtccattctggccacatggggagtggatcagtgaagagcagggagagcaagactggaagggcagtaagatgagccggcctactgtagcagcccagatggaggtgctcatgagctgaacttcgtaggtgaacatgcttgagaaacattctgcagtagtattgaccaggacttggtgattaactggatgtgttaaatgagggaggaagagaagactacctagggttttgggagcagggcagctgtgagaatggtgttggctttctcccagaggggaaatccaagagcaaatgccattaatgagccaagttttgaacctgcagaatttgagttcatctgtgggacatgtgagggcatgcgtccaggaggtagttttgtatataggagtctgaagttgagaggagtctggtctggaaataaaaaatgaggattgtccttgtgcaggtagttatcaaagctcccgtggatgtggttaagatcgcctggggaatatgtacagagygaaaagaggctctcagtacaaaatgcagagaacaggaacagctgagaaatggggagaagaaatggagaggcggggaaagccatccaagtgcagtgtcttagaaaccaaggaagagagtgtttggagaagaatggagagggcacagattccgatgctgcccagatgctggggaaggtaaggcagtcactggtgacctgggcaagagcagtcttgagggagaagtagaagcaaaagtcagactatgagcaaaaatcaaaagtcaagcactcagaagtgaacaagtagagttggtaagtgcaaaccacactttcagtaagtttatctgtgaagtacggggagggggagaagagacagtggctaggggtgggtgttgcaggacctgagaaagggcatgtggtgccctagcttcctagctgataggaaggagccagtagagagggaaagggtaaaagatgcaggtctctgagaaagtacaggatgctctccagcttcaagcagaatatgatatgagctactgaattctgttctgcagggatttcaccagttctaaaaacatttggaatgatttaatttctctcctatacatccaggatgatatcagctctgtaccatccttcagataattgggaaagcagtcacttgaatcattccctgaagggcttaattctcytaggaatatggctaagaagggctggctagagtaatttatatttcatgtgtatcatttggcagaaactaaccacaactttcatttagttcagcactgttgttgggcatgcagtagtctcaaatatgccagaaatccaggcagtaacataagcacggcgatagtatgcttcacttaggtgattcacttttttattttttctgctaatgtaatttgaactattaaaattgttttttatatgtttttactccttttgtttttctaatacctgttaatattctaccatcttgctaacattctctagtcttcttttttaattatctgcaatatatcttttttaataggctagtcttccatctacttgtctattttaactaagaataaagcagcaggctgggtgtggtagctcacgctggtaaatcccagcactttgggaggccaagatgggaggaccacttgatgctaggagttagaggccagcctgggcaacatagtgagaccctatctcttaaaaaaaaaaaagtgaagcagtattattatgaagctttgaaaactaaaaaacttaaaattattttatcttgtactgtagaagttgaataagcaaatgtctagacatacatttaattaagtttctcataagtcccttaaattttttgaagatttctattcatcctcattcttatgaacacactcaaaaacttaaaagattacatgatttgtgttttttttctcaggagttgtggagtgtatggcagctggcacaattatccttgcacacaattcggggggcccaaagcttgacattgtggttcctcacgaaggagatataactggctttctggctgagagtgaagaagactatgctgaaactatcgctcacattctttccatgtctgcagaaaagagactccaaatcagaaaaagtgctcgtgcatctgtaagcagattctctgatcaggaatttgaagtgacattcctatcatctgtggaaaagttatttaagtaatgccatatctgtaaaattaaagatattttatataaactggttaaacaccttcatatgtaaatatttttctaaattcaatctcatttgtcaaatcattttactttagaaaacagacaaaatttccttttagaataaaaggaagtgttgaaaagaaaatggatgactagccttcggcttccattcttggtatacmtgaragaggctggctgctgagatgaatgtgaaccaggttgcagagaatctggctttgagccaccaggaagaactagtggatttgccaaaaaactaccccttgagtgaaaatgaagatgagggggacagtgatggagagagaaagcatcaaaagcttctggaagcaatcatttcccttgatggaaagaataggcggaaattggctgagaggtctgaggctagtctgaaagtgtcagagttcagtgtcagttctgaaggatcaggagaaaagctggkccttgcagatctgcttgagcccgttaaaacttcatcttctttggccrctgtaaaaaagcaactgaatagagtcaaatcaaagaaggtggtggagttacctcttaacaaagaaaaaattgaacagatccacagagaagtagcattcagtaaaacctcacaggtcctctccaaatgggaccctatcatcctgaagaaccagcaggcagagcagctggtttttcccctggggaaggagcagccagccattgctcccattgaacatgcgctcagtggctggaaggcaagaactcccctggagcaggaaatttttaacctcctccataagaacaagcagccagtgacagatcctttactgactcccatggaaaaggcctctctccragccatgagcctrgaagaggcaaagatgcaccgagcagagcttcagagggctcgggctctgcagtcctactatgaggccaaggctcgaaragagaagaaaatcaaaagtaaaaagtatcacaaagtcgtgaagaaaggaaaggccaagaaagccytaaaagagtttgagcagctacagaaggttaatccarctgtggcaytrgaagaamtggaaaaaattgaaaatgccagaatgatggaaagaatgagccttaagcaccaaaacagtgggaaatgggccaagtcaaaggcaattatggccaaatatgacctggaggctcrccaagctatgcaggaacagttggccaagaacaaagaactgacacagaaactccaggtagcctctgagagtgaggaagaggagggaggcacagaagtggaagaactccttgtccctcatgtagcgaatgaagtgcagatgaatgtggacggaccgaatccctggatgttcaggagctgcaccagtgacaccaaagaggctgcaacacaggaggaccctgagcaagtgccagagcttgcagctcatgaggtttctgcaagtgaggcagaagaaagaccagtggcagaggaagaaattttgttgagagaatttgaggaaaggcaatcccttagaaaaagatctgagctcaaccaggatgctgagccagcaagcagtcaagaaacaaaagattctagcagccaggaggtgctgtccgaattgagggcactatctcagaaattgaaggaaaaacatcagtccaggaagcaaaaagcaagttcagaggggactgttccccaggtccagagagaggaacctgccccagaagaagcggaacccctattgctacagaggtcagagagagtacaaactctggaagagctagaagagctgggaaaagaagattgttttcaaaataaggagcttcccagacctgtgttagaaggacagcagtcagagaggaccccaaataatcggcctgatgcccctaaggagaagaaagagaaggagcaactgatcaacctacagaacttcctgaccacacagtctccttccgtgaggtctttggcagttcccacaataatagaggagctggaagatgaagaggagagagaccaaaggcagatgataaaggaagcttttgctggggatgatgtcatcagagatttcttgaaagagaagagggaagctgtggaggcgagtaagccaaaggacgtggacctgacactacctggctggggcgagtggggtggtgtgggcctaaagcccagtgccaagaaaagacgccagtttctcattaaagcccctgagggtcctccaagaaaagataagaatttgccaaatgtgattatcagtgagaagcgcaacatccacgcagcagctcatcaggtacaagtgcttccatatccatttacccaccatcggcaatttgaaaggaccatccagacccctataggatccacatggaacacccagagggctttccaaaagctgactactcccaaggtcgtcaccaagccaggccatatcattaagcccataaaagcagaggatgtgggctaccagtcttcctcaaggtcagacctgcctgtcatacagaggaatccaaaacgaatcaccacacgtcacaataaagaagaaaaactgtaggttgtgtagctggagaagtgacagtcaggggccctgattccacttcctttggtccagttttactctgctacagggtggattccaaaactggctcagyacattgcatgtagttragccacattttttaaaaaaagaaaatggatgaccattaattgactagcattttagaattgatcagacattagaacacagaaaaattctagtacatttaaattctaaacaatacagtggatgacccttttgaatatacctaatgatttccttaaaaaagaaattttaaacagacttgtttaatcgtgttctcaaagcatacagtcaagaggtgggactgactgatgctttataggtgtgtgtagggtggtagaggccaaggtgctgccagcaatcctttccatactaggtactggtgaaaattgtttttgtttatgctgtcrgcacatttgtgtgggtctctcattgtcccttaacagtgccgcatctcagcctggaagtcagctttaagtcattcaagagaacctcaggctgtttttctgacagtgatgatatgatatacagatacatccacagggtatctattaccagcataatgcattgtaagatggcaaggtggcattttgaaagagcgctgggcaagcagttagcacatctgggcctaccttcagcttcttcatttacaaacttctgaccttttgacactaaagctgctcctttatctttctgagtctcagattcttcatctgtaatctggagttgttaattccagtccttactaccttttagagttggaatgagatggaaagtagatgaaactactttgaaaattacgacagttaagggctgggtgcggtgtctcacacctgtaatcccagcactttgggaggccgagatgggtggatcatgaggtcagcagttgagaccagcctgaacaacatggtgaaaccctgtctgtactaaaaatacaaaaaaattagctgggcctggtggcaggcacctgtaatcccagctacttgggagactgaggcaggagaattgcttgaaactggaaggcagaggttgcagtgagccaagattgtgccactgcactctagcctgggcaataagcaaaactccatctcaaaaaagaaaaaaaggaaaaagaaaattatgagamttacttaaaggtaacatcacatactaaatgtcttctataatcctatatttattaatgcattacaactctgtagattgttagttactaggccagtagctaggaattggtataaatttaatgcaccttctatcctgaataactagcatggaaaagtgaatatatgtgtgagcagatatggctataaagacctatagcttttgcactttatgcatatataatcaatcctttctagttcagtgaattgaccccatccacaggctgattcatctttgtgttaaggggcaaatgaaacggtatattatttctttgcagtctcctctcagtcattcatcaatgtggccagcttatctactcccaattatgttgttgatacatctccaagccatctgtcatcagatcaaaaagcagcaaacagagggtcagtcacaggatgttctgacacaccattgtaactttttgttagagatgatcccatttagaaaaagactggtagaaattggagtgaaaggaaccctacagattagcccagttctctcttattttcagctttacagacaagaacaatttaaatctaaagaatttagtagattccttcagtgtcacaaagctgtttcatgaaagaatcaagattataacctggatattctgactcctggcccagtgctttttcttactttgtagctacactttgaagtaagattcaaactgttatccactcaattgccttattcctgaggatgtagtgaaggaagaaaaagttttctggaattccgtaaaytatattttaagcttatttcttcaaaattattttcatatatcacagatatatcattggaagatataatttgcatatatgttcattatcagtgttcctaatttggtattacatgtattctatttttttctgaatgatagcatgaaaagtgtcaaagtggtttgtccgctagcgtctgtctgcagaactttcaggatgactattaattcctctcagatgtcatttttgagtggtccaagcctgctgttttgaacccacagcagtggagatttgtattcttatttacagttgtgtactataaagtgtgtgttacataggttttgtgtaataattatttgtaaatattatttagatttgtatttagacatgatttatatctaatatagatacaaagtctgtgtctaaatattatttaaaraagtgatttttcattytcttggattctttccagtgtggtgccttttatatgcctcacatagtctccttgttctcctactaatattcccaagctccatatgccaattaaagaagaaacaaaaataaaagtttgtcttgcttgtgaaacattaagaagaggctgtcaggtttaataaactttttaatgaatatttcagacataacaaaaaactgcagagcttcgtacacttgatttaaataattcttgarggattttataaggtcatcttatagacaaaattawgagamaccagtgtggttatcaatgctttcagaatacttgtgtttatgtaaatataccccagagtccaaaactctgatatattcatatatattcacaatgagaggatgtctgtgccaaatctgtcaatcagtacaatagaaaagttaattatataactacaacacgaaacacaaatttttagaagcaaattatgtcctgtaatttacccccctccccgctgctcctctgctaactcattttcctcttttcccactctaaatgtaaggcaacccttggctttggagaagcatctgttccaatattctggtgctatgtgctcagttgtactatatgcaaatgttactagacacagaggaggtcaaagtgttgatacacttattgctaccatttacagaatgatcaatttgatagctatcatacatggctagcaagacactgatttttctaataaaaaaatttttaatgcatacaggtctggtgaacagtttcaatttaacggatgaggccaaggctaaagccagagtaaagtaatcagagccatgcctcaggaacacgatttagctaatagtgtgtgtaaaatgggtaaggtctagaattagggactaaaatcagctgaaagtgttgcagatatgtatacttatcacagtgaatacttccagtttacagcaaagaattcaaaattgttgagtaaagcttggtgactattacctaaaatagactagactttagccaagcatcttttatcatgggaacaaacccgataacctgacatgctttttttttttttttttttttttgagacagggtctttcttactctgtcactcaaggtggagtgcagtgatgtgatcacggattatggctcactgtagcctcaacctcccaggctgaaactaaagtgatcctcccgcctcagcctcctgaagagctgggaccagaggtgcacaccaacacaccagctaattcttttttttttttttttttttctgaggggtggatagagatgggtgtttccctatgttgcccaggctggtctcaaactcctgggctcaagcgatcctcctgcctcagcctctcaaagtgttgggattacaggcatgcgccaccacacctggcgtgttcatttaccatccttaaacattcttttttttcttttttttttttttttttgcccttaattgacttgatctttggatgtttgaggttattagggatcatgtttcatttcccttgctttcaaatacagttcagaataaggattacatgaagtcactagcagttttactatgtctgaactagtcctgaaagtaaataaacatgcacatccggagcactaaaagagttgcagaattaatgatactccaatctctcaggccatgtgtcagttggaaactaacacaatggtgagaacattttaaatatttacagcctcatgatgtgaacaaacagcattctccctaaaagagtagactgtaactctacaccaagttgaaagaacagtctgtcaaacatcaggaaatagtcacaaaaaactggatgtacctcaggtgactcctaagacttgcattctccacatttaatgaaaattatatgaaatgtaaatagtaaacagaccttagaaataatctgacccaccttacctcatctttgttttctcagtttaacagtgtatcggtgagacattttacttttattataaagcagatatttcaggcagaattctaccaccctgaaatgtaaccaccctctccttcctaagcccagacatactccttagtatttaaataaacatctgttaagctccaggccatgttcaacgttggaattgttatgatcaattttaaaaagttagttttcctacaccaaacagcttacagtcttaatgaggaaatgttttagcatttattaattcaggaaacatttctggcactgtgctaataactatataagaaaatcattgtaagatataaagaccagatatagtccctgccctcaacctatacacttgaaactattggaaactattgaaactattagacaaaatggccatggtcatttagtgcataattaacacaccatgccttgttgttcttgctcaattgccttattcctgtgtcaacatcagcttcaaaaaagtgtattcaatgcaacaagaaacttcaaaatcacagttttgtaaaacggcagattatgttaaatgagtgaacctgtatattgtatttgttttctattgctgtcctaacaaattatcacaaacttagttaacacaaatttattatcttaacagttctgcaagtcagaagtatgaaattgaactcactaggctaaaattaagttgttggcagggctgtgttccttctggaggctctagggaagaatccatttctttgccttttccagattccagaggctgtctgaattcttagtttgtggccttgtccaacatcttcaaagccagcaacatcaggctgagtccttttcatgctgcgatctctctggttttctcttttgtcttcctcttccacttgtaaggacccttgtgattacactgcacccaggtggataaaccaagataacctccctattttaaggtcagctgataagcaaacaatttcacctgcaaccttaattctcctttgccatatttgcaaactgtggggattaggatgggacatgttttggagggggcattgagccacattactctgcctaccacatatattagctgaaagcttttttttttttttctttttttgagacagagtttcgctcttgttgcccaggctggagtgcagtggcacaatctcggctcacttgcaacttccatctcctgggttcaggtgattctcctgcctcagcctcccaagtaactgggattacaggcatgcaccaccatgcccagctaattttgtatttttagtagagacggggtttcaccatgttggttggactggtctcaaactcctgacctcatgatctgcctgccttggcctcccaaagtgatgagactgcccggcctaagatttcttaatagaaactttaaagtaaaaatattaatggctatattcaaaagttctacttcctaaattgaaagaaaaattaataaatccttgagattactagaaaacccttacagtaaatgagcatttatgacttgtacccaaataaatactataggtaatagacactaacttattacttaagaaaaagtacaataatcacacttgtatattttgactggttgttgatgttccttggtcttcatcagtaatacaaatgtggtcattagatgtagtagaaatattctccaagccctcccttaattcttcagatttctgcatacttatcccctctctttctcttgactttctagagtccttagaggtactggaggcctcttctgttttttcttcccctttgaaagtagcgagtttttctaagtattctactacttcatctctcaactcatcttcagattcttcaaaatttctgaaataataagcagtaaaaatcagcattatgatatgaaagtactgaagaatacatgtaaaaactcgtttcccttttctccatccccagttgagcaatataaaagttgcattttcacctaggtttttctaagcatgataaacagctaatgttgggagaatcagtcttctgttgagttttacattgtgttaaacaccctttattatatttattaatgtccatcatctaatgtttaagaggagaggaagagagaattaaaaaaaaagaaaaaaacaattgccgtacatcgagctcttactatatgtccatcaatatcctagggtacttataccatattccacttaatactaacaacattttgaggtagacattatcatcaaattataaataaagaagctaaggctcagagaggttaaaaaatgtggccgggcgcggtggctcacgcctgtaatcccagcactttgggaggccgaggcgggcggatcacgaggtcaggagatcgagaccatcctggctaacacggtgaaaccccgtctctactaaaaatacaaaaaattagccgggcgtggtaccgggcgcctgtagtcccagctactcgggaggctgaggcaggagaatggcatgaacctgggaggcggagcttgcagtgagccgagatcgcgccactgcactccagcctgggcgacagagcgagactccgtctcaaaaaaaaaaaatgtgttgaaggtctcacagctactaattcatagaaccaggaattaaaattgtgtctaagactgcaacattggtatttttagaaaggaaagggaatagatcaataagacaatctgcaccaacctaaattaaacctaaaagtaactgcaccaacctaatatttaagtagcaagtatgaggtcaggagtttgagaccagcctggccaacatggcaaaaccccttctctactaaaaatacaaaaaattaggcatggtggcgcacacttgtagttccagctactcaggaggctgagacaggagaatcacttgaatgcaggaggcggaggttgcagtgagccgagatcgcaccactgcactccagcctgggagacagagcgagactccatctcaaaacaaaacggaacaaaaaaagtggcaagtggaggagattgagaaagagctgataagagccaagaagatgtgtatcgtggaagccaaaggagtagccaaataggatgaggactgagaaatgattacctgacttgccaatttcaaggtaatagatgactgttgaaagaatatttcagatgagtgccgtgcagcaggagccaatgtacagtgggtccagaaagcaatggagattaacaaagtggtgacaggtggggactacaggtgagcaccactatgcccaggttttttatttttagcagctaggaggtctcactgtgttacccaggctggtcataaactactgtgttcaaacaatcctctcacctcagcctcccaaagtgctgggagagctactcaggaggctgatgcaggaggattgcttgagcccaggagtttacagttgtaatgagctatgatcatgccactgcactccagcctaggcatcagagcaagacactcatctgaaaaaaaaaaaaaaaaaaaagtggtgacaatgaatttaaactcctctttcagcgagcctaactccgaaaggaatggtattatttagagaacatgggggcaatggtttttggttattgtttttaatgggagagagttgggcatgtttatatgctgaggaaaggaggtagtagatattcaaaacaggagacaggtggaataaccaataggagccaggtcactgaaaagaggctgggttttagagcacctgcagagcatgggctttcagcaggaagagggacagtttttcctaagaaaaagaagatagggagagagaaggagagaaggactcatggatatagagaagttatggagctagaaaactgattctgcagaacgcgtactatctctgtgaaggaggaggcacagtcacacgatgagtgtgtgtggatgggagtgagctgagggatgagggtttggaatcactgatacactgggaaggaagctgaccaggcttaggattgccagtcatcatggaggaccccactaaaactggagaccataaatttgggtggaccagtaagtgcaactcccacttactgttaccattcctgagatatgtgctttacacagatctttcctttgtctttgttcctctactaaactatgctgtgtctaggtataaatttattttcgttgttgctgcttgataattgttttatttcccagatatgatgattactggcttcaaataattatagaaagttcacagctggaattgatttgcatattgttttctcatattcttttcttctggaactccttttcatatacatttgacttcatgcctcttaacttctctgtcacattttccatcatgtttttacttagacctatcttccagttactaactcctttattatctgcacctattctgttttttaaaccatcagtcgaattttaatttctattcatagatttttttcaacttccagaagttctagtgaattataaaaatttttgctatggtctgaatgtttgtgcccctgttcccaattcatgtgttgaaacctaatcctcaatgtgatagtattaaggggtggagcctttaggaggtgatgaggtcatgagagcacagccctcatgagtgggatcagtgcccttataaaagaagcccaaggaagcttgtatgctccttccaccaagtgaggacacagctagcaggtgctgtgtatggagccaaaagctagcccttaccagacaccaaatctactggcactttttttttttttttttttttgagagaaatctcacttttgtcccccaggcttgagtgcaatggctcaacctcggctcactgcaacctccgcctcccaggttcaaatgattctcccgcctctacctcccaagtagctgggattaaggcacctgccaccatgcccagctaatttttctattttttagtagagacggggtttcaccatgttggccaggctggttttgaactcctgacctcagatgatccgcccacctca

SEQ ID NO: 94111 - DNA, 102723 bp, Homo sapiens
  misc_feature (1)...(102723): n = A,T,C or G
aataaacatcagccattaataccctgataattgcctctcgggtcttcagctaccttcaagtacggtctttctgacctaccaaaaacgccctgggcttcggcttcggtttgctattctctgcccccttcctcggaccctgtccctctcttcccagtccgcagctcgtgttaaagccttccagaaaccccagtccccttccccggyttcggcgccgtctcttactcgacgaccttggctggatccccgtggtgcccatagacaagcgcccggacccgggcaggctcggcggatgcggagtaggaggaggcggcaggtccgtgacagccagaagctgggagcagcccccgccactgccgggcgggggttcgcacccgccacagggtactgcagacccacatgctcgctccaaccaacacagagcctgacgccccggctacgtcatcttccagcgaccgcgcgcctgcgccccgcccctgccccgccgggtgaccactcccccttggtccctttgaagggcgtttccttccttcgctgcccaagtggtggcgcctggctagactgcgtgtgggccccggagggatccgggggtgcggagcttgcgaggccgccaaagctgttgtctcaacaaggagagtctggggctagtccaaagtcgtgtctacagcctgcagtttggtgtttgatttggaggaaatatttactctccctggcctcagtttacccttcacataatatattgagtgctcaccgagccaggctctttaaggtattatctcatttaatcaccactaccatgtaacggcatagggaggcaaagcttacttccctacactgaggagagtacacgaaagctgctgtggaggcaggagtatggggcttggagttagaaaacttaggttcaaatcctagccctgccacttcctagcttggccaccttgggcaggtgaaactctgaatttttctcatcggtacaatggggataatatgcctccttccggattgttgtgaggattggatgaaataatagaggaatgctattgtgggtgggagaacgcattgtaaaaaactctgttcagatgtaagacaggaatcacaaggagaagggtcctctctcaaaatgctcacagtgtagaaagggattaagtggaacactggaaatgcctgtaaaaaggtgtagccctatgaaggatctagtctgatttttggtgtagggaagacatgaacattactaaaaccccagatcgagctgtggctcgtgccagagtgcaatgctgtagtctgaagagaagtgctctgggatggggtgggatggggtgggggctcttggaggaggtgctgttagagccagccctgtgattcaaaatcttctgtgtgcataaaaataatccgaggtcccatcttagacctactgaattagaatcttgcggatgggggttccaggaatctacatccttacaagctcccaagaatattctgatgcaggtgtcccaggaaacaggttttaagatactgagccagggctttgaaggataaggaagagttcctttcctggattttattgacttgaagcttgccatctccaagcctttcctctgaggaagagagcacagcaaagtactgtgagctagatttggacaaacctggctttatgtcctagctctgccattttccagccatttgatttcggacaagtcaccaggcctctctgtgtcttcactttcttactcttaaaatggaaggaatactagttatctgtttcaagattgttgtgagggtcaagtgagatattatccacttgaagcatttagtacaatgcttggcacatggaagcatttgataaatattatcagggggttattgtgattaaatgagaaatatcacacataaaaccctcagactagggtctggcttatagtatgtgctcactaaatgtctgtacttgtttttattattagagaaagttggtgtcccatggtgggggaaaggcttggccccacatttatgtgccagcacacacacgatgaccagtcctgcttacccttttccccagtgacacataggcttacttgaactgggaagtacaacgtaaccttctgttgtaagactccctaggtgacattgagatgtcgacattctcttcttcaccaaattggctcctctgaatttctggggagcccagtcaggaagcctgaagaatcatccagcaagtcctcctccttggggctggactttagcctcctgtgcatcccaatagccctcacttttagtctaggccatctgggttcttgcaggggcatagtttgagaactactgactgaggggttcaagtccaatttcctggacttgcattcaagattctttgcactctgactcccacrctgcatttccagcttcatcttctcctgttggaccgtgcatagcctgtgatccagctgcatctgatacccgtcttccccagtgtgtcttgtgcctttattcaggccactccttctgcctgaaatgctgttccctgcctcggaaactccaggttcagatgtcatttctttgatgtttcaaaactccctaggtcatctgctgctgcctttgtgttttctctggagctgtgttatggcctttagtacatcgtctcttatttattcccctccaggcaagactggagccatgtttggtttatctccataacaccagcacccgatatgagcctggcacagggtaggtgtcataaatattccatgagttgcaggtaattgaatttcctcatggcctagaacggtctgtggtgccatctccttttccctagatttgggytggtcactccaggccaggaatttccttcttccttcttctctcaaggattatagaagtctgtggtctttttttttttttttttttttttgagacagagttttgctcgttgcccaggctggagtgcaatggcgcgatcttggctcactgcaacctccgcctcccaggttcaagcaattctcctgcctcagcctcctgagtagctgggattacaggtgcccgcaactacgtctggctaatttttgtattttttttttttttagtagagacagggtttcaccatgttagtcaggctggtctcaaactcctgacctcgcctctgcctcccaaaatgctgggattacaggtgtgaaccactgtgcccggctgaagtttgtggtcttttaaaagtaaagcagaaagtcctcttctcatctgtctacctgttgcttgtgttctctttctccctccattatagtctctgccatcttcccctgcacaaagggcaaagggatgtggaatcagtcagatctgggttcaaatctagggcccgccgtctatttactagctgtgtcaccttaggcaagtgtcatatgctctctgaacctcagtttccacacccgtaaaatgggatcactggtaaaactcctattttgaggctctctcaagagccctctgcaaacagcacccttggttgtttcttctgttcactggttttctctccttgagtttccttttctgggtgggcctctctggctcctctctgctccagcgtctctgtatcttagtttcttccctaaggtttccccttggtttcttcttgcttctgcctccctctccctatttaattatctgtgtctaattcttgcctgctgtgtcttttggtccctttcctaactcagtgtggagctcatcagctctcacaagagaggagaccaagagcccaggaactctcaacccagcgatacctcctccagccccagggcagcttcaaggtgtgtccatctcagcatgaagccagctaggaggggcagggcacagggagggcctacatataccttgaactcctacgctttgttcagtgtcactgcccagtggtcagacccatctgcccatggctttccctacttcagcagtctttatagctggagctgtaaaaaaaaaaaaacaaaaaaaaaaaaacccagagatcagaacttattactccttattactcctctgcttaattactccacttcagtggcctcccattaattactcttagggttgaacctcaagccccttccttgctcatagtttcttgcctgacctacagaccctgctgacttgtctagctgcacctggctcccttctgcccctgactcactccatgccagctgcccggcttccttgcagctgcttgtacccaccagctcctgcctttgcacaggctgtcccctctgactgcaatgttcctctccactgatttgcatgaggttggctccttctcatacttcaggtctcagttcaaatgtcaccatgtcacttctatagcaaagccctcttggaccacttatctaaaggagatgccccttccctatgttctttatcattatactccctcgtttcctttagcttgcatatcttagatggtaatgatatatttatgtacatgtttgctgttgggctctcctaatagaatgtaagattcatgaaggctaggaccatttccctttcattcattccatccagtcagtatttattgagcatcaattacgtgccagaggccgggcgcggtggctcacgcctgtaatccctgcacattgggagactgaggcaggtggatcacctgaggtcaggagttccagaccagcctggccaacatggtgaaaccctgtctctactaaaaatacgaaaattagccgggcgtggtggtgggcacctgtaatcccagttacttgggaggttgagccaggagaattgttggagcctgggaggcagaggttgcaatgagccaagactgcgccattgcactccagcctgggcaacaagagtgaaactccatcttgaaataaaataaaataaaataaaataataaaaacatgccatatactgggcacggaaatacaagatgagtcttttcccaagggagctcatttctagaggtggagacagataatgaactcatcatatagcccgcactctatttgaaattgcaacaattccccttcccttccctgtccccccaccacccccaaatttcctggtgtatgagacagtgataagggacgtacaccagagggtttgcttttttgtttttgtttttttggttgtttactgttcttgtcttcccactggaatgtaaggtccatgagagtagggaatttttgtctgttttatatctctaccctggcctatagtaattgttgaataaatgaatagaccccaataaatatttgttgaatgaataggtgtccagatgggaggaaggtctcagcccctattcaattcaaaccaaacaactttgattcaaatctcggtgctgtcaaatactgttgcataacagtatttatgcagtataattgttgcatacctaatatatgatgattaaatgagtccatgtgggttaaacacatagaaggtacctggtcttacatagtaatgagcaacgagtttgcagatcatagtgcgagggctcgttctgggtagaggcccaaatacatttaacctgtgtagccagaaggtagagtaggaccagtgagggctagtgagggaggtagacttgcacgtcatgaaatgaaaaactttctaaaagccggcgtttccaaagccccaacaaccgctcttggccaggtgatgagcgccctgttcctggaggtatgtagaacacgcatttgaaggcgccaaggtacaagggattcaggcatcggatgggacagaggccgggtgtccctgggtcaccgtccctgagagcgctgtacgggagctaggcgtgggccatgagcgtgctcgcctggcagtgttggtgcccggtccgtggagacgtccgtgggcgtccagacccagccgcggggcctcatggcggggaggatgcgggagcgggggaggggcgcgccagggctagcgggcggccggacccgctgcagcacccgccgtggccagcagggagcgccgcgagaccgccgaacccgcggccgggcctgacgtcagcgccccgcttgctccggctcccgctctggactcggcgccagtcccgctccgcgccgcgccgctccgctccggctcgggctccggctcgcctcgggctgggctcgggctccgggggcggcgtcccccgcgccgggccccgggacgggcggcgacgctccaaccatggcccgtgcccaggcgctcgtgctggcactcaccttccagctctgcgcgccggagaccgagactccggcaggtaagcgcgcggcggccggaccgagcctgccccgccgagcctcggggcccgtggcgtagctcggaagaaagtgtgagtgttgagtgaccgggcgttacgagcgtgctccctgtgtgtgtctgagcgtaggatgggcgattgtgtgcccggggtgttgcgtgactgcgaatgttgtgtgtccgtgagttctgtgcgcaagaaaaggtgatgtgtgtcggcgagtatgttgggggtgaatgttgtgtgcatcgaggcattgggtgtgcgctgagtgtcttgtgggtctgccagtgtgtagtgtttgtgtggccaagtgggttgtgtgtgcatctgagtttggttgtgttgcgggagttgtatctgctaatgtgttgcatttgtttgcattttgtatgcctggccgggagtgctgtttgttttgtgtctgcgagtgggttgtgtgtttgtgttatgcctgtggccaagggtgctctctggatcccgcctgagtgtggatccgggaacgcgtgtgtggcgtgtgtgcttttgagatccgtgtacatgtgtgaaggcgtgggaacgggtccggaacgtgtgtgtccgtgcgctgtgtacgtgtggggagtgtctagggtatgtggtgtgtgctgccgggggccgcgtgggtccgagtgaatgccaagtgtgccgggaatgcgtgtgtgggagcgagtctggaacggatgtgagtgtgtgcgaatgtgtccgtgtgtgctggctgcgcgtccaggaatgttgcgagtgtggagcgcgcctgggccgcggctgcgagtgtgccctggtcccggggccgcccgagggggcggtggcaggacgtgtgtgcgcgcgtgtgcgtgtgcgcgtgtgtggcgcgctgggccggaacaagttgtcgcggcggcgccccctgggctgcccgggtcgggcagggcccgaggctcaggggaggaccgggccccgcggccgccgcctcgggcatgtcggactgtttgttgtttcgcaagttccgcgcggcgctggcgggcggctgatccgaggcggcgccggggctgcggggcgcccgggccagcgggccccagcgaggggccggcgggcgggcaggggagggccggaccggcgggcgctcctgcggtggccgggccgcggctgcgccccgggcggccgggcgggggctgtccccgggctgggctgcgacgtccgggcgcgggcagggcctggctcgccgccgggggacggcgccccctcccttggcgcgcaggacgcgcgggggacgcccgggcctcccgggacactcccttggtggagcctgcaactttgtgcggcctcccggccggccgggaccgccaggtgtgtgcttgagtgtgagcgtgagtgtgagcgtgtggctycgcgcttgtctgctgtgtggtcgcgttctccgggtgtgtttcggagtctggtgtctttggtgtgcgtgcgcgtgtgtgtgtgcgcgcagctgaatgtatgtatacggagcctgtgtttgtgtgtccgtgtgctcgtcggagtgtggacggtgtgtcggatgtgtgtgcgtgcgcgtgttccacatcccaccctgaggcctgggatcctagaccgcggccccttcccgcggagtttcggggccctgctccgggtgacctcccccgccctcgccaccggcggggctgctccgcgggctccgggtagccgggagacgcccggggcgggatccgagccgagacacgtgctggagcggagccgcttcctcacggtcgccagccgcagacaactgacctccccggcatcgcgttcgcggccctgctgctggctccggtgtctcgggccggaactcctgtggctccagcgttcgcgccggccactggccagcgcttgggcctcgccctgcagctccggggccatagggcacagctttagctttgacctccccgttcccgaaaggacgcccaaggcgacctcccaccccatcctccccaacttctcccccatgtcctgcggcaactttgcctccctctcccaccgtgaaatcaaacccgcggggttctgtatgcgccccatccccgctcctaccaccatcgctttgatttcaagaacactcacaagccccaagccctgccagcaggaggactgtcaggaactgaagtttgggagtgaggcctagagcaggttactcccattcttgatgcctcagtttcctcttctgcctcatagccatcatgataatggtgtatggcacttttggtagataccaagtaccttgtaaagtaaggctctgtctgtgagtgccagggaacaaaaaatggatttgagagttgttgcaaagccccagacagaggctgtgatttaaagctggggtattaggtgtcaaattctgcctctrctacttgctattcatgtgatgtctggcaaatcacctcacttgtaaagttcctggccccctttgttattcttagagatgaactcagaagcccaagtagaatagatgtgataccccttgtccccagtctggacagagtcagcccagctccctgaatggctccggagcttccgggtaggggcggtgtgtgatgccttctcagccttgcaaacctggtagttatttattctgctgtgttcttgctattttgtccttttggtcgcaggagttgtggacggcaggaatgagggagtggctgcccagtggtttcaggttgggcaataaaggcttgtctgggcatccctcccttttccctggggctaggggaggggacttagcaggaagcagtgacagtggccgaggtggggacgctgagctcctggacagcctgctgcccagctctggtgtcagaaaaaacctagggcaagcatcgtgcttgatggagacaggccaccatccttccatgattttcatcagctcagctgggcatatggggtggcctttccatgcaggactgggttggccagagttgcagggggtaccttgtgctcctccttcctccccctccccccttttcctagttgccctcctgcatcctggaacgtcctgtctgccctctcagagactctttcatctgtctccttctgtccgtcctcagctatctttcacctgcaggaagactccagcctcctccttccctctttccctcatggtgccagggatctttgtaaagtacattttaactcaaagggtttaaaaccctttgaaggctccccattgccttcagggtgaagtccttatcccttggccctgttgctggctctagctcctgcctgcctgtccagctgcatcttgttttgtgtcactgccccttgcatcctatgatctggccagcctgaccttcttrccaaagacccaaatgcccacagcctgctgtctcctctctgggcctttgggcaagccgtgctttctctgcagaactttctaactccagctttttgctggtgaactcctgcaacttgatgggctctcagctgtaagcatcatccagtccctgaagccttcctcggtgatgccctgtcctagcctaggaagtcggggggtgggggtcaattggatttttacatagcattgtaattattgtaattacagtttattagtgctgtctcccttaccagactgagagctgaggacagagactgggtttttagtttacttctgaatcttagtgccaggtacaaggcctggcccaccgggtctgaataaatatatatggcctgaaagaataaagtttaagggggccargttcagaggtggagatgccagatgggggygcactgattccactgaaggtagagattgaagaaccaggtttccctccaggaatctggaaaattcctggagggtgggggatggtgttatgttgtgaaaaggccatgttgagagtrtcatctgggagctttgagttggggaggttgagtccctggcaagagactgaagggaacgggcctcctgcctgccagcccctcccccaggctctggccccacccctagcagctggcagggcccttccagcccccagtctcaggcttttgtgatggggcctggcagttggtgagacgttgagtctcaacggtctgtgtgagtggctggggaggagggagggagcccgcagggccctgtgttaggagagggagggaagcttcctggaagaccctcccttagtcctcagtcctagatcctagggtgggcgggtggggtcacagyctctgttctcaccgcttgtgcaccggagggaagggaggagaactgcatcccgtggtggccctggcagatggggttggggaggctggctgaggtgtgtgcagatgtgactctagcatctgggcagtcagagtggggggtgtgtagggattgtaactaggggcatggacacatgtgacctgttagggtgtctagccatctggttatcgtgtggtgtggcaggatctgagtttggagtagggaggtaaccagctgctttgacccctggggagcctggtgctaagggtgtctggctatccaagtatcacattcctggagttgggtgcagagctatttggatgggtggtgtctcgctatctaggtgtggacaacccagtaccagcatgtgggaggatcagggtgtgcagacagaggctatcccagcatccctggggctggaggtgggkgtatccatgtgtctgggagtcctcaggttagtgggtatttataagtggggagtgtctctgtgttgtgtccaggtatggggctggccaggtgcctgagtgtctggttgtaggggtccccaagtgtcygggtatctgagggtgggggtatctgtgtatgaaacaacagggacccagtcattgaagtatccagttgttagtgagtctgggtgtggggtgccatgtgtctattttttttttttcttcttcttcttcttcttcttcttttttttgagatggagtctcactctgtcacccaggctggagtgcagtggcgtgatcttggctcattgcaacctccgcctcccgggttcaagtgattctcctgcctcagcctcctaagtagctgggattacaggcgcacgccaccatgcctggctaatttttgtatttttagtagagactgggtttcgtcatgttggtcaggctggtcttgaactcctgacattgtgatctgcctgccttggccttccaaagtgctgagattacaggcgtgaaccacagcgcacggccttttcttcttttttattcagatggagtctcgctttgtcacccaggctggagtgcaatggcatgatctcggctcactgcaacctttgcctcctgggttcaagcgattctcctgcctcagcctcccgaatagctgggattacaggcacccgccaccatgcctggctaatttttgtatttttagtagagayggggtttcaccatgttggccaggctggtcttgaactcctgacctcaggtgatccacctgcttcggcctcccaaagtgttgggattacaggtgtgagccactgtgcctggcctcatgtgtctatttgtatgtttagatgtggaggtgcccttgtgacctatggtggtgtccatgtatccaggatgtgtccacaaggggtgtggacgtgttgggtgggaatgtcctggtggctgtacccaactcaacctctggtagcccyttccctgggacttgcctcctgatcgctcttcagactccaaagccagaagccttggaaggggccccgatagttctgtttttcaacggtcagcctagagctgtgttatctaatagaaccttctgtggtgatggaaattgtcctctacctgcattctccaatacggtggctcctgagtcatgtatgggtattacatttaaattaattaaaataaaaattcaatccctcagttgcactagtcagatttcaagtcctcaagagtcatatgttgctagtggctctcattgtactggttaatgcaggcagagaacatttccatcctctcagaaagttctgcagacagcactggtctagaggcatgaggyggcctgcagcaccttcagtgagkcctgggcatctctgggaggggaattggtctggatggaccatgactcagtggctcttgacaaaaggttttgttcaatccaggccccttctctgcagccttattagatcttgcctggactattgcagtagcctggtagccttcttggcctctactctgcctgccatcacgctctcggtttctttttttttttttgagatggagtctcactctgtcacccaggctggagtgcaggggcaccatcttggctcactgcaacctctgcctcctgggttcaagcaattcttcagcctcagcctcccaagtagctgggactacaggcgcgtgccaccacgctcggctaattttttgtatttttaataaagacggggtttcactgtgttagccaggatggtctccatctcctgacctcgtgacctgcctgactsggcctcccaaagtactgggattagaggcatgagcccccgggcccggcccaggcttttggtttctaatgcttccaccaccctgtggctggaataagcttctaaggcagacataggatgctgccactcctttgtcccaagctgaaggctccccagaactcaggggacaaaacccaaaccctagcatagcacatgaggccctgcatgaccagccctttctttctgaagcagcttcacatgatgcctttcttccctgatcccactcctgcctatccgctgtctgctccaaatcaccaggcaaattgctgatccaggagcctgccatgccagttcacacctctctacctttgcacacactgtgcccctccctacttctcacctcgtggtgggggtgggggatctacctacttgttcagccttcacagttcagctccattgtcactgatgcagcgaagccttcccagccctctcccggtgcagttggtgaaatttctcccatagtggacgtctgacaatgtgctgcggttttccatctcctttttccactaggctgggagcccccaggggctgagctgtgtctttgtcatctgtggtccccagggcctatacgtgggagatgcccactaagtggctgcatctcgatgcctctgggtgcacagggaaggcttggaggggtgaatgcaggagctggggttctgcagcacagtcatgggtgggctggctatgcctcctcctctggctctgggttgggggctgccattkcctgcagaatgactgtgggaggacccctgagggggacagctcagaagatgctgcttccagatgacgcaggaggtcttgggcagattcccaagatgcaaaccacaagaccttgtgatgactcagaagggacaaggagaaagggggcttggagggccgctgaggcttgggagtttgagggcagaagctggggagaaagattgagatggggctgttaggaaggggagatgctgaggatatttgacagggcaagattaaagctaggggtggggtgacagctcagcccccgggggctcccagactagtggaaaaaggagacggaaaaccgcagcacactgtcagatgtccactgtggtgggtgacagctgaggcctgggggaccactggcggatagaagatagctggtgggaaagatatacctgggggatgggacagctgacagtgaagggacaggcggtattgggggaacaactgagggttgggggacaggtggatgatagaacaaggagatgtgggtgataagataagaggtggagataagaggtgacaactgggagctatcagaaacctagtggataggacaggtgagtctcagctgagagtgggaaatacattgcttagaatgtgtatgtatgtgtgtttacaggagcgtgcatgtggacttgtggctgggcatgcctgtcaatatgtgtttgtctagcgtgtggtggttaagagcatgggttcagggcccagaccatctgggttctaatcctaagcccaccacttctagctgtgtgatactttggtaagttactgacctctctgggcccttagagttctcatttgtggaatggggataataataggacacactgcatgcgtttgtcatgaggatatgttttatggttatgattatgtaggttagaacaggtcctgcacatagtaagcactgtgtaagtgatcactgttatgatgtgtgtatttgcatgcgtgcggtcatcctgtgtgcccagaaaagtttgttcttggtttctgatgaagtccaggcctgggagggagtaatagtggtggggacgggggtggtggttggggagtgcctagccaggttgattgagtctggctcttctctgacatcctaacctcttgttcatcctacttcctgctcaccctgtcccagggccttatccaataataggtctttctctctatctctcctctgtcctgccctgggctgggggccaggggctgtactttaattgtctgagagctttaccagcagaatttgaattcattgttttcctgccagcatgctgggattctgctcagttataatacctggacaatgtgctcgattctagatggcctatcctgtgggtggcagtggcttcakcctttgcccttggagagtcactggggtggaagatgttggagggagggagacaagccagatgagatttcrgcccccaacttgtggggtgagccagcgtggccgggcagagctgtaggtagagagttttccagggatctgagctcccctctcctccagtgcatcacagggaggcatcatgaccctcccagcaacactgttgcagcgtgccaggctctggactgctctggatgtgcactgtctgggattcctgggtccagcctcctyrcacagccctgtgtctcagccctctacttcactgggattgctgcattgcattgagggtgtgcgttctcctgagtttctgcatgctctgcctctgcattgtcccattggaccgtgcctccatcctgccatgatcctgccatggtcctgccatgtgtgtgtctttgctgctctcttgtatactgtgtcactctgctggatgtcagtgttgcattgggaaggtgaattctcctgggtttctgggcggagctgctcacactgcaccactgtctgagatcaacacatggttttctgtggccacattgcatgtttgtgtcatagagcatttatattctgcaccccattgcctcaccaggcagtctacattgcattgggcacatggactcttttggggtttgggcatagctcctcgcattgcagcactgcaccgtgccaacagatggcatgctaccacaacattgcatcttggcatcacacagcatctctgtactgcactgcactattrcatggacgtcagtattgcatcaggactgtgaacttttcctgagtttctgggcatggcccctctgcattccacagttgcattgtaccaacagtgcactttgccccatatagcacttctgtgcatgtgcactgctttgctgcactggatatgtgcctcatggcccagcccttgcactgcaccactgctgctgaaacgctgcccctatggtgtcctggcctttcacgctcctaccaccatggtatctgtaggctggcgtccttttccaggtttttgttgtcagccctacgtgaacaacatctttgcattgagtgtcctcactgccccacgttgcacatgactcagggagtctatatctatagtacagcttgggaccactttcttgggcttcaggactggcttaggtttgcaaagscagcaccactgcacagtatctgacattgcattcgtgcactgcacaggattactgcccagggcctctaccctgcaacgaacctgttcactgttgggttgtgtgcactctaccggattgcgggacccagagcccttgcgttgaatccactggttccacacagcatctatttttttttttttaagatggaatctcactctgttggccaggctggagtgcaatggagcggtctgggctcactgccacctccgccccctgggttcaagtgattctcctgcctccgcctcctgagtagctgggattacaggcatgtgccaccaaacccagctaatttttgtatttttactggagacgaggtttcaccatgttggccaggctggtctcaaacctctgacctcaaatgatccacctgcctcggcctctcaaagtgctgggattacgggcatgagctactgcgcccagctccacacagcatcttaattgtactccattttgtgccacttcctacccatgcctcgagtctgcacatactctgttcctcaggactgtatttattgggcttatatgctaggctgggttgccgcaccctgcagtttcttcttcactcactgcccctttcccatccccttatctctctgttgttctgtgtgcctgtgctgcatgtctatgcagggcacacacccttcccctgagaatgcatgaagcttgaactagtaaggcttaaacttaccatcttggcattcctccatacacctatcaygtagcactgggtgccagcccagtgtaccactaaatgcactgcagtggcgcggtgtgccttgtgcagctctgggtcatgcccatgatggatgtggcacttccatggtgcatcatggccctggccagttctgccatgctgtaccagatgtctgtaatgaggcctgtgcacactgtgggctctgctccctgcattgtataacagtattctgtctctacactgcaaagctgctgtactgcaccctccacacactgcactgtggcacagcagaggcctctctccatggacctttatgaagtacagatcgtcacactgctcgggtttgtgcacagccccatgcccctctactctatactctgtcttcgtatgtcgcagggtgtctgtggggcagatctgtgaactctttgcaccactgcaccactgcacaacatagtcctccattcggcccttttcctctgtctggcatccagccctggcctgtgccttcccctcatactgccagtgtggcagctctactgctaactctgggatytgcagcacatattgatcagggagatggggagtgggcctggcataaggtcccctgctgtacttggtttccttccattctccgtggagatggcaagatgttggcattgtcagrctgtgtgttggctctgtgggtggtgctagctcaactttccctgtggcccagccctgggcgatctttctggttgcagctatggtgactcctgggtgattagaaaatgggcatactgctcccagccctgactacaattaatgacccatcagtttgtcagggctcttcgggcagctctgggagcctcagcytaggtctagatgagttgacttgggcaaggagagtagcaaggtgggctgggccgggcctctgggctggagtcatggtcctagagctgggtgtggttggtgagggtcagactagctgggatcatggggtcartaagtccaggcactgttggctatacacagggcttgggatggggttcaaatgcatgagacgtggtccttgacctcaggcagggaggaggtagggattagacaggcctgagatggagctgtagctggggtggagaacccaggatggggctgggttaggcaagaaagtcaggggtgagtccagtgttggttccaggcttgggctgggctgctgagaataggggtacaaccttggatgatgaaatagtccagtattgttgttggggttgtatttgaattcccccacccacaactgggcatgtacctgggcttgggtgaaatcccagcccctaaatgtgcaacctgttgggaaaagttttgyttctcctgggaccactcttgggaattggatgttctattgacaaaccaaagggcagaaaagtctcattgcaaacaggctctgtttgccaggtgtcttcagaaaatactggttgcagctgcagccgcattgggcatggagtgctgttccctgtctggtgtgaggaaagtctggtgcacagtgcttgtgttcacactgacacatacacgtatgcacaactcccatctaccttactgcacacacccacctcccccttaggtgcaggcttaccactaaatatgccctgtacctttgcttgtaaatgcacgtctatacacccacggcttcacagcgcctgcccgggagacctcccctttccgacacccatgcccaccctcatgcacctctgccccaagatgactcttgctcacgtgcacactcacgcaactgcaaccggtcatctgaccttagcggtccccactctcattttacaggtgaggaggtaaggattcagagagggcaagtcacctgcccaaagtcacaaagggacttagaggctcagtgggaaaaagatcccggtcttccgcctcmcatttgaatacttgaaactcagtaccaggctgtcctgtcatcttagagccatgagtgcacrtgtgcacacacacacacgcacacctgcacacactcacacgcacacctgcatgtggacacatgcatggggaggtgtggagcccctcccaccagggagacccctcccacactcctccagaggcagctctgccccttacatcaccccatcctgagcccagccggatgtggctaaaccatccccctgccttcccaaattgtggctgacggttgctcaggcaaccgcctgccagactggggagattagctgaggaatgtagctgggccagtttgaactgaggctgggggagcccttgggggtcttgggttgattcaattcaccctctcagggaggcctctgtagagatggggtgcccaagggcaggcattctccctgttcccagtctgaggctgcatccccaggcttggcccaggctgcagaaagggagtgtgtgtgaacactgagcgcggggctcagggcatatgtgtgttgtgtgctgtgcacctctctgagtgtgattggagggtgtgccgtttacatcctggaaggggacttgaggcccctgtcctcaccagtttctgacatctgactctggaccccttggtggcttggtcccaagatccctctggatcctgctgtgctctctggagacaccacctgccctactcatggcttataggatatatcatttatctcatctgaatccaggatgagataaactttcctactcaaacacctactgtggcttctcaattcaaaatgaggcccagctcctcaccctggcgttcagggtcctccatgattggcctcaacctcccttccctccagtcatagctcccatggctttagccaacctgggctcctttctgtgccctggacaaactgtgtttattgaccaccttgctttgctcccctgggtcttttgccacaaatgccttccacccatctctacctatccttcttggctctgcttagatgccgcctcttccaggaggcctttcccctctacctggccccctcccctggaccccctcttgtggccttgactcttcccttattccctcattccctcttcctcaccctcactgggactaggaggtccctgagggcagggcagagtcttcatcatccttgtacctctamtagtgccagcctgggacctgctttgtactggcagggaaaaatcccctgtgaatgaagctgaattaacacttatggccagcagaagggcaggctttgttttgtttgtgcccagtctcctggaataaagataggaggtttaagtctgagcttctgcacattgtagctgcatggccttgagtaagcagctgtatctctctgagcctgttttaatctgtaaattaggaataataatagtacctaataaactaacaataagacaaaaataatactacctaccttctgagttgctgaggattcaccggctcaggtggtcatggtggtaattcacagccccttcatagaggtattgatgtgtatatgtgcatgtctgtgcccatgtctgtgttgatggagtcaagaaggattccttgctaccattcttgctctgaactcaaagtcggatttagtggcctccagcaggagttgagtctctagcagagctgggacttggctttggggcttttggctcctagctgaccattcccatctcaagggaccaggggaaggggtgagggtggggctctccttagggagcctgtccccagagatgttacccactatgagctggagctagaactgggtctggcccagagacacaggtctagagacggacatgggtcagggagagggagtgaatctggttaagraatcactctgaggctgggtacagtggctcatgcctgtaatcccagcactttgggaggccaaggtggaggcaccacttgaggccagaagtttgagaccagcctggccagcatggtgacatccccrtctctactaaaaatacaaaaacaagctgggtatggtggcacgtgcctataattccagctactttgcaggctgaggcacgagaatagcttgaacctgggagctggaggttgcagtgagcgagatcatgctactgcacttcagcctgggcaacagaatgagactctatctcaaaagaaaaaaaaaaaaggaatcactctggatgcggtcagtcagtcagcccatccagagtgactccttggaggtcaccttggccggggtcagttgtaggggtcatttggcagaggtcaggggtcactgtggctggggtgtgcaggtctggggtcagtcagtctgatggttattctggccgaagtgagatagtctgggggtcatctgtatgaggcagaggccactttcaacagggacagtcagctgggagccaggctggctgaggtcggcctatttgggggtcaccaacttggatcagtctggctggggatcataggactgttgtcagtctatctgggggctcctgtgactgaggtcaggtggtctgggtgtcactctgaccaggttagtcagtctgggagtcctggccgttcgtgtggcctggctcaggatgaacaagaggaagccaaggggctggcactcccaggctctccccagggtggtgagtgagacatcagggcagcggctttgttacttgtgaaggaacaggaaaggcctgaaccccatccagggctttagatcctgggcttccctttctggcaacccctctacctcaaggaggccttggctaagagccttagggcaggcccagctcaagctgaagtcagctggcctcctcctccaggaagtcctccctgaccaccatgctctctctctgtacttgccatgttctttctctctgctgcactgtgggtctttttctacaggggaagctgaggccctccaggtacagatggggttaatacccacctcctacaggcaatagggtatgatgctgaccagggattttcaaacaaagagccaaagagctcagccaaggtcctgcctcagctctggaaagagtcttctgttacttcatcccaactgcttggtgccatcctcacacccacatctcaccatttcaggagaagaccgggagcccccagcagtgaggagcccctttgtgcctggctcttctgggtgtgtttttcttttttctttctttttttttttttttgagacagagtcacactctgtcaccctggctggagtgcaggggtaccatctcagctcactgcaacctctgcctgctgggttcaagtgattcttctatttctgcctcccaagtagctgggactataggcatgcgccaccacacccagctaattttttaatttttagtagagatggggtttcatcatgttggccaggctggtcttgaactcctgacctcaggcgatctgcctgcctcggcctcccaaagtgttgggattacaggtgtgagccaccgcgcctggcctgggtgtgtttttcatgtgctacttcacatcatccgcatcaccgcctagaggagttgcagctgcagatgaaacagtagagcctcctaaaagtgaagtcgcttgctgcgtgtgaagatgcctagcactgggcctgtgacatagcactcactccccaggtgctgttgtttgggaaaagctctctcaaacggtgtttttcctcygccctcccaccaccacagcagcagtcatcaacacaggaggcctctgtgaccaaatgtgtgggggcttctccccaccaccaagcaagcaattaattctgtagcagacaccaggtgggtgtcctccaattcagttctagcacaagagtcagatcccatgggttgagggctcagtccccatgactgcctcctcctccagacaccagtcgcaagtctgggcctccagaacttctggccgacccgctgcaggttggggttcccacgaccccctctttgagtttgattaatttgctggagcagctcacagaactcagggaaacacattaactggttaattataaaggatattgcaaaggatacagatgaagagatgcatagggtgaggtatgggagaagggacatggagcttccttgccctttctggacccaccatcctccaagaagctccatgtgttcagctgtctggaagctctccgaaccctgtccttttgggtatttacggaggtttccttacataagcatgatggacaaatgtgattgcacataaarcacctgatctaaacccagcaaggcctgtctgcttagactttacttggcctttccgtggcattccttcctctagggtatggggcaggaccctctctggaatgacccatgattagattagagccctgccttggacaggtgaaaggaggacaggaataggtcagagagaaattttgtttcctgaggcctgtttctgaggcctaaagtgtccaacattataacataagactgtacaaagggttttatatatataaataaatatgtattgggtagtgctccccctggcactcactcccaaaccttagtgtttggagccccatcaggagcctgaggcatcagaaacccaggaaaatgcccaagcaagtggcgaggaagcaagcgcaaaccatgccagaccctgtcctgggtacctgccagccactggtactcctnnnnnnnnnnnnnnnnnnnnnnnnnnnnnnnnnnnnnnnnnnnnnnnnnnnnnnnnnnnnnnnnnnnnnnnnnnnnnnnnnnnnnnnnnnnnnnnnnnnnnnnnnnnnnnnnnnnnnnnnnnnnnnnnnnnnnnnnnnnnnnnnnnnnnnnnnnnnnnnnnnnnnnnnnnnnnnnnnnnnnnnnnnnnnnnnnnnnnnnnnnnnnnnnnnnnnnnnnnnnnnnnnnnnnnnnnnnnnnnnnnnnnnnnnnnnnnnnnnnnnnnnnnnnnnnnnnnnnnnnnnnnnnnnnnnnnnnnnnnnnnnnnnnnnnnnnnnnnnnnnnnnnnnnnnnntagtttgcactaaccaaatatatgtaaatatcacaactatctatacctctccctcttcttcttgagattgggaagcagctcaggtctgctccttctggtatcgaaacctcttttggtgggaagcttggacttcatcatctgacccacatggattcaaatcccacctctgttccctagtagacttgcatggtacatataagagctgctatttcctgagtgcttaagtatgctaggcgttgtgctaagtgggctactacatcaaatcctcaacaagcctatgtgcagatagggaaacagaggytcagaaagagaagccacctgcccctggtcacaaggtttggcaaattgcagtcaagatttgatcccaagtctgtgatgccaaagcccactcattgatccaccacgtggtgctgtggacaaatcccttcactcctcagatcctcagtcacatcatctgtcaaatcgggaggagtaccagtggctggcaggtacccaggacagggtctggcatggtttgcgcttgcttcctcgccacttgcttgggcattttcctgggtttctgatgcctcaggctcctgatggggctccaaacactaaggtttgggagtgagtgccagggagaagcttgcaattcctttctgaaccaatagtgttctcaggtttatcaggcaaccagctcaggcctttgatgaactcactaagatatatggacctcattaccaaccaaaggactcacatgtatttcaatcctcacttcctcccctctttctcatttcaactgttagtactggttgcaaatcatgggaagttgcttcatctagtcagtcatacatgtgcctagtccacacatgactgtgcttttgcatgtcacattcctgcaggcagagacctaatttggccgactttgggcaatgactgaattccattgacatctgtcaagtaggaaaaatagtggtgcctgactcagaacgcgtggcctgaacgaggctctgtacttacgccatttagcattgtgcccggcttgagtggattggcggcaactgttgtttttaaaggagatctcattgggctggattatggcatgcatggtcctgccaggcccagggcccactgtctgtcctctatgggaagatagaggggcaggtgacagaacactgagtaacaatccggagatctcagttcaaaccccacctccatcaccagtgacctgcgtgaccctaatgaagtcactcagccttttggggtctcagtttccttatccacaaagtggagatgattctattcctgatcttatgggttgttgtgaagttccaataatatagcaatcctgataactagtttttgaggagggtctttgatggatgactgagccagtggtggttggggggtcctgggaagtactgggggagttggcagtgtagggacatcttggtattgggaggggaccttggtagagggagagggtggaggagggagaatttcactagagggagggagcagtgtggggaagggcctgaagagagggaggagggcaggtgggcctgggtagaagggagagtggggctaccctccaggagccctcctggccagcagccctgccttagcctgggctaaccaggccctgctctcacagctggctgcaccttcgaggaggcaagtgacccagcagtgccctgcgagtacagccaggcccagtacgatgacttccagtgggagcaagtgcgaatccaccctggcamccgggcacctgcggacctgccccacggtaagtctactctccatcrccattaccccttcttctccttccagaggcacttctacccacctgctgtgtgaccttgggcacattacttaacctctctgggccccatctacatttgcatctttaatgacatacgtgacactgaatgtggctttctctggacactgtctaattgtgcatgtcagctagtttcgtgtgtaaaatgagtgcaggccctcatggctgtgagctaaaactcacttccaattactccccttgctgcctagctcaggatccaaaccactcccactctcagttcttcctaaatcctccatctttgagaggctctcttcagagattcttttctcccaaagagcccctgaatcctggtctctccaggacttgaagatgctgaaagagcagtaacactgggactagatgtgtataaaaccttccttcctctgccctcttcctcctggaagtcccagattcttctcgacttctaccttgctgtgttcctatttcaagatggggcacctttgtcatcctgagctctggactgggagtcaggagactaataatatggattctagtactgacttcctgctttcatcatggcccctagaacactcattccagagtcacgaagacctgggctcaaaccctgtctccagtcactttaccagcagtgtcacttaacgtatctgagcctccattgtcttcactgtaaaatgaggcaaacaggactccatttcagagggtcatgagatgatgcatataaagtacagagcacaggggtggcatgcaggggtcagttatttaattgctatggttgagggtctttgggggccctgattactagtactgctcttcactggatgcaggatcaactgggaattaaaaaagaatgagacaaataaaggccaaattgtcaactttattactgataagggctgtgtcagaggacaaatcaaatgggctttccgagtgaatcctgaaattccacagcctgaagcccactccctttgccccatcacactagtgcccagggtgtttactgcctagctcacgtcatggctgagattgcatctgttgtcagggaggggcagcaaagattctcagtggtggggccaggacttgaagccactaggagagaagaccttcatgacctggcacaggcgcctcctgcggactctcatggcttgccccgcctccccttctgtgcatttgctcacactgtgcccttcctggggcacttatctctgcctctgcaggtgttagtgggtatcacagtttgccttctctgaaaataatctgtaaaggtacccaccatggcagggacctcgtgtgggcctctccatattcccagggcccagcctcagtctgatacatggttggcagtcaggtacaaggcagctgattggaattcacctcttatagtactgaccaccctgagtgcacactgcctctcttgtcacgtgcaagcagagacatacccagtgagaaaggggagaggggaatttagcaattagtgtgagccttgtgctaggtcttgaggatgtggtggtgagccagatggacagtctttgtcctcctggttctcacattctaggaatgggagctggtggtggagggagaagaaaggagggagattcacactcagagatggagagaggagaaggaagagcgacagggacaaagggagtaaatgaaagagaaggggagggatgtagtgagccgaggaggaggcagagggagcaggaggaggaggaaagaacaaagtgtcagattggaagagggagaaagatgcacacagctgctcgcagggagaggagagagaagtaagtagcatgagtgggccaagagggagtgtgttgggggttgagaagtgccccttcctgggtggggatggggacttgagtttagtttactactgccctgctgggactgatccaggagccgcctccatagggcttctagcttacagagatgaatgagatcgcctccagcagagtccctggggagccctcctggagcggggatctgwgtgagcttgtgttggctggcagccaagcccgggaggaggcagcgctgggtggtttcgggtgccctttgggaagcccaaatccccccgccaggtcctgagccagcctagtccacttctactccaccagtacccagcctgggtctctggggaagggacaggctgcctttctccaggttggaagtcaaggggatttgtattccaggaatttagactcagggatgggggctggaagggaagttggaatcctttcattcaatctctgttctacwtattcattcagcttgcgtcctgaggcctcacagcctggtgggagacacacaggcactttagtaaygacccagggggcaggagagaagcccagggtgggaggcagagggagggctttggaaggggtggcctttgagggactgttgtgtgccaagctcttgactccagggatgaatgacctagtccctgtctccagggatagctcagaacatggggaaagctgtggttaggctgggcatgggcattgtgacctgtagattgtaaggagccataatttttttttttctttttgagaccgagtcttgctctgtcacccaggctggagtgcagtggcgtgatcttggctcactgcaacctctgcctcccaggttcaagcaattctcctgtttcagcctcccgagtagctgggactacaggcacatgctaccacaccctgctaatttttgtttttttagtagagacagggttttaccatattggtcaggctggtctcgaactgctgacctcaggtgattcacccacctcagcctctcaaagtgttgggattataggcgtgagccaccgcgcccagcctttaaatggttttgacaaagtcaggtttgtgtgttttttactgctccaggtctcctgtgggaaacagatgctaggaagtgaagggactcacccagggaggtggagctggggccagaactcagaatccctgactcctggtgggtcccgttgcctggagtcctcctcagtgctccccttgccctggccctgtccctcccctgaggtctcctcatctcctgcctcttcctcctctctttccaggctcctacttgatggtcaacacttcccagcatgccccaggccagcgagcccatgtcatcttccagagcctgagcgagaatgatacccactgtgtgcagttcagctacttcctrtacagccgggacgggcacagcccgggcaccctgggcgtctacgtgcgcgttaatgggggccccctgggcagtgctgtgtggaatatgactggatcccacggccgtcagtggcaccaggctgagctggctgtcagcactttctggcccaatgaatatcaggtgggctgggttcagtcagcggtcagcctgtgcctggaggtggggcagatggatgtcaaattgaggttggagtagatgagtggctgaagttagaatgtgtctgcattcagtatcagaggcaacctgtggtcaaggccaggggtcagtctggggccagtctgggttcagcatctgaggtcattgttcctaggaatagcctctggcccaggtcaagggtgagttggaacagtgctgacctggaaactctgtctggctgcttgagggtaactgtccaggatttgggtggaaactggcctccaccttgttcactatgggcgctgggaccccacccccaactagctggcttgggagggagggtcagtgtgagctgggctgacctctgctagttgaggcagaggaggctgaggccgagctgaaagtgggcacctccccaggcaaggctggaggaatatcagtatgataggggccctcccgcctcccccaggtgctgtttgaggccctcatctccccagaccgcaggggctacatgggcctagatgacatcctgcttctcagctacccctgcggtgagtcccagcccactgggggcgcaggggtaaggggtgtgggcggccgcggctcctgcctgcagggggtgcaggcccagctcacgatgcagctctaaccccgcagcaaaggccccacacttctcccgcctgggcgacgtggaggtcaacgcgggccagaacgcgtcgttccagtgcatggccgcgggcagagcggccgaggccgaacgcttcctcttgcaagtgagcgggagcggtgatcttggctgggggcggggtgggagggggttggtggctgcttctggccctgactccccccagattgctgagtccctgcttcatactccagcactgcgcacagcgtcccggccctcccctagctctgctctgcgctttcttgggtcccccattcccccaggttagagcgcggctccaggaacctatgtccgcgcggtgtagtagggacggctaaatggggcccgggtcagagcgagatcgggacccctcgctccgaggcgcccctgaccccctcactctcttccctgcagcggcagagcggggcgctggtgccggcggcgggcgtgcggcacatcagccaccggcgcttcctggccactttcccgctggctgccgtgagccgcgccgagcaggacctgtaccgctgtgtgtcccaggccccgcgcggcgcgggcgtctctaacttcgcggagctcatcgtcaagggtcagctggtggacgccggggagcgccgggacctcaccctcgaggggcggggccggcgacgggggcgggctctgcccgggggcgtggccgtggggggtggggccggcagggtgtcgctggggcgctatctgaagatgggcctgtggaaatggcagtggcccagccgggatgagatctgatctaggggtcggggctggcttcgagggggacggacagggtcaaggtgagagcctaaagaggggtggggttctggctgtgtgacttctgtgttgatcctagctggcctgcggtccgctccaggaggcgaggatgtgggggattaggaggggcctgagagaggggttgtgggctgatgggcgagggcggggtcagcctttggagccaggtgccccttagggcccgggatttagtgggggtaggagagcgggtctggttgagggcttggtagcagcgtgagaggccctaggaggacggagagggatttgggtgtggtggaactcagagttgggtgctggggtctcacagcagcatcggtccgcctcgcctctcccccatctcctcgcagagcccccaactcccatcgcgcccccacagctgctgcgtgctggccccacctacctcatcatccagctcaacaccaactccatcattggcgacgggccgatcgtgcgcaaggagattgagtaccgcatggcgcgcgggccctgggctgaggtgcacgccgtcagcctgcagacctacaagctgtggcacctcgaccccgacacagagtatgagatcagcgtgctgctcacgcgtcccggagacggcggcactggccgccctgggccacccctcatcagccgcaccaaatgcgcaggtgggtgcagcmgctacccctggcctcagtctctggtgggcccagggctatggaggggcgcattcgagaggtagcgtggcctgtgcttgtaaacctttctaaaacattgtgatttttcctcaacccttgttatggtaaagataatgatagctaatactttactttgtgtcaggcacttaaacatatctgtgtgtagacacacacacaaacccatatttatagatttaaaacttacaacactaccacgatgtaggtgctcttgtcgtacccattttagatgtgactgaggtacagagatgttaagtgactggcccaagagcacacagctagtaagtggcagagatgggattggaactcttgactggctgactccagaatctgtgttcttaattctacatctagataaaataagcaactaaataccatcaaatacaagtatattatacattctagctggtttctcttgtctgggtgttgagcctgaggtctgctcttccttgttaaaaagggcaaagcagctgttggaggatggtacacctgtgccagatgagggtcttttttgtttaatcagaagagaaattgagaacacaataggtttttctttttgtgactttagtattgttgttgttattatttttccttttgagacagagttttgctctgtcacccaggctggagcacagtggcgcgatcttggttcactgcaacctccgcctcctgggttcaagtgattcttctcctgcctcagcctcccgagtagctgggattacaggcatgctccaccatgcctggctaatttttgtatttttactggagacagagtttcaccaggttggccaggctggtcacaaactcctgacctcaggtgatccacccgcctcggccttccaaagtgctaagattataggcgtgagccaccgtgcctggcttagtgtgtttttttaatggacttactaagataaatgtagagtcacatgcagttgtaaaaaaaatacagaaagattctctgtgcaagtcaccctattttctgcagtggtaacatgttgcaaaactatwgcataatatcacagtcaagatattcacattgatacaaaccacagatcttattcagacttttctggttttgcttgtacttgtttgtgtgtgtgtatatgtgtatgtagttctgcacaatttatcacatgtgtaggtttgtgtattcaccactacagtcaaaatactgaatagttcaatccccttaaggactcttttataaccacattcacctccctttcttcctctactccccaacttttggtagtcactgatctgtcctttctaaaattttgttgtttcaaaaatattatatgaatgaaatcagagtatataacctctagaattggctttttttggataacagctttattgcaatataatccacatctcatacaattcaatccttaaaatgtacagttcagtggtttttagtatacggtagtccccgtgtatctgaagtttctccttctatggttttagttacctgtggtcaacttgaggcttgaaaaggtgagtacaatacaataagatattttgagagagagagacagaccacatttgtataacttttattatagtgtggtgttgtaattgttctattttattattagttattgttgtgagcctcttactgtgcctaatgtagaaattaaactttatcataggtgtgtatgtataggaaaaacatagtttatctagggttcggaactctctgtggtttaaggcatccactaggggtcttggaatgtgtcccctgcagatatggggggactactgtattgacagagttacacaaccattaactcaattaattaattgagtcaaccattaaccattaatcaattttggaacattttcatcacctcagaaggaaattttgtactctttagcagtcatccccatttcactcgcacacctctagccctaggcaaccactaatttcctttctgtccctatggatttgcctctctgtggacatttcacataaatggaatcatataatatataatcttttgtgactggcttcttccatttattttattatttatttatttatttattattaagacggagtttcactctgtcgccaggctggagtgcagtggcgtgatctcggctcactgcaacctccacctcctgggatcaagggattctcctgcctcagcctcctgagtagctgagactacaggcacccaccaccatgcctggctaattttcgtatttttagtagagatggggtttggccatgttggccaggctggtctcgaattcctgacatgaggtgatccgcctgccttagcctcccaaagtgctgggattacaggcgtgagccactgcacctgacccttcttccatttaacatgatgttttcaaggtttatcctcattgtagcatgtatcaatactccattcttttttattgcttaataatattccattatacamatatatcacattttatttgtcattcatcagttgatggaaattggggttgtttacacttttcagctattatgaacagtattgctatatttgtgtacaggtttttatattgatatatgttttcattttycttatgtaccatatatatcataagatatctctgtgtttattcattgaggaactgctggactgttttccaaagcagctgtaccactttaaatttccactacttgtctatgagggttctagtttctctgcatccttgtcaccacttgttattatctgtcttcttataagcactctagtatatatgaaatggtatctcattgtgattttgatttgcattaccctgatggctaatgatatatcgagcattttttcatgtgcttattgaccatttctatatcttctttgtagaaatgtcttcagagtgttaaaaatgaccaatttttaagttgggttatttgtctttttattattgagttgtaagattatttatatattctgagtaggccgggcatggtggtggctcatgcctgtaatcccagcactttggggggccgaggagggcagatcatttgaggccaggagtttgagaccagcctagctaacatgatgaaacccagcctctaccaaaaatacaaaaattagccaggtgtggtggtgggctgttgtcccagctactcaggaggctgaggcacaagaatcgcttgaacccgggaggtggaggttgcagtgagctgagatggtgccactgcactccagcctgggtgacagactgagattctgtctcaaaaaaaaaaaaggagtatttatatattctggacactagatgcttatcagatgtttatgtttgcaaatactttctcccattctgtggattatattttctttttcttgatagtttttttttgaagcacgaaagttttcaatttatctatttttttcttttgttgtttgtgcttttgatgtcatccctaagaaaccattgcctaatccacagtcatgaagatttactcctgtgtttttttctaatagttttatagtgtcagctattacattcaggtctttgatccactttgagttaatttttcaaatgtggtgtgaggtagggatccaacctcattcttttttttttttttgagacagagtttcacccttgtcgcccaggctggartgcaatggcgcaatctcggctcactgcaacctccgcctcccaggttcaagcgattctcatgcctcagcctcctgagtagctgggattacaggcgcgtgccaccatgcccagctaatttttatatttttggtagagacagggtttcaccatgttggccgggctggtctcaaactcctgatgtcaggtgatccacctggctcagcctcccaaagtgctaggattataggcatgcgtggccaacttcgttcttttgtatgtagatctttattaccatttgttgaaaagtctattcttattgaattatcttggcactggaattggtttctttcattcagcatagtttccttcatccaagttgtgtatatcagtagtttattcctttttattactttttattactttttattccatgctgtggaaatgccagtttgtttaaacattcacctgttgaatgacatctgggctggttccactttttcattattacaagtaaagcttctgtgagcattcatacagaggtttttgcatgaacataacttttcatttttctgggataaatgctcaagagtacaatcaatgagtcatatggtgattgcatgtttagttttatcagaaactgccagagtggctgtgttgttttatactctcaccaacaacgtatgagtgatccagttttctgcatccttgccagcatttagtgttgtcactattttttattttggacttcctgagaggtgtgtagtgatatctcatcatggtcttaatttgcatttcttcagtgtctagtgatgtcgaacatcttttcttttcctcttttttttttgagatggaatctcactctgttgcccaggctggagtgcagcagcatgatctcagctcactgcaacctccacctcccaggtacaagcaattcttgtgcctcagcctcccgagtagctgggattacaggcacacaccaccacgcctggctaatttttgtatttttaggacagatggggtttcagcatgttggccaggctggtcttgaactcctgacctcaagtgttctgcccgcctcagcctcccaaaatgctgggattacaaacatgagccacggcacctggacaaacatcttttcatgtgctgtttgccatctgtatatcctctttggtgcatcatctgttcatgtctttgaacattttctaattggattattctttttgttgttgttgttgttgttaagtattgagagttttttgtacattctaggtaccagtcctttgttaaatgtggagtttgtaaatatttcctcccagtagcttgtcctttcaccctctttatatggactttcacagaactattttcaattttgatgaggttcaatttgtaaaatttcccttttatgaattgtggttttggtatcaagtctaagaactccttgcctatccctgtctcccaaagattttctcctgggktttttttttttttttttttttttttttgatacggagtttcactcttgttgcccaggctggagtgcaatggcatgatctcagcttaccacaatctctgcctcctgggctcaagtgattctcctgcttcagcctcctgagtagctgggattacaggcatataccaccatgcctggctaattttgtatttttagtagaggtggttggtcaggctggtcttgaactcctgaccttaggtgatccggcctcccaaagtgctgggattacaggcatgagccaccgcgcctggcctcctgttttttttctaaaagtgttatagttttacattttacatttaagtttatgatctattttgggtaaagtgtgaggtttaggtcaatgttatttgttgctaatcaatattcgtaagtgttttaaaaagccaatctgtgaattatctaaaatccagtttaaagccacactttgggaactccttggatggtaggtctaaaatctggtttaatgtcacactttgggagacccttgagtggtgggtcagaatgttccagtgggaattgctttctagtgaaggggtctgggtcaggttacttaacctttctgagcttcagtccccctgttttacaacatgggaataataacatttaccatatagggttagtttgaagatttattcaacgaatgcttattgagtgtctattacgtgcgaggtgctattgtggttggtagggatatatgactataaccaggacagacaaaggccaccaacatgtgagttcttcctggaactcacattttggcaagaggagatagataatagatgagtaaacaagtgaagtatacagttggcctttgaacatcacaggtttgaattgggcagatccacttacatagatttttttttcactcacacgtgcatcaaaaatacggtatttgcgggctgggcatggtgggttataccttttatcccagtgctttgggaggctgagatgggaggaatgcttgaggcaaggagtttgagaccagcctggacaacatagcaaaaccctgtctctacaacacaacagcaacaataattagctgaatgtggtggcatgtgcctgtagtcacagctattcaggaggctgaggcaggaggattgctggagcccaggagatcaaggctgcagtgagctaagatttcacactgcactccagcctggatgacagatcaagatcttatctagagacaaacaaaccagcaatacaaaaaactccagtgtttctagggcctgtatatatgaagggccaactatgggacttgaatatgtgtgaattcggttatatgtaggggtcctagaaccaatccctggcatataccgagggaggactttatggcctgtcagatggtgataagtgccgtgaagaagaaaagcagggagtggggcctggagggttgttatttttaaaagtctcaagggaaggtgacatttgagcagagatctgaaggaggtgagggactgagccgtgcagagagctgggggcttgctgggggaagcaagcaccagcccgactgagcagccagcacaaaggcctggaggctggagaatgcttggcacgtgcaaggggcatccaggagaccagtgtcactgtgttagtgactgagtgggagatggcaggagaagaggctgaagttgagctgcagatgtgggacttagagccgttgtacacagagagagctggggagccactgaagagtttagagagcaggagtgagcatcatctacttttgtttaaaaggatcactctggcccttttgtggagaatgttctccaggagggcaaaggtgccgcagagaccagggaggaggctactgcaatgatctgcttaagaggtggtgatggctgggagccgagtggaagtggtggtggtggggagaagtggtcagattctgggtttattttaaaggcagagctaactgcatttgctgatggattgaatatgggatgagagaaagggaaatagaagtcaaggatggctccaaggtgttttgctagagcagcaggaacgatggagctgtcatttcctggagcggactgtggtggcagctgatttgacgtgggtgtcatagatcaggagttctgtgttggaaatgttgacttcgagatccctattagacattcaagtggagatattcatcagcagatggatacatgagtgtggagttcagggaaggggttcgggctgcagatagaaatttgaaagtcatcagtgtggagatggtatagatggcatttaaagccctgaggttggatgagatcttttacgctaatggttctcaactaggggcaattttgtctcctaggagacatttgacagtgactgaggacataaccgttgtcacaactgggtggcggcaatggggtgttactggcatctaaagggatagaggccagggaagctgctaaacatcctacaatgcacagacagccacataagaaagaattatctagtctaaaatgttcatagtgctgaggttgagaatccccgattcagtccttagatttttagggaataaatgtagatggaagaaagaggagttggaaagcctgaaccttggagcctccagtgttttgggttaaatgcagacaattgcagggaaatgcattaaatgcatgtgaagtatagcgcttaacacacagtaagcacccagtaaatgatggtgtttttaatctttcaaaggcagttctggtttgccacttaggataaaaggaatcatagcacagggttccgcagaggatctctattgcactccccttagtgtacagatggggaagctgaaacccagagaggggaagagacttggctgtgatcmgacagtgggtcaagaacccaggtttcatgatgacggctgttgattattcccattttacagatgaataaactcagatttagagatttagccacttgtacaaatctacacagtgagtccatggcagagcttgaatcaaaatttgaatctcttgatttctcatccagtgttttgttttagttttttgttttattttgtttttagagacagggtctcactctgtcacctgggctggagtgcagtggcacgatcatagctcactgcgtgcagccttgaactcctgggctcaagtgatcctcttgcttcagcctcctaagcagctggggctacaggcttgcaccaccatgcccagctaatttatatacaaatatatatatatatatatatatatatatttwtwtwttttttttttttttttttttttgtagagacagggtttcactctgttgctcaggctgatcttaaactcctggcttcaagggatcctcctgtttcagcctcccaaagtgctgggattacagacaggagccagtgcatccagcctaatccagtgtttttaacagcagcagcagcagctgctgctgccaccatcatgggctgaatgcccactttgtgctgggcactgtgaaacagttttcataggctggccaggacggaagctggggcaggggcctggcagacagggtgcaaacacctccccctgcccttctgaattacacgcttctctttgttgacatcatggcccctccctgcttaggcgcgttggccggcagttgttttgctgttggccagctgtgttgtcatctcctccatccccatgaaactcccctcgcactatattatttactgtaaaaacaataatatagcatcaggcgaaggcattttttaaaataagcactccgaagctcatcatcctagcccaacagctgttttaatttttctgacttcttcacatctctgcccatatgcctgcagtagacatttttacacccttgcattgggatgtagaaagcatttcgtatgctgcttcatttgcttggtgttgttacgtgtgttatgttgtttataattatgtttactgactctagaagtccattgaatgtccccatttagctggactgtttgcctccagacttctataatgataaataatactatattgagaaacctagcgcttgtagttcttcccttctccccccaccctgagttatttctttaggataaagtgtcaggagtggttgaagaaagggcttttaaatatattgctttaaaaaatggttgtgccaatttatactgctactggcatctcatgttaatgcacacatgtttattaattactatagactggtaatgactgtaggctggtaatgactgtaggctgggcaatttgactcatattatctcatgtaactctcacatttgctctttaaagtaggcatcataatctccatttgtttgtttttgtttctttttttgacagagcctcactctgtcacccaggctggagtgcagtggcatgatcttggctcaccgcttcctctacctcccgggctgaagctattcacccacctcagcctcccaagtagctgggactacaggcgcgcaccaccatgcctggctaatttttatatttttgtagagatgaggtctcactactatgttgcccatgaaggtctcgaacccctgagcgatcctgccttggcttcccaaaatgctgagattacaggcatgagctactgcacccagccataatctccattttttagtggaggaacctgacatcaacattcaaagggggttaagtaacttgcctgaagccacagaactatggccaggtgcagtggctcatgcctgtaatcccagaactttgggaggctgaggcaggtggatcacttcagctcaggagattgagaccagactggggcaacatggtgaaaccctgtctctacaaaaaacacaaaacaaattaaccaggtgcatggtggcacatgcctgtggtcccagctactcaggaaggtgaggtgggaggattgagactgcagtgagccaatgatagcaccactgcactccagcctgggtgacagtgagactgtgtctcaaaaaaacaaacacaaacaaacaaagaaaaaaaagaactaatgagaggtggagataggatgtgaacttgggtgtaccagatcccagtccaaagctcctcccatgagaaaaagttgaacatttcagggttattgcatcttgtttagccttactaaagtcaacacatggtggcctaattcaacagctgttaaatgttatcctcattgttttaatgtgcattttgacctctgatctyggagtgacctgtagccctgtgtaatttagagggatggggctttgaggtccccaagttctgttttgtcagcgtgtgttgacagttgaagagagtgtgtctgggtgccagatggtttttagaaacgtggagaaactcatggattcacacccctcaatcaacatatcagtctgtagtcaacaaactatttgagctccctggatctgtccagatatgatcagggtaggcaggaagaaaaaagaaaagtggaccttcttttcaaagagctctcagtctacctgggtggatgggaggtggcacagttgtcaaagaatgagatgcctaagtctgaagttgggagtttcatcctccaaagttgctatcttgggccctgtaaggtgatttgaagaagcttgagtaggttgccagtatttaaaaatctggagatttcacataaaaattggaatttctggctcctcttgaaaaatgggaggatctggcaactctgaacctgtagtcctgcctggcaacagtcatctagaggtgagcagtagctgccccttttggatgggacactactgtcctgtttgccgtggtctttacccagcatacgtcccccrtttacatggaacttctcctgcccttctgtaaatgctgcaggaggactaggaagcagaatgcttctgccaagccctagaggctggaaaggaatgcagggcagcattccagggggtggggatggtgtgagctgagctgcagggaacagagagccactcccagtagtgcaaataaagcagtggtacctcggctcttgtagactcccaggacagtgcacacagggcagccacctcggctcttgtagactcccaggacagtgcacacagggcagccaggaccacagccagagagttgaagaataacgcgaggacctctgggaaagatggcaagtgagcacaccccagatctgcctcctctggcgcaaacatagaagaatgatggcttaaaacaaaactacattaaaaaaattagaaaaatctctatgggccaggaatgggagagaaaacctaagtgtggtgaatgggcttgcagcccacagtacccaggatacagggagcagtggcagccagcccctcagtgtccatatgggatgggatttgggtggtccctgcttgtggggagaagggagccagtcaggaggcaggctttgttcctagtgagtgctgaaatctctcttcgatggctccatgtataactggagacatgctgcttgcctgcattccagggaagaaaggaaaccttctgggtggaaacasaatcttgtattgtgctgtacatggggccagtgttgaaaactgtgttactggtgcactcccaagataggagcagcctgggcgaatgctttcctttgcatcttcttcataaggggaattctgaacaaattaatcacataaaaaatgccactaggggctgggtgcggtggctcaagcctgtaatcccagtactttgggaggtagaggcaggaggatcagttgagcccaggagtttgagatgagcctgggcaacacagcaagaccctgtctctacaaaaaatacaaaaattagctgggcttggtggtacgcacctgtagtgccagctacttgggggactgaggcaggaggatcacttgagccggggagatcaaggctgcagtgagccgagatcctgccactgcactccagcttggatgacagagcaagaccttgtctcaaaaaaaaaaaaaaaaaaaaagaaaaaaaaatgctcctaggggttgtacttaatcttcttaagagattgtatagcggtgctttctcacctgttcattaagggatgctgaggtccctctagctggggacactttgcaggcgatcacagaacttgagagtaatgaaactatacttcatggaatcagagtgtaagagagaaaaggatcagttgatgcagtcttggtgtcttccctcattttactgatccagaaattgaggcccagagatttgcccaagatcacacagctggtcaatgcagatgcaggactaagggctgagtcctgggctccatcttgcctttgcttcagaagccttgacttttcttttctattcttttttttcgagacagcgtctcactgtgtcgcccaggctggagtgcagtggtgcgatcatggctcactgcagcctcaacctcccaggtttaagcaatactcctgcttcagctccctgagtagctgggaccacaggcatgtgccaccatgcccggcttatttttgcgtttttagtagagatgggtcttctccatgttggccaggctggtctcaaactcctgacctcaggtgatccacctgccttggctttccaaagtgctgggattacaggtgtgagccaccacgcctggccaactttttattttttgtagagattgtgtcttgttgtgttgcccaggctggtctcaaactcctgggctccagcgattctcctgcctgggcctcccaaagtgttgggattacaggcatgagccactgtgccyagcccagtttctttatttataagatggggatagcattctggtccatagagtcatcaagaaaccgtaaaacataacatgcacctcccttctgctggggtagctcgctctctcctgaggcatcagtgaattcctattggggaggtggggagtggtggttaagagcatggatttcggagccagcctgaccaggtttggatcccagcttcaccacttaccatctctgtgactgtgggcaagttactgaatttctctgtgccattgttttcatatctgtatgatagggctaataatagcacttgtctcactagattacaaggattaaatgagataaagcattttttgttttttttgggacggagtctcgctctgttgcccaggctagagtgcagtggcacaatctcagcttaccgcaacctctgcctcccaggttcaagagactcctctgcctcagcctcccaagcagctgggaccacaggcttgcgccaccacgcctggctaatttttttgtatttttctttttttaatagagacggggcttcaccatattggccaggctgggcttgaactcctgaccttgtgatccgcctgcctcggcctcccaaagtgctgggattataggcatgagccaccacgcctggtcgagataaagcattttaaagactcgagaacaatgcccagcctatccaaaacccccaatacatgttaactgcctttattatcattatcattatataatagattgtgtttccctttttgctttgacagccagggaacccaccactgaatttgaaccttatctttagacctccacataggacctaatgtcatgtatttctgtttctgtttccctgtcattctctggctttatttaactatttggctctcatttccctcattaccctgatttctgtatgttattatattatatgtattactatacattgtttcagaacaagtttggaattaataccttaagaaaaatatatcaacagtttgattcagactggcctgttgtagtccagggtgatcttgaattaggaggtgaactgtgctattaaaaataaattattggccgggtgcggtggctcacacctgtaacccaagcactttgggaggctgaggtgggtggatcacttgaggtcaggagttcaagaccagcctggccaacatgtgaaacgctatctctaccaaaaatacaaaaattagccaggcgtggtggtgtacgcctgtaatcccagctacttgggagtctgaggtggaaggattgcttgaacctgggaggcagaggttgcagtgagcctagatcatgccattgcactccctcctgggtgacagagtgagcctctgtcaaaaaaaaaaaaaaaaaagctaatatttttgagggcttattgtatattagccattgtcatgcatcctttgtgtgtatttccttaaaccttacaatgatcctatgaggcagggcctattatcttttcattttgcagttgaggaatctaaggatcagaggagtgaagtgattcagccagcagttgccagctgcaagtggcagagccaggattcaaatgtagtccgcctgactccaaagcacatacttttactccctgtttgatgttctaggggtcccctgagctcttgggggcaatggagggatgatttcaggcagctgactgatgctttctctccctgttcttcttcctcttctcttcccatttcttctaacttcttctctctgcttcctgcattctccagagcccatgagggcccccaaaggcctggcttttgctgagatccaggcccgtcagctgaccctgcagtgggaaccactgggctacaacgtgacgcgttgccacacctatactgtgtcgctgtgctatcactacaccctgggcagcagccacaaccagaccatccgagagtgtgtgaagacagagcaaggtgtcagccgctacaccatcaagaacctgctgccctatcggaacgttcacgtgaggcttgtcctcactaaccctgaggggckcaaagagggcaaggaggtcactttccagacggatgaggatggtaagagtctcagtcccaattcccggggccctgtgtacctcccacagatacgccatgtctgagactgaaatttactgagggtatttttttcttttttttgcttaggattaaaccaactgtataacaccaaagtagtgatagctcctattttttctctggaagactttgggttagattggtctaatttctttccttaagtgtttgaaagaattcagcagtgaagccatttgggcatagagttttctttgtggcaaggtttttagtaaattttagtttttaaaatagatattgggatattcagatttttttattcttgtatcagtttagatggactgtattttttaaggaatttgttcattacacctaaattgtcaaatttcttgagataatgttgtttataattttttttatttatttagagacagagtcttgctctgttgcccaggctggagtacagtggcaccatctcagtttgctgcagcctcctcctcccaggctcaagcgatcctcccacctcagcctcctgagctgggactacaggcatgcaccaccacgccaagctagtttatttatttttgaggcagggactcacacttttgtccaggtgggagtgcagtgtcatgattatggctcactgcagcctcgacctcccaggctcaaatgatcactctacctcagcctcccaagtagctgggactatagacgtgcactgccatgcctggctaatttttttgtattttttgtagagacggggttttgccatgttgcccaggctggtctcgaactcctgggctcaagtgatccacccaccttggcctccaaaagtgctgggattacaggcatgagccacttcatttgccaatattcttttattatatttatttaatgtccataggctctatagtgatatcatctttttcatttctgatattggtaatttctgttttcttttttcttgtttacccttgtgaagactgtataaattaatctttccaaagaaccaactgttggcttacttgattttctttattttctattttttatttcctttgttatactttctttggagttgatttgctgttctgtttgccttttgagatagaagtttcttagatcattaatactgagcccttcttcatttctaatatacgtgtttaaagctacacattttcctctaagtcctgctttagctgtgtcccacaagttttgatatttcctatcttcattatcattcagttcaatttgttgtctatacaattgaactgttatttctgttataatttctgctttgacctaagagttacttagaattatgttgcttaatttctaagcaattgggacttttcttttttgtttgtttttgagacacagtttcactctgtcacccaggctggagtgcagtggcacaatctcggctcactgcaaactccgccttctgggttcaagtgattctcatgcctcagcctcctgagtagctgggatttcaggtgcccgccaccacgcctggctaatttttgtatttttagtagagacagggtttcatcatgttggccaggctggtctcgaactcctgacctcaggtgatctgcccaccttggccctgcaaagtgcggagattataggcatgagccactgcacctggccagcaattgggacttttctaattgtctttttattattgatttctaggttaattccactgtagtcagagtatatactctaaattttatcttgtgaaatttcatctttactttatggcccaacatattgttaaattttggtaaatgttccagtgtatttgaaaagaacatgtattctgttgctgttgaatgcagtgttctacatatgtcaaactaatatttagcccttagcacattcaagcaccattctgaatggttttgatatattactgcatttaatacccatgacaaccctatgtggtaggttactatttctattcccattttatttctattcccattttacagaagaagtcacagaaagcctggctttctaacctgaccatctggcttcacagttgtcattcttttttttttttttttttttttttttttttttttttttgagatggagtcttgttctgttgcccaggctggagagcagtggtgcaatctcaactcactgcaacctctgccttcctggttccagcgattctcccacctcagcctgtcgagtaactgggattataggcacctaccactacgccggctaattttttgtatttttggtagagatgggggtttcaccatgttggccaggctggtctcgaactcctgacctcaagtgatccgcctgcctcggcctcccaaaggtgctgggattacatgcgtgagccaccgtgcccagccagttgtccttcttaagagctacactcgaatgctatcacaggtccaaagcctttccctgggttcctacagattccagttaccactaagctccttggtttatggctttgtcttgctgccgcacgtgcacagttttctgttctgcacagcattggcctagattcaaaattcagctccttctttactttctgcttttctctgccttaggacttcagcttccccatagtggtttatcaaggtattttcccaagcaaagatcattctcttcctaaatgacactcctgtgcctgccattaacagtatacatttacacaagaaaaacaaaacaaagccatgcctgcaagtgttaatgctaaaatgttaacagtatctctgggtgatacaattgtagatgccattaattttctttaagctcattttgattttctacattgaacatgtcatttatgtaattagaaatttttagacgagaaaatatcgccacccataatcccaataccgcaatgcaattgctgttttcatttctctggcccatgtgcatattttctgaaaactacccaactggaacaaaattggagccttcaaacgtatttctctcctgaatgcaacctacacagtaatgaaaatgccagctatccattttgagtacttagtaataggttgaaccatatgcaattgctgatgtttgccttggggctttatgtacatcacatcatttgagtcctggcttgagaggggttatatcattcccacttcacagctgagttaagtaaggtgcagagaggctgaatagtccatgagaaccaggtaggaagcggcaaggctggaatttaaacccaggtgtctggcaccaaagcccactttcccctggcccctgctgcctttcccttgcagtgcccagtgggattgcagcygagtccctgaccttcactccactggaggacatgatcttcctcaagtgggaggagccccaggagcccaatggtctcatcacccagtatgaggtgggtttgggaycctattacagtgggggaccctggtggaaggtgagaggtggccctctttctctctgctgctacagtaggaggtgcatgggaggacagatgtgattgtcatagtttcttcaactatggccaggtctgtgccctgtgtattctagaggagggtcctgaaggcaggagggagagccgaagatgactagaagcctggcttgatggcatccatagtctcctttgcttagccttatctctcacttccctgggacatggtgggtggaggctgctggtcagggatgctctkaccatccagtgcccacctgcctgccaatcctgcccccagatcagctaccagagcatcgagtcatcagacccggcagtgaacgtgccaggcccacgacgtaccatctccaagctccgcaatgagacctaccatgtcttctccaacctgcacccaggcaccacctacctgttctccgtgcgggcccgcacaggcaaaggcttcggccaggcggcactcactgagataaccactaacatctctggtgagccccacctgacccggcccagcctcttcggaggtggcccagaatcccagggttccatgggcagaagggaaatggggggcatcctgggggtagttacagagggcccctgctgagataaatatgccatttaggagttaaagtcaggctcagggaggatgaagtcagaggagtcaggagactggtcagtggaatcagaagattgaggttggggctggtgcctgaggtcaggggccagggtagctcaggtcatgtcagcaggaacaaagaggctaaggctgaagtaggggagatctgaggactgtggtcaaggaggctggaagcctggtcttcctggtccagtggccaagctccagcttgtgaccctgtccccttctccagctcccagctttgattatgccgacatgccgtcacccctgggcgagtctgagaacaccatcaccgtgctgctgaggccggcacagggccgcggtgcgcccatcaggtgggaaagcggggacggaggggtgggagtccagggccttaggaaagaggcccctcctctgacccagagccccatcccaggccagctcacccttttcctccctcagtctcccacgcagggcttggagtgtctggaggagattgttctgtgatgcttggcaggcaagaagcctgcagtccctcccctctgaggccatgggtctcagatggtgactgtcaggaggaccctggataggtccagcctggagaggggactgtccaggcctgtccagggggcctttcctcagacaccttggagaagtgaaactctgggggccttatatcatcccagccttttcctggaagcacagagatgggctttctagaaggctggggcagccagccagatagggccatctctctggaatggctaggagcttggcttctccacctcctctccccagaggaagctgggcttgctggtgccgtggtggctgcctctgctggggagagggtgctggagacaagactgtgtgtgtgtgtgtgtgtgtgtgtgtgtgtatgtgggatgtgaaactgggtgtgtctttgtgataaagacatgggatgtgtggtgtgagtgtgtgtgagaggcgtatatgggagacataagtgtgcatgtgtgtgagagtgtgagggtgtttgtgcaactgtgtgcacgtactgttagccagaccccgtgctaggggctttatctgcatgaagccatttatcctcatggcagccctgtggcatgggtattattaccttcattttacatatcgggaaactgactcagagcctgaatcacttgccctcaaggccacacagctagtaagtggtggagctgggatttggaagccaggtctatctgctgtgcctgtaccttttctagaagttatagagcctccctgcccttctggtccaccccttccttccacgaaggtacatgctctgggagagggtgacagcctttaggtggggggggtgtgagggtcctagtcagttccctaggaagagagtgggctgcctgggtgaccatggcagtccctcacctcctcactccccactgtatcctctcctcttctgctttgtcttccctgtatttgccactgcaaatcctgccctgggctgattcccagaccctcagggaagacccaggaaaaagtcacggggtctgcagggccttttgcctgttgctagagcctcagggcccttatgccactgagtctgggatgggttgggaaccctttctttcttgtcctcttgagggatcctgtgagcagcactggtcagggtccctcaggatgatgattgcaaggctaggtgggggcaggcttggtgggaggggagcggcaagatggctgcatgaccctgggcatgtcccgttaccttcctgagcctccgtttctttatctgcacaatggggattattctagattaagatgcactttgttcatggctaatgttaatgattacctcctggtgggatttagggctaggagaggcctgaccttagcctggggcaatggaggctgaaaggggcttggactggtgtttataatgggctagtgacaagccatgggctggtgtccaacactctgggatgattccccacaacttggatgctccaaagaaacatctggtgagcaaggaaaaggcatttctgcttccccaaggagaggctgtcagtatgggatgtcacamgccaagacgtgaccgagactgtaactggaaatatttaaatttgtcaggattcacttatttactctccactttgttctgcagaggatttggaggagctcatagcagaaacctatttagtaaagagataaaatagaaacacagctgggaccagggagcacgaaccagagtgggcagtcaggatcctgaaacagcagggctccgatttgctgatcagaggctgccttggcattgggagggtgctagagacatagtgttgggtgtccttgtttgctaaatcactgtctctcactagaggtcagttttaggaagcccagttgcctagtgtatagcacagggctcatagtctgagctcagtcatctctttctgaatgaatgaatgaatgaatgaatgaatctggctaaccctgtcatttactgagtcccagaagggagctttcagtagctttggtttcccaggtcttgtgtcacacacacaggaggactcatggaggaagcaggctggggccttatggcttggttatattgagcagggtccacgatcctcttagcctggattagtaacaggaataaccgctgacaggtgctggctgcttgcttaacttgcctgttcttcccatctatcttctgaacagtcttgcaattactcccattttatggaggaagaaaccgaggcccagggaggttaggggacttgcccagctagtaaggagcagtgtgtggaagttagtccccaggagggcttgaccacaaagcccatgcctttaactgccagctggctctcccagtcctctggccrcctgtgatcccctgtacgctctcctccctgtccagtgtgtaccaggtgattgtggaggaggagcgggcgcggaggctgcggcgggagcsaggtggacaggactgcttcccagtgccattgaccttcgaggcggcgctggcccgaggcctggtgcactacttcggggccgaactggcggccagcagtctacctgaggccatgccctttaccgtgggtgacaaccagacctaccgaggcttctggaacccaccacttgagcctaggaaggcctatctcatctacttccaggcagcaagccacctgaagggggtgagggaccggccagggtcatggtgggcgtggttgggtgtggggggatggcagacaggagataccttggagcaggcccagcgcagactccaggcccggcacttcccatagccccacctcccatagccccacctcccatagctcctcctcctacagcccacccccatagccctacctcctgtagccccacctcccatagccctggccccacagttcctcccccataaccttgcccctcccatagccctgcctccttttgcccacctcccattgccccacctccaatagccttacctcccatagagccacccccacggccccgcctcccacagccccacctcccagagtccgtcccatagtcccttctcccatagcccctcccccatggtcccacccctcccatagccagccctcctgaccccaggctccttcccacagagcactacccccttcctgagccttctttctcaggctcctcctttctatccaggtccccagtctagtctctgccccttcctgaggccctgccttctatcttagatgcttctcttcccagaggagtccatctcagattccagcgttcctgtgttaaggcctaggacccgcctcctccctgaagccccaccttatcctccaggctcctccctcctctgcttcttgcctggtttcttgcctggtttctgacttcctagctggacctctggccctaggcctcgccccgatgcccgaggccccgcccatttccccaagacgtttgtttctcttttgcctccgatctcatccccctttcctaaggcactgcaggtgcctcccctctaggccccgctctcaagggtccccccaggcctgccttcgggtggggtgtcccttgatgccatcagcacaagacaaagccctgaacaggcccaagaaacgctgtctgaggttcccaccctggggagggagaggtcggggcttcagcaacgctgagacccccatctgtgcctccaggagacccggctgaattgcatccgcattgccaggaaaggtaagtccgctgagttcctgcagcctttcagcggcaggtttctcacctgcccagcgctggggaggtggatcctgaggacctacggctgtgrgagtagaggagggtggttgggcagtcctggggccaggaggggcttcctgctgggtttccatgtgccctacctcaagggcgccttctcccagggtgacagcaggggcctggagcaggcttgtggagaggagccattatagttgggccttgggggtgatgggtacagggtgctggttctgggttaygtatctgtccggctttcctgtggtgggggagaaggtgaggtcagcatgggccctgtgctataggtatctttcctgcttccagacagggaatgtggttggtttcccatcctgagatggactaaccatgccctaggtacacaattcctaatccctgttacctcccaggagggcaagagggtggggctgaagcccaggtgtctgctctcccctatccactgagagctgggaggatctgagaaagtgggaagcgagggaagctattcctggcaaaggagccatatcagtgaggactgtggcgtggaagtgcagaaggtatcagggatggtgaggaggtagatttgctcaaaaggcaggacacayattgaggatgtagggcggtttgtgcagcccagtttgttccttgggcacagccacctacaggaggggctcgatggtccctgtctttcctctgatcccttgttctgctttgttctccccagctgcctgcaaggaaagcaagcggcccctggaggtgtcccagagatcggaggagatggggcttatcctgggcatctgtgcaggggggcttgctgtcctcatccttctcctgggtgccatcattgtcatcatccgcaaagggtgagtgaggccggtgccctgtcccaccagtggcttctaccccttagaggcctggtggcacagaggaatagtggctaagagctggtagggcagctgtcctgcaggtgtgtggagggctgccagcctgggcatcgcctctacagatggatctgagctgggtggtgggaagccagagactgggaagatggggctgccctggagtggcatggctggagtacagttctggctggtgccaggtgctgccatccagggaggggtgctcagtgcctggtgccaaggagctatgcctgctgggactgtttcaatagggagggcatagaggtgacctggctttgaacccctaccctcctgcagaccttcagccaaggtgtctgccctgcttatgggattgtgcagttgacctgagcagaggatggagctcactcctctttaaaccaagggccctgagccatggctcttcccgggatccaccttctctcaggctcaacttgccctggaccctgttcctgtggatccttgaggagccctcctgggcctgtgactgataaacccctccccctgccgcccctactatccctcgtgtctcaaaggtccagcctgtgtttgcatgaaatgtgtttcctagcggatttgcagagggcagcatatatcccaggacattgtggaatccagaacctagaatcttgcagtttcagaaatgtaggatttaggactctaggaatcttaggctttagaattgtagaggctcagagccccagaacgtaagagctgccaggtagttcaaggccatctagtctagtggttttcaaatctttttaaagaaacagaacctgccttcaaaacaccagaaaacccttccctgggagcctagtaaaatggagcagatgaaggctgagcagcagtgctggtcggaagctgagtgggggcttctgggacttttctgtttgccagctctgccccaccatgttccccaccaggcagccgtgggacactgtggtccaagcgccttaaatgagggatggggatgttgaggcctagagggcacgcagggctgcccaaggctacccggagagccagaggcagagccagctccacccttccccacctgggctctggcttctatagcccctactgctgccaggctgggcatacatggatgagttggttgtatctctgggctgccaggagcggataataggatccaggaagatgagagagagagctggctggggccaccttgcctgaggccagacaccagcaagagagagagagtctaggggtggagtgtgcagcggagtggaggagatsggggggatggcccagccagggcgatacactctgatttttcccctcgttgttcctgcacagctttaagagagactattttaaagtatcatttaatgagggattactatgtgccaggagcttcacacacatcatccatgagtacattagttattggacatctactgtgtaccaggcactgttctgcactcagcatgcgtcagagaacatttccttcttggatcttgactgactcccttttttttggatgaagaaactgtaatgaaagcaccttgcccaggccacttggctgatgagcagtagggcctgacttcaactcaggctcgcctacaaatgtgaaggcctcactgagtctggtgcataggcagtgcccccagaatggcaagcccctgactttcccccagcagggggcctgagaagtgactttaagtagggctggggctggagagggctatagtggagggggcagatttcagtttcaggtggtatttgaggtcctagaaatctaccctcaaggagaagaggattggcagagtgaggggtgtcaaagagagccctgcaaagagagcactgggcccaggacaggctggatcagaaatgttgtcagggcctcactgggaaaccttccattatgtatttgctaccccataaacccaagttatcccagatgcctccaggaacccctcatcccccatcactctggacctccttacttcctctaaaagccattcagtctcactgtgtagtacccactgcatgcccctggatctgagcctggccttcagggccttccgtgctcctcagggcttttgcagtctgcattgtgggtatcatgggatgcagcagccctggcagggatgggggtgttcagatcaacgtggggtgccaacataactaacaagagtaggaagttgctgaggagggcagttaccacgcccccaggagggagtcccagggggattatgggtaatagaggccagctggaagaagatttcagattctccatcctgccctgcctctgtggaccatcagactggatgcatctgctgtaggggaattccagggcctggaagggaggctggtgaccccaggccaggtcagatcccctggctgtgcttccagaagtccccataccccacccttctccatggcagcactttcttctccctgcactttgtcatttacttacttgtagtgttttgctcaatgcttgcctcccctcctgggttaagagctccatgaagggcagagaaagccctgtcttgtctatatctccacagtctagcccaggggagtcgggtctccccactctgaggtrtagggaggagtggtttgtgggcactgctgggtgcttcccggtgctgaggcctcacagcagtccctgtgggagattattattaacctcactgtgtatgtatgttttttttttttttttttttaaatggactcaagctctgtcatccaggctagagtgcggtggcgcgatctcagctcactgcaagctctgcctcccaggttcacgccattctcctgcctcagccttccaagtagctgggactacaggcgcccaccaccacgcccagctaattttttttttatttttagtagagacggggtttcaccttgttagccaggatgggtatgtatgtattttttgagacagagttttgctcttgttgtccaggctggagtgcagtgatgcagtcttggctcactgcaacctctgcctcctgggttcaagtgattctcctgcctcagcctcctgagtagctgggattacaggcgcccaccaccatactcggctaattttttgtatttttagtagagacagggcatcatcatgttggccaggctggtctcaaactcccgacctcaggtgatccacccgcctcggcctcccaaaatgcagggattataggcctacctgagccaccatgcccaggcttaacctcactttttaaagaagaaagtggaagcgcatggaggtgaagttcttttatttatttttcctcatttattgattactccattcaacaaaatatttattgtgggattacaatgtgtggggccctggggaaacygagggagacaaaaagacaaggattctgtcctcctgtactttgtagccagtggagagcctggcatgaaattagaaaaagcacaaatggaagagataattgcaaattgtgaaaagaacagggtgctgggtgttgggggcaaagagaatacaagagacatcatgtagctggcactcgtgggagagtggtccgggaaggcccttttgaaggcacaatgtgtcaactgaggccagaagaatgccatttcttcagccgtgtcctccctcgtggggcctctgcaacagccccagcgccctagactctcccctctctccctgggatggaggagatgtgctctgtgacctggggccaagctcctgcctttgctggtccgtcttccgctctcctccccttcatctgcaggatttcctgtggaaggccattctttggggtccctgctgacagggtgatgtgggggcaagtgaatggaggcctctggagagcctgggaggggagcacagaggaagttccaggaccagggtcctggggcaggtgtttgctctggactctgccactgacccccagagaggcccaggtagcccatgctccctgactcagcttccccgcctatgaaatgggaatccaacctgctttacactgtgggtgctttgcggtaaggtagggctcttgatggaagctgtgccccaggtgctcccagaggggatgacctggctcctttagtggatcccacacccaggggcaggcagggtaggtaagggtgggccctagttgtgtcctgggcatacatctggagtcctctccatcctgccccctttctgtccccacccaggtggaggtgcaggcaaagggctgaccccttatgggcagagggccgtgcagggtgggagggtgggggatgagaacagccctggtaagcacagttagcctagagagtatgagtctgtgtgtgtcaggggatgtctaatgtgtgtgtgtgtgtgtttgtgaatatatgtctaagtgagtgtgtgtcaagtgtgtctgaatacatgtgtatgcatgtctgcacctgtgtgtctgcatttgtgggtgttgatatgtgtttctccatgtatgagtgtgtatgtgagcatatatctacatgtgtgtctgtgtgagtgtgcatatgtgtatgactgtgtgaaagctctgcggccccctaggtccttttcccacctcctcctcactcctgcagtaggcttggggaaggtttcagaagggccttgggtcctggtcattaatatctgagcctgaccagggaggtcctcctgacctgttcagtccctggccagccccctccccagcccgggaggtacccaggccccaccctgctgcctgggcattgcctcagcccggccttggtggacggacctcggacacaactgtgctgttctctctttgcacgctgccaggagagaccactatgcctactcctactacccgtaagtagctctaccttgcctgggagtccccggccctgcctagggggagatcccctgtccccgccttctctggttgggcttagtctcgctgcamccagcctggcctggtgtccacccggttctctctggtcacctcggcctctgactttctttcctctgctctgtccttcccctctgcatcttcctcctcaagtcgtggtcatgagtgctggttctgcccctaagaggcatgggttcagagctggccctgctgagtcacccccagcaagtccctgagcctcaatgtccccttcaccaccagagcagccccttacgtctactgttcctcgtggttagaagtatgtcctgacctccaaccaaatccacgttcaggacacgctctggagcccacgtccatgtgcatgtgtgtgcttgtgtgcatgtgggtggggcctacctgttctgagactggcagcttctcccacagcacaggcaactctcaggcccctacaagtcccttctccagccaggcagccccagctctgcagacccaccatttcctgggagcctcctctgggccaagccctgtgctcagttcttgacagagtcctcacaacagctctgagaaataggagcttttatcactcccactttactgatgaggaaactgaggctcagagagaccaagggagttgtgggaggttgcaaaatgcactggaactgggatacaacccaggcccctgctgactccacagcctgccgatgctactctgtcttctctctctgtcttctactctgcaagccttctggaacattcctcctgcccctgtgctggttttccctccctcgaagtgcaggcccagagggcgccaggccagccctgaggacagtgggtctctcacctcctcctccctggacagctccttaccttagtgtttcctgacacgagcttttccaacaactcaacacccagcgactcgcgctgagcccccagctcggctcctgcaggggctgtggacaggcagctctccctgctgcttgcgcagttagttttcaaaaccagatgcagaacttctcaaagaatctgtattaaattccatctgcttaatctcacattgagctcagctggatgccaacagcattaggtgtccctcccgggttccatcttctggggatcgggttggtttgtttctgtagctcttcttccaggtaggccaggaatcctgggctgggaacagagcctgtggcacacccctggagaccaccctctaggccagcatctgctcagtgacgggtcctctctgggctccatgttcagccaggctggctggctgtcctctgtccatggccctatctccccacctccttttctccctcccactttcctccaagttccttcgaagtcacaaactgccatcctcatccgtgaagctgggcctggagggagaggaggtctctctttctcttccctgctgctctgagcagcaggacggactggtgggcagtggtgggaatctggaccttctgtgggtctctttacaagtctgtggtggtctatgctgggaccatcctaggtgctactgggagtagggagaagccaagggtggagttcattctgtgcgtgggggaagcccccgagctctggctgagcacaagctagactctctgcggggaaggaggggtgtagtccctccttcctgcaggagaaggaggagtctggagagtggtccctgtttaacacggggaggagagaggtggggacatgctgggcctggagctgggccagccattttcctagtttggggtgcagtgggggtgagggggctgtctgctgtgacaccaaattagccctggagtgactttctttcccatttcctaagcccagggggccagtgaaacttaggagtgagatcccagcctgaagccactgctgctccacccctttcccttagcaaaggtccctaggacgggctctgccaagcccttttcagggaagaagcagctctgggtctaatgagtgaaggatgggggcagagccctcagcatccagagatgcttctaggacagctgctggctcctggccttgaggtccccttactccagggcctccccagccacctctgggtgctgtccagccccacacaatgcctgtgyctcccctcaacccccctctccaggaagccggtgaacatgaccaaggccaccgtcaactaccgccaggagaagacacacatgatgagcgccgtggaccgcagcttcacagaccagagcaccctgcaggaggacgagcggctgggcctgtccttcatggacacccatggctacagcacccggggtgagtgcccggccctcctaccccttcttcatggctctggggctcccaacctgagacaatagggtccccacatcaggtgagttctgtaacacctgcaaccaaaagtgaagcatctgtggtgctcctgctggataccttctggatatagagccagcacaggtggcrtttttgcattgtgtactagaggagcttgcaaggaattctgctagcaaaagaggaatgcaaggtccattgtgacartcgtcaaggaggaggtgctgctgtaggatcagagggatcagagtggcctcaccccttattgagcacctgttatgtgagaggtggggatacagtggctgagagagaccgatatagagtcagacctgggcttacctctccctttcttagctgtgtgacctggggcaagtcacttaagccctctggatgtctgtttccttgtgtataaaatgggaatgcagattgcctctgctagtagggccgatgtgaagactaaatgagataatgtgtgcaaaatcacttagggctgtgcttgtattcacagaatatagtgagtcagccgttatgtactaggtctgtgtcataacttgcttcatcccacatctttttattctgtttagtgttgatttgtacagaagagaatatgtaatgtttatgaaagtcataaaatcataacaatacaacaaacagcaatgaacctcattggtgaattagaacattatcttggtacacctccctggctatatcccctacctctttcttagatgtaaatattcccttgaaattgttgtgttttttttttttttttgtgagatggagtctcactctatcacccaggctggagtgcagtggcatgatctcggctcactgtaacctctgcctcccaggttcaaacaattttcctgccttaacctcccaagtagctgggattacaggcacctgccaccatacccggctaatttttttgtttttttgagatggagtctcactctgttgcccaggctggagtgcagtggtgtgatcttggctcactgtaacctctgcctccagggttggagcaattctcctggctcagcctcctgagtagctgggattacaggtgtgcgccaccacacccagataatttttgtatttttagtagatggggtttcaccatgttggccaggctggtcttgaactcctgaccttaggtgatccacccaccttggcctcccagagtcttgggattacaggcgtgagccaccgcacctggccagtttttgtatttttagtagagacagggtttcaccatgttagccacgctgttagccacgctggtctcgaactcctgacctcaattgatctgtccgcctcagcctcccaaagtgttgggattactggcgtgagtcactgtgcccagcctcccttgaaatttgtgtttataattttcctacctttttcgggggtagttttttgttttttttttttttgagacggagtctccctctgtcacccaggctggagtgcagtggcgcaatctccgctcactgcaagctccgcctcccgcattcatgccattcttctgcctcagtctccctagtagctgggactacaggcgcccgccactgcgcccggctaattttttgtatttttaatagagacgggatttcaccgtgttagccaggatggtctcgatctcctgacctcgtgatccacctgcctcgacctcccaaagtgctgggattacaggcgtgagccactgcgcccggacttttgggggtagttttaccatgtgtacatatatccccaaacaacgcattgtatagttttgctcattttcatcctttataaaaatgaaatcacacactacttaactccacatcatatttaaatttacccatgtggatgttttgctgcagttcatttactttctctgatgcgtagtttcccattgtatggctgtatcacaattgacttctccattctgccatccatgggcattcgattggtttttagttttcttgttatcacaaatgagactgctgtgaatattctgatgtggatgtctagatgcacctgcacacaaggttctagaaatagaattgctggattatggagtacgtgcatcttcagcttaataagagtgccaagttgctttccaaagcaactctgcctgttttctttcctagcagcagtgtgtaagactttctgttgctctacatcaagatcaaaatttgccagyctttttcacttctgccacattagtttgtataaaatggtaattctctatagtcttaatttgcatttcactgatgactaatgaagttgaacgtattttcaagtcatcaatggccattcaggtctctttttccrtgaaatgcctgttcatgtctttcacctaattttctattgggttttctgttgctttcttagtggtttttaggagttctttatatatttaggataataatcatttgtcacttgtgaattgcaaatatctcctcccaatttgtggcttatcttcctaggttatttatagtgtctttggatgaacagaagatttttatttttgtgtatttaaattcatcagtctttttctttgtgatttctactttttgtgttttttaaagaagttttccctatccaaagttataaaatattttttgctttttttctagaacttataacattttacattttatatttaaatctttatccatctggaattgatttttgtgtgtggtggtataagttaaggattttattttttccatggtgataagccactgtcccagcatcatttattatagttcacgctttccctgctgatttgcagtgccatctttctcgcacaccccatttctacagataagtagatcatttttcagttccctgtttctttcattggttggtttggttgattcctaaccacacggtctaattatcgaggctatttaagtcttgatatctgaaacatgaagctgtgccaactttgtgcttcatcaaggatgtcttggctatttttgttttcattctctctctctgtcttaatgagataggatctagctctgtcacccaggctggagtgcagtggcacaatctgggctcactgcaaccttcgtcttccgggctcaagcgatctcccacctcagcctcccgaggagctgggactacaggggcgcaccaccatgcctggctaatctttgcatttttttttttttggtagagacggggtttcactatgttactccaggctggtctcaaactcctgggctccagtgatctgcccgcctcagcctcccaaagtgttgggattacaggcatgagccatcacgctcggctaattctctttgttataaattttagagtcatctctttaagtttcttgaaaaactttgttggatggttttgtattgaatttatagatcaatttggaagaatcgccatcttatgaaattgtctttccacccatgaaagtgatttatattgccccatttatttaggtcttgaatgtctttcaataattctctccataaaatcttgtacatctttwtttagatagatgtccctaggttctttatttttgacttctattgcaaatggtacacttttcaaatattacatttccatttcttatatagagaaatgcagtttatttttgattgcatattgatcttacattcatacttcttttttttttgtgagacggagtctcactctgtcacccaggctggagtgcagtggcgcaatctcagctcactccaacctctgcctccctggttcaagtgattctcctgcttcagcctcccaagtagctgggaytacagacgtgcgccaccatgcccagctaatttttgtatttttttttagtagagatggggtttcaccatgttgaccaggccagtctcgcactcctgacctcaggtgatccacccaccttggcctctcgaagtgctgagattacaggcatgagccaccgtgcctagccttatatacgtacttctcgatatgctttcttattctcatttctctgtagaatgtttcaggctttctgagcagttaaaggatctgtgaatatcctttgcagaagaaatagttgttttttctttcccacttcttattctttttccccatgtttttttggctgggacctccggtactgtgttgaatagactggttgtagctggaatccttgtcttcttttcctgactttaacaggaatgtttctaacatttaaacacagaatgaagattgctttggggttttggtagaaatgtttttatcaggctaaccaaattccttttagtttttagtttgctgagaggttttaagtgggcattaaacttaccaaatacttttttctgcaattattgtgataattattttttccccttttgtctgctaatgggatgagtgacatttttagatttttaaaaaattaccttaaattcctgggataaattcaacttggtcatgatgattatgatgtttcctttcctttcttttttttttttttttctttttgagatagggtttcaccctgttgcccaggctggactatagtggtgtgatcatggttcactgcaacctcgacctcctgggctcaagtgatcctcctacctcagcctcctgaatagctgggatgacaggtgcccactgtcatgccttgctactttgttttttttttttttgtattttttgtagagacagggttttgtcatgttgtccaggttggtcttgaacccctgggcccaagcgatttacttgtctttgcctctcaaagtgctgggattacaggtgtgagccaccgtgtctggccagattttaaagttctaatttggtatatttaaaggactaaacaactattcaggctttctatttttttaaaaatagaaagttatatttttgataagttatatttgtctaggtatttggccattttatttatgtttttaaactcagtgttatgcacttattaatcatattctccttgtaatctctcttattaaattttcaccattttataccattttaccctgcttagtagctgtttttttttttttttttttgaaacrgggtctcactgtgtcgcccaggctggagtgcagtggtgcaatcctggctcactgcaaccctctgcctcccgggttcaagtgattctcctgcctcagcctccctagtagctgggactacaggcacctgccatcatgcctggctaatttttgtattttttgtagagacggggtttcactatgttggccaggctggtctcgaactcctgacctcaagtgatccacccgtcttggcctcccaaagtgctgagattacaggtgtgagccaccgcacctgcctgcttagtagctgttattaacccttcagcttacaaatcaggaaacagaggcttggagaggggaagtcacttgtccaggttaaayagccagaaagtggcagagtcaggacttaaatgcaagtctttctgaattgcaaatttgtttctactgcatcatgctgcacctcgagggatgggtaggattcagaccgcagagatgggaaggaaagggcatgtgtagaggaggcacygtatgtgcaaatgtgtggtgataggcatgggaggagacagggagaggtgtgactgcactaaatcctccagtgggtgctagagagagcgggagatcagggtggtgtgggctcatgcctaaccgctgagtcttgytgagagacagagagaggcaggaaacatgggctctgctcctgggattcactgatgagttggggagtcaggactgacccagggaagtygggaccaggctaattgctatgtggatagtggggacaatcagtgctgttagttttgagaaaatatgcccttgggcaggagtggtcagcattttggtgagatgggtatggttgactgatggtgaggaggaaggggcactgagcctgggcagaggtgatggttggaaactcaaaaggtgctaggcgcggtggctcacacctgtaatcccagcacttgaggaggcagaggcaggcagattgcttgaggttaggagttcaagaccagcctggctaacgtggtgaaaccccgtctctactaaaaatacaaaaattagccagggatggtggcaggcacctgtaatcccagctacttgggaggctgaggcacaagaattgcttgaacctgggaggcagaggttgcagtgagccgagatcactccactgcactgcactccagcctggcagacagagcaagactctgtctcaaaaaaaaaaagacaaaaaaaaaaaaaccaaaacgtgtccaggagatgagctgagctgtgcctcagcacattctctctctttattcttctctgccctccacttgctggtctgccttccacttccttcttttccaaacagtggaggccaggtttttgtggtttagaatggaaagccatgttgattttggtggatccttctatgcaaattttaaatgaaggacttatcactgtgggtaactggtggcggggctggtgtgaaaaagccagctggaaccttcccaaggtgttggaatgagccctgttgtctctgaaatcctgcctgygaaaaccctcagatcctcctgggccttgtacgtctggagctattgactcctgtgggtgccagtcggtgttggccaaattgtttgtcaaataagtgccaggttttttcatgcccatcaatgccccttaatcagggaagcagagagagcagtggggacagcagggtctcagagtcaggtggattcaagcctgggtttgaatcctagtgcttccatttaatgagcaagtagcttaactcttctgggcctcagttttctcgtttgcacaagaggaacaatgatagtgcccctgccatacggatattctaaggaataaatgacttaagaattgtgctgggcactcaatatgttagatatggctagctcttattacaggctgtgcttctgtaggaaagaaacttacttgctaattgcaaacagtggaggaaaagtttggggtgctaccacattgaataactgggggcctctcctcatctgagggtggtgggaatcagggaaagtgccaccactgagggagggctgaggattttcatttccagaagaagaaactgagacccagagaggtcaaggaacttgagccagaatttgaattcaggtctctctgactccaaacctagtgttcttttttctgggcctcagccctccccataaagcatcagctgtccagtggttactcacagaagatgttccacagtcacgatggtgctaggaagagcctgggagagtcccaaagtggagactttgaaggtgggcctatgggcaaactggtccttaggggtaggggatggggtggggtaggaagtgtgtctcaagtcccacaggggaactcataggcaaggagagtagggacctgtcctctctgggcccaggaattggagggtccttttgggaacatcatcatcccttcctttcctggtggtcttatttgtagaacatcttgtgttattcttaggctcagctgtcagctgcccagatgtggctctggctttccaggcgggactttttgcttgtcctcagccactgtgcactgattgcatgcctccttgtggggctgtgccagggctgccagcctttcaggatctctgggataaactctttgattctctgccaccctcatttgctcctttctctgccaggagagctctctgtggagctgtcggcccactttccacaaagagcacgagggcttctccatctcgccagtttcttctctgagttctttgagccacagaagtccctcttcttgaaactgttgcacttgcctggtggtgcgttacggacactccttggaatcatcttttcaagctgccttttaggtcccagacccaagatcttacagcagagaagcaccaagactcttgtcagccagctgccatggctttctggcactcaggggcttccttcctttcctggaaatgactagtaatgtcaacagttgcccttgcaggtgctcgctgtgtgccaggcacggggctgggtgctttatatacattattatatttaatatttacatcatcatattggattgtaacaatttttaccttcacttgacatgtgagaatggaagtttggagagagtaggtaacatccccacggtcacatacagagctgggaattgatctgaagtctttccagagcccatctctcagtgtctacattgcacagtgttctcctgaggatgtttcatgaaacaaacaagaaaagccctccgtggcaaaagatgtttatgaaacattgctgtttccactcctctcttgaagatttaaaatgcaaacaaacatgccgaaagccccgagaggtcttgcagggaagaaacctgtttgtttttgtttaaaccagaatttcacagactcctttaaaacacagaattcctcttcctcctcttgctcttctttttaatgggacaccacttaatcatcttgcatacctacgattttctgaaacactttggcaaccaccaaattaggccagtcttttctctttggacctcagtttccccatctgtaaaattaagggtttgggcatcccaccacaatggcataactggtacttgatttgccatccagctgtaagcaaccagwaatccagctaaaatataggaatcaattgctttcagacattgaactataggcagctgaagaccgtggttcctgagagcagagaagcaaatgaggtgaagtcatcttcaaaccatggcacaggaaggtggaacccaagcacaatggggcagcctccctgccctggttggagtttgaggaagttgagctcatcagggggtctcctggtgatcctgcattcattctaccagttagttgctgagtaggaattctaggccaggcaccggagagggttcttgccgggagggtcatttcagttgagagttgaaggatgagtatgagttcatcaggcaagaaaagtagggggaggaggagttttggagggagaaggacagcatatgtgaaggcacagggagtgggggcaggttatctaggccccactgacagtcccccactggaccctgccagcttagatctgggcagagattggcttgaaaatgtggggagggctggagttgaataagcccctcacagcctcacccagagcaggaggagggacatgcgtacaatcatgcactgcataatgaagttttggtcaacaatggaccacgtataccatggtggtcctataagattataatggagttgaaaaactcctatgacctagtgacattgtagccatcataatgtcatcgtgcaatgcattattcacttgtttgtggtgaagctggaataaacctactgcattgtcagttgtaaaaaagtctagcacatacaattatgtgcagtacataatagttaatgatgactgtgttactggtttatgtatttaatatactattaatcattattttagagtgtacttattttttaaaaagttaactgtaaaacagcctctggcaggtccttcaggaagtgtcccagaagaaggcaccattttctttctttctttttttattgtactttaagttctagggtacatgtgcacaatgtgcaggtttgttacatatgtatacatgtgccatgttggtgtgctacacccattaacttgtcatttacattaggtatatctcctaatgctatccttcccccctcccctcatcccatgacaggccccggtgtgtgatgttccccgccctgtgtccaagtgttctcattgttcaattcccacctatgagtgagaacatgtgatgtttggttttctgtccttgcaacagtttgctcagaatgatagtttccagcttcatccatgtccctacaaaggacatggactcatccttttttatggctgcatagtattccatagtgtgtatgtgccacattttcttaatccagtctatcactgatggacatttgggttggttccaagtcttagaaggcaacgttttcataggtgatgacggctacgtgtgtgttattgcccctaaagacctcccagtgggacaagatgtggaggtggaagacagcgatactgatgatcctgaccctgtgcaggcctaggctaatgtgtatgtgtgtgtgtgtgtgtgtgtgtgtgtgtgtgtcttartttttaacaaaaaaaatttaaaaaacgaaaaaaaattttaaatagaaaaaagtatagaataaagatagaaaatatttttgtatagctgtactatgtgcatgtcattacaaaagtcaaaaaattcaaattaaaacatttcagtaagctaaggttaatttattattsaagaaggaaaactatttttaaataagtgtattgtagcctaagcatacagtgtttataaagctcacagtagcgtacaggaatgtcctaggccttcatattcacttaccagtcactcagtgactcacccaggacagcttccagtcctgcagcttcattcatggtaaatgccttatacaggtgtatcatttattatgatttttttttcttttttttgagacagagtctcgcactgtcacctgggctggagtgcagtggcgcgatcttggctcactgcaacctctgcctcccaggttcaagtgattctcctgcctcagcctcccaagtagctgggattacaggctcgtgccatcatacccagctaattttttgtatttttagtagagacggggtttcaccatgttggccaggttggtcttgaactcctgacctcatgattcacccacctcggcctcccaaatttctgggattacaggtttgagccaccacacccggcccatttattatttttatagcgtatttttagtgtgcattttctatgttaagatacataaatacttaccattgtgttataattgcctacagtattcagtacaggtttgtagcgtaggagcaataggctatgccgtgcagcccaggtccatggagtaggctctactatctgagtttgtgtaaatacactctgtggtgttcgcacaaagaccaaatcacctaacaatgcatttttcggaatgcatccctgttgttaagcgatgcataagtattaaatgagtgagtgggcgtgcgtgtcccaaggcgggtgtggctattttctcagtcccaggacctgatctccaagaccagagtgggacgtccttgggaatgctgaacagaacagccggggacggggtggtcctgggggctcgggggaggatggtttcccagggtgtgtgaggagctgtggacctctccacccactcccccactggctgcggccccgcacaggctgacggtggaactgcctgcgcaggagaaaggcgcctattcgggtgcctggtgttaatctgcagaggggttggcagcagctgctaatttctgatttgcctgtctttgaatgggggtaattgctgggagttgccagtgttccaggttgttctctggaagagggggaggaagaagcagctgtcatgggctctgcggagygctgccttctgcaggtagcatggtgaagcctcgctggatagagtgaggggataatgaaatctagccaggcagggccgcaagggccctcggaggccacctgatctgaccggctcattctacaggtggaaccgagatttggagggagggaatgtgttcaggaccacacagggtgggcctggctaggctgcttggctccagccaacaacccagctatgcttggcattggctgtgcctccccacccccrtagaccccagtctctccaggacccccgaggctggggcatgtgtgtcaagaacccttttgtctttctctgactgcaggagaccagcgcagcggtgggktcactgaggccagcagcctcctggggggctccccgaggcgtccctgtggccggaagggctccccataycacacggggcagctgcaccctgcggtgcgtgtcgcagaccttctgcagcacatcaaccagatgaagacggccgagggttacggcttcaagcaggagtaygaggtgcacgccggccccgggccagcaggatccctgcagaggcctcryctggctcttactctctgtggactctgaccctggcaaccctcagcctagtcctggttrgacgcctgctctgacagtttccaactcaacctttttgacctcgactctgaccctcatcctaattttagactgatttggtttttcactctcatgctaaccctgatttgaaatctgaccttgaatctcgtctccatctctatgtggactgtgatcgggatccttattctgtccctaaactgaatctgcccactgacactgaccttgacctaatcccagcctgacattgatcctgactgtcatcctaagctccatttgaactctggatctcatcccacctctgtctggactctgacatcrcccttatcctaatctaaatctgacctcacctttaccttctttctaaccgttattctaagcctgacccttattccaaaatgtctttgaaccctgrccctcttttcctcttttctcatttcccttccccccacatgccttggttttgaccctggtccctggctgataaaaggacccacagtgacacagtgactttatctcaggcccaagttcagcttgaatctggcccttatcatcccacccccatcctgcctacatcatccccactgaggggaaggggccctcagtgagggtccctctctcccactgaccaccacttttctttctggtagagcttctttgaaggctgggacgccacaaagaagaaagacaaggtcaagggcagccggcaggagccaatgcctgcctgtgagtcctggggaagggcctggggtccagggcagtgggtgggagggcatcaggagggggaacacagccagggtgagctggggcagcctcagagatgatagtagcattggccaccttttattgagggcctaccacacgtcacgccctgtgcttgtttcatttattcccttcaatttccctgtgaaacgggaaatactataatccctgttttacaaataaggaaactgaggcttgggagattaagattcctgcttaaggtctcagagccagtaattgcctgagcagcatacactcttaggcctccttgactccatagcccaggctctaccccctggtgtgtcctgcctcccatggtgcccagagactactggtaagccctgagactctaggttccctggctgccctgcctgtgccctatccyctagcctccaggaatccctccctgactgcctagctctgggctcsccagttcagcccctgcccacctgctctgtgtttacagatgatcggcaccgagtgaaactgcacccgatgctgggagaccccartgccgactacattaatgccaactacatagatgtgagtgccttgccctgtcatttctgcagacctggccctgcccgctccaggcttactatccaggcagggcagaaacctgtcgggataaatgggggttcaaatggctgagttcggagtgcccctatctctgcagtcagtgccagggagctcagaggagggaggacagtgagcagcagcttctggaaggctttctgtaggtgggagttggcctgagagatgaggtgctttagagaagcaaagcaaagggaagaggcagacagctaggccaagaggtgaggaaggcgggaggcatggagaatgggattctcatcgtgcaccatgaggctgaagaggtaggcaggggctggattgtgaagacctcaaatggcaggctcaggagtgggggctttttcctaggggcaccagggagttgttaaagtgttttgaccatgatcagagtggtcctttaagaataataacrcacatttatccagcacgtactgagtgccaagcactgtgctaagcactttacacccaagatctccttttctgtaatccctccacccaccctttgaggcagttagcaccatgacctcactttacaggtgaggaaaccggggctcagagacgtggagcgacttgtcccaggttgcacagctagtgagtggtaaagaaaggackcaaatctcagcctgtctgtgtctctaaagcctttgctgctgtgaggctgtcctgccccctgctgcagcagcagcaggacttggatggattggagggaggggccagagacagagcaggcagccaggaggcctgggcttgggtgtcaaagagaggtgatgagtctacttcctaggtgtggaagaggggcgaggcgggacagggcccctaatccctacagcaaaccaagtttgggagagcatcatttaatcacgtatgaaatatattttgagcacttcctttgtgccatgcattgtgctgggcaccagggatacagatgtgaacaagacagtcatggcctctgctttccttgaacatatctatttgagtgggtgagacagatagacatgtttacaaatcaaaataacttcagattagatgagcaagtgcaggccaggagagagatcacacagcttgagtgttacacagcaggctagtggcagagccagggctggtgtggcgggctttgtggaggaagcagggcttgagctgcctctgggtggctggagaggagagggaagagtgtcccgggtgaggagctgcctaagcaaaggcctggggggccaggcagagcaaggcacaggtctgggagccgaggtagtcagggtctctggaggtggcctctcctctccctcttcttctcctcctcctggggccagatgtgccatgccatgtttcccagaatcccttgctgcctcccccactcatcctgtcccttggttggagtcagggccaggcccagcctggaagacttgggcagctttggtgacagcgggcctctccttggtcttgccaaggtcccagttggctcctcttgggccctggcagggacatgccactccccactctgtggctcagcccagccvggcctgcccgtctccgctctgcctgccctgctcacatcgcccattctggccactcctgtgctccgtccacctccatctgcccctggcctaatatctgtctcttttgctttgtactgtttcctcactggaatcattaagattcggataaaccgagaagtaagtatctctctccccttctcctcctcctcctcttcctcctgtctgtctgactggctgtatctcagactctctcacggtctctggctgtctgtctctctgtctctgtccttcctttctacttatgtgcccagcaccaaccgtccatttcagcagcctggccaggggctgcccagggctgaagattcgagagtgttcctattgtaagcagttccctcccatcctccactgccttgagcaggggcagcagtgttgggggtgcttcccctgcccattctgcactggtcacaacagtctgtcaccttccttccctggctccgccattcccaaggagtcctccctagcctccctagctgcaccttctacaggaccctttggagggtgcaggggaagctgccctggagggccctgtttctgctgcttaagggtcaagatcttggacagccccaggtcagcctcctaaaactactttccctagtgttcaaataccttcatgatcagtttgcctgaaactcaaccccgaccattttaccctcaatttagccttaatttgaatgttttttggtggaagcagtttggatagtctgtttttaaatattatgcttttttttttttgaggtggagtttcgctcttgttgcccaggctggagcgcagtggcacgatctcggctcactgcaacctctgcctcctgggttcaagtgattctcctgcctcagcctcccaagtagctggaattacaggcatgcaccaccacgcccagctaatttttgtatttttagtagagatggggtttcaccatgttaggctggtctcaaactcctgaccttaggtgatccacctgccttggcctcccaaagtgctgggattacaggcatgagccaccacacctggcccattttttagccttttaaaattaaaaaaactaccctaattcatctagctattctctratttgatttcttttttctttttttttgagacaggttcttgctctggagtgcaggggtgtgatcatggctcactgcagccttgaagtcctatgcacaagcaatccttctacctcagcctcctgagtagctgggactacaggcgtgtgctgccatgcccggctaattttttccttttttttttttttttaagagatggggtcttctcagcactttgggaggccaaggcaggcagattgcttgagtccaggagttcgagatcagcgtgggcaacatagtgagattgtctctacaaaaaatacaaaaattagctgggcgtggtggctcatgcctgtagtcccagctactrgggaggctgaagtgggagggttgcttaagcctgggaggcagaagttgcagtgagtcgagatcgtgccattgcactccagactgaccaacagagccagtccctgtctcaaaaaaaaaaaaaaaaaaaagagagagagagatggggtctcactatgttgcctaggctggggatttttaatacatatatactgttttcataatatttaatgactggtgattatttgctattttgtgggtgctttttccattttgtctcctttttcttttaaaaaatatatttcttggctgggtgcagtggctcacacctgtaatctcagtactttgggaggctgaggcgggaggattgcttgagcccaggagttagaccagcctgggtaacatagtgagaccccatttctacaaacaaaccaacaaacaaaaattagttggatgtagtggcctgtgcctgtagtcccagctacttgggaggttgaggtgggaggattgcttgagcactggaggtcgaggctgcagtggagacagtggcatggagcgacagcaggagggaattgggctagacgtggagaagttccagtgctgagggctgagagtcactgggaggcttttcgtcattagtcactttgactatgttttggtcattttcgtgggaacagtgagcaggtatccagcagaatctctgagtgtttgtcttgctattatcctcatattgcagaggagaacaaaggcttagagaggccaagagcctggctactcaggatgttttgaggccagcaatatggacaccacctgggagctggtgatgcataatcccgggccccaccccagacctttgaatctgaatctgccttttaacaagatcccccgggagatttatgtctcaagaaagactgagaagcaccttctcagcgctcagagttacacagctactgctcggcatagctgtggcagggacccaggtccattcaactccaagactcagattcttcaccccatagtcaatcgccttctgccccagcaattcttgacttccatttgatacacttgattcatttstatcttcaaggatactgcttcagctttaaaatagtagtagtaataataatggctattactgaataagtactgactttgtgctagacacagtggcagacatttaacatactactttatttgctyctcacaacagccctcagaggtaaatgctgtaattattccattttatagacatgaaaatggaggcatagagaaatgaaggagtttttgctcaaaggcacacagctagtgagaggtagagctgggatttgaaccttggcagtctggcccctgggctcctcaggcctgggaagttcacgagaccggaggagttgctgggagctgtgttgagggtgtaaacttgaggtagggggctgggctagttttctcagcgccagccctgcagtactaattcccctttccgcattgcccgcattgatgcccttggtatctggtgaattcttttgctcagaaagatgaggccttgtggcaggacctcatgggtggctgtggccctggggtggcttgtcggagggcaggtttctctcctcagcttgggggctctggggatggaggatgaagtagctcttggcctctctctcgtgggaggtggtactggtaaagtgcttagcacagtacgtgaccataacagggtcattattattgatcttaaagattttaacattttatccaagggccatgagtaatgtctgtgcccatatacttccatcctgaagccctcatctaggccccccaygctctgagtgactgaggagtaagggggaggggtactgtccattctggttatcccaagtgtgggggctaagataactgacaagctctggttatcccacgtgtgggatctgggttgattagagcttctggaaccctgggaacagggcagggccattggggactctgtctccgaacaacagcctggctgaaagcagatgcctctctccactttatgggtrgggggtccctctaggcacataaaggagtcatgtcctccctggggttgcacagcccrggttggattaagcccacgactctggtgtcccagctgtacttctccacttccttggggacctggggggatgcaaagtcatcctgcttaggaggtcctagggatgygagggagcagttccctggtggggtaggggttctgctgctgggaggggagggtagaggaggtgtgggggagtgaggggctactccctggggtctaaccgtgccctctcctcctgttccagggttaccacaggtcaaaccacttcatagccactcaaggtacctggcacttctgcccacatgcgccttcccatgtgcctcccagcgtgctggaatgccctcagcttgcctttctgcctcccctgctgatccgcttgattcctgaatgtctccccaccgtcgccatattctggctccctgcttgttcatctgctcccgattctgctggatctcttggaatctggccaactgcctttgtcccctctttgtgtttgtgtctccctgatgtgctcagtccatctgttgctcctggtctacctgcctgtctccaaagtggtgtctgtaaaagggccagctgggctcaggcctcatgggtgtgggttgggcctctcggtctggtggctgcctggattcttctgtttgcatccctttccacgactgtccatctgtctgtccctcctggacactcatgccattgcccaaccatctggtcctcctccagggtcccattcaggatgagcgggctctttagccaggccctctcctgatgctacccaacctcagggccctacaggcatgcgtcagctgcaagctgggtgttgtgggcagcatgaagcccccgttggggctcaggaggcctcctggcctggggtgtggtgctggatggtgctggatgtgctgacctggggtggagaccttgtctcagggacaggcaccctctgcctgcatccccagggccgaagcctgagatggtctatgacttctggcgtatggtgtggcaggagcactgttccagcatcgtcatgatcaccaagctggtcgaggtgggcagggtaagccgggctgtggggcgagctggggcgcatggcaggccaagggggcagcaaagagcccactgagtcccgtcctgtggggcctctaggtgaaatgctcacggtactggccggaggactcagacacctacggggacatcaagattatgctggtgaagacagagamcctggctgagtatgtcgtgcgcacttttgccctggagcgggtgagtctccccaccgcctgttccctgcagagggtgcctgagcagggattagagcccactcccacttcccccagccctgggagcaggagggtgaggagcgcaccactgcccatcccagcaaggaagctacttggtcactgttggctgggagcactctagaagggcaggaaggtcactgcctttgttggtgcccataggaggaagctgagacaatgaagggggtgacagtatctgccaggtgctggctcctactctgtgctgagcctgttataaatattgtttcagtcctggaaagctccgtgtgattagcccagatacagaaagtgaggctcagagggcttatgccaggcaggagaggccacatagtcagtggctggccagcgagtcctgtccacgatcccatttgatctgctctgtaaagtcctcagaggaaagatagttttttttcctttaaattaagaccctgggagtcaaaatgatatatgtttacacaacaacctggtggcagaggtgagtatttcacagcccaggtttaggcatcaggcagaccattgtccaaatcctgcatgttgttggtttctctaaccttgggaaagtggtttctcctctttgagccttagttttcttgtttgtacaatgggacattaatacctacttcatcagtaaattgatcattgggattagttgagattatacaatgagatgcttactgcagtkcctggcacacagcaggtgtctaatggtgacagatgctgccagggactctgattattattcccattgtctccccagagaggctactctgcccggcacgaggtccgccagttccacttcacagcgtggccagagcatggcgtcccctaccatgccacggggctgctggctttcatccggcgcgtgaaggcctccaccccacctgatgccgggcccattgtcatccactgcaggtgggggcaccgggaatcccaaggagaaaaggggcccttctccctgggaatttgggcttggggtcaggttggttcaggatctgtagtggggaccaggcctgggttctcctgcttagagatggagtgcaggagggaacgacccccaaaggccctgtcccctttggcctttggctctgaggttggcatcttcatgtgccccccaagacctgtgaagccccttgacccaggtgctgaggaggcactggagatagggaggggcctccgggccgctgaggcgccaggcacgattgagttctgcctgctttcagtaagcagctttttgttgcacacctgccgcgtgctaggcctggcctgggggtgggaaggacttcacttctctccaccaaacccagtgggccttgcctaccccttggccttcacaccttctgcagaccctgactggctcccgtgaccccagctgcccctcctctctctgctttctccctggctycacatctttctcttgcttcttaaatggggacccagtacgctgtcctggcctgccctctgtctccccctggagagcgtaacccccaacctttgtggctttgtccatggcytctgtgtctcattgcggttcctctactgtgttcttatcagctccccaaatgccgcatggtagagtcgtcctccctgccctgccacctaaaccagcttctctttgatttctttaggcctctttaagatgccatcttttaaaaacaaaactttattgatatataatacacttaaagcaaagtgcagaaatatgtttaaaaatatgaattttcataaactgagcacacttgtgaaaaaaccagctctactgagattaagaaacagaacattggctgggcacaggggctcatgcctgtaatctcagcactttgggaagccaaggtgggaggatcatttgaggcccaaagttcgagaccagcctgggcaacatagtgagacctcattgctacaaaaataaaaaaattagtgggttgtggtggcacaagcctgtagtmccagctacctgtgaggctgaggtgggaagtttgtttgagtatgggagttccaggttacagtaaactgtaattgcaccactgtactccagcctgggcaacagagcgagactctgcctctaaaaaaaaatttttttttaaagttaagaaaggagcagaacatgaacagttcccagaagcccccttgaacccgtttctggcctgaattcccccatccccagtcccagagaaatcactattctgacttctaaagcgcagttagttgcacatgtttttggacttgtcataaatggaatcatacagcatgtgctctttgctgtttgtcttctttccctgagccttaggtttgtgaggctcgtccacagtggatcatcktccatcaagtgaataaatgacagtgtgtttgtccattctgccatgataggcatttgggttgtttccagtcttaagctattatgagtagtgctgctaaggacattcgatcgtatgtcttttggccaagaaatgtatttctttctgtgtggtatgtacgtaggagtagaactgttatctgtgtgaacgttcagctttaggagatattgctgagcagttttacaagggggttgtgctaagttaagccccaccaggggtatttggggtattcagttgctgtatgtcctcgctagcacgtggatgccactgttttcaaacctgaaatcttgctgtcatctttgtccactctccttccccctcagctctgcacaaccttgcgtgaggacaatgatcttgatgtgcccccagtcaagttagggagacagccacataaacaatgaccatgtagcaggaagagtgttttattgaattaattaatttttttttttttgagacaggatcttgttctgtcatccaggctggagtgcagtggtgtggtcttggttcactgcaacctccatctcccgggttcaagcgattcttctgcctcagcctcctgagtagctggaattacaggcacgtgccaccacacccggctattttttgtattttttggtagagacagggtttcactatgttggccaggctggtctcgaactcctgacctcaagtgatccacccacttcggcctcccagagtgctgggattacaggcctgagccaccgtgcctggccacgaagagtgttttaataaaaacctgcccacgttgctttgggaactcaaaagaatgacatcatcctggaagggtcagggatgctccagtgggtatgtgaatgggtatgagtgtgtgggcttttcaaggatgtgtaggagatttggtggttttcaggaggaaagaacattcttgaattagctcggaggatcatcattcctgttctctcctaatcttaagttgctaggytgagccagtgtcacctttgcattctccccaccctctctcctctccttccctgaggcccatcccatctctgtcctctagcacatttcactagagctcttccatccagcagcctgcgtcctggctccttactcggggaggggcagtcatctctgtgtccgtgtcccctgtatggtgtagacatggccagtgccctcctctcttcttctccttagtcccgggcttcctcccyaaagctctgacctggtctrgggctgctctctctccagcgcgggcaccggccgcacaggttgctatatcgtcctggatgtgatgctggacatggcagagtgtgagggygtcgtggacatttacaactgtgtgaagactctctgctcccggcgtgtcaacatgatccagactgaggtgcggggacctggccctgtccccaccattattacttctaggactggagtttctcgtgaaggatcctggagccggcagagcatgcccaaagggtgtcctgaggctcttgccttccctcagatcatccctgaccttgggccgccaactgcatagggtcatcctgaactgctcccctgtgttctgttgggtggggtcagacaaccggtcctgtagctgacatacctgggattgcatcctcagtggatgtgtgaccgtgagctgtcccccaccwctcagagcactcacagagttgttatagkgggtagggatgaaataggagataaaggggcatgtccatggaggttgtttcaggtaggcttggtccagcctgtagtaacatggttggcctccacctcaggacaccctgcttcaaccttgagcttgcttaagccccatcaccacagatctccagmttctaggcccctcctcggcctcattctcatctcctgttccaggagcagtacatcttcattcatgatgcaatcctggaggcctgcctgtgtggggagaccaccatccctgtcagtgagttcaaggccacctacaaggagatgatccgcattgatcctcagagtaattcctcccagctgcgggaagagttccaggtgggggatgagtgcgtrtgtataggtgtgtgtgtgtgtgtctgtgtgtgtgttggggcatccttaatactgcaggagtcattgagggccaagaagcagggaccagcctgaggccacagctggagggacagagctgagctaccaggaaggactttgggacagcggaagatggggtgcatcaaagcagttaagagcccaggctttgaagtcagataaacccaggttcaaatcctggcttacctagttaagagctgtgagtatccttgaacagttccctttacctctctgagcctcagttttgttacccagagaagagaagtagttaatatgtcccttggggtgtttgtattcattgggattcttttggttgtgagtgatraaaatccagcttttataactgaaaagtctgaggatcgtgcagcttcagttgtagctggatccaggggctcagatgatgatgccaacaggtggtttctgtctgccttggttctgctctcctatttttggcttcattctcagacctgcacctggccgccagcagtgctgggctcccatcatctctattgtctggtgacttaggaaaaaggcgcttgctgctcccagcatccccccaacagtcctagatcagactttcatgttcccatccctggaccagtcacaggttggagaggtggagctcactgattgcccctggctctggtcacatgcccaaggcctggctcttggggcaggaccagcctcaccatatcacatggctgagatgggaaaaggctggttctccagagaagcctgagagcgatcactgggtggcagagacctcagaagtcccctccactccagggttcctgcagtggctcagcaggatggcacgtgctggggacctggcacttctcacaggaggtgcagggttcccggagragggtgtcaggctttggggatcatgatagactgtggttccctgtgagggatctccaagaacaagagaaagaaactgagagcccctgggtctggatgcgtgaggtgtgaaggcatgcgggcggaggagatgccccggagatccaggtgtgattcagtgcccggtgcttaggacttcattctgttcagacagggccgtgaccaaggaacgtgaccccctctccacgtgcctggagtccgcttcttggagggtgtggggtttcaggggttgcctcagtgaaggcactggtcagctagtaaagwtcctcactgtgcccgtgtgtgccgagctcagcccagtgcttgtcatgatctcactttggcctcccagcagccccatgaagtaggcatattacttccctatttcacagtcgaggaaactgaggctgagagatgcagtagcttgtctgaggttatgtgggtggcaaggaggtagactctggtctctagagctctatccaggccctataatggcctagagacagggagtctggctcygtgccctgtacccttctctctggacctcagtttctccatccataaaatgggattagtaactcagtccascctccttcatggggatgtgaggaggcccagcaagccctggacgtaactctctgtccccacccccgctccctgtagacgctgaactckgtcaccccgccgctggacgtggaggagtgcagcatcgccctgttgccccggaaccgygacaagaaccgcagcatggacgtcctgccgcccgaccgctgcctgcccttcctcatctccactgatggggactccaacaactacattaatgcagccctgactgacgtgagagcttggggtggagtgggctctggggctccccttcccagcagcatcagggaaggtccaggggccacgggaacaaagctgaaggctctgttggggggacccctgcccattctggggaacaggcctgtgtgtgaccctcctactcctagggagcttccattcagggcattcaagccagtgccccccacactctgcctcagtggggtctggttgtggagttcaggcagggctgtctccaagattaggcccagcagagcctggggtaggatgagtgattcaggggactttggctggggagacctcgagggtttggggatggaactcgagacctgatgtctggaagcaggggagcttgtcctggggagaatgagctggagtctgctccaggaccaggcctgggacagtgatctctggccccattcttccctgggtgggcatgggccctctgagggctcaggagccttttagaagtctctttccctgcttcaagctcaggggctctgcctcctttactgagggttgcaagcagctcaggagatgggtgctggcattttagtcccctgctaaatggctccaagatgctgctgtctgaggcgggaagggtctaggattattatccctattcctctgccacactggaaccagttcagatatagacacaggagacacacgggtggagatcatatgttatagataaaactggagatggagtttgagatgtgtggccagttggtgggccgctccttcacccctccccgatatagccgtgcaaccgcaggccacccctccccgtcagggactggcctttactggcagggagcaggagcaattgagtgcacactttccaagggtaggctggcctggaaaaagaggaaggagtggagccaagcagcctcgctcatgggaggagtgagtgaaggatgggccagggccaggtgtgtcactgctgcgtctctccacgcggaaatgagggatgccgatggggaaggttctcccacagcggttaagagggagatgggctttttgcggcctgatgcctggccaggaactccttggcaggacagtgcgggggacagcggggtttctttaaagagggtaaccacccagggggcttccgggtgtcagctgaaggggaggggaagagctgccctagccactgatgagagrtgtgaggggcccatcagtcactgtcactcagcttggtggatggaatgtgtgtgcccacatgctcgccgggggacatctggcctgctgaggggtcaggggtcctggaggggtggcatgtagtaccgggaagatctttgaactaaacttaggaagctgtgccctcccgcccagccccctccttggccttggtgtgcccatctgcacattgggggcctggaaaggagactgtctgagggtcctgagctggggctccctggccctgatgggtgggttatcacgtggaaaagttctgagacagccctgtcccctcctgaggtccttgatgcctctgacgtctgaccccagccatgcaggtcctattggcttggagccaggaggccccatttctcagacaggccctgaactcgtcagtgaggggccagctggagtctttgtggtggtcaagtctgcaaggagccctgttgggcacccaggcctgagttttggaatctggctgggcctggccttgaggagttgttaatcakgagccttcagagagtcctggagagagatcgctgggggaccaggggggctctttgtttctctgcactgcaccttgcaggattacaaagggcagatcaatatttggttagggcccaagtcagggtcaaggccagaagaagccagacaaagaccagggtcatgggagcttgtgccagcccctaggtcaggaggaagactgggggacaggagaagagctcggggaagggaggggggacrtggcacagggtggggcagggcaggtcaccaggggaggctgggagctagatctttaatgggagaaggccgggtgccagcccccctggcaggacgagggagcagtgagcagcgtcggggcctgtcactgcctggagagcctggggccccagacccttcacttatggagttggaagggacctagagatttattcaaaatatttattgagcccctacagggttctgggtggagaccataccctagaagctctgctctcctgaaccttgcttttagcaggtggagtgggatagtcaggaaatatacaatgaaatgtcatcaactggaaatttctacaaaaacagccaggcagtgtttaatgtggatttggggtgtgtgtggggctatttttgatgaggtggtgggggagggcttctttgaggaggtgataagtaaagaccagaaggaagtgagggagacagccatatagacatttgggaaatttggcctaggcagccaaaatagcagatgccgaagcgcggaggcagggagtaagctcggccagcctctgccttgagctcagcctcatgcccaagctcccctcgccatacctttggaaacttttgctgtttagttctggggggtcatgggcttggtccccagaggcctgggcccaccctgtcaacccaggcctcagtgtgccaaccaacatcagaaatggcccactggaggcagcctggtcctgtggggcacaaccgtccaactcagggtgggcagtgcgggaagacagcctggggcagaggctcagcccaggccaggggccgggaacagggccctgctgagttccggtttccctgcagagctacacacggagtgcggccttcatcgtgaccctgcacccgctgcagagcaccacgcccgacttctggcggctggtctacgattacgggtgcacctccatcgtcatgctcaaccagctgaaccagtccaactccgcctgggtgaggcctccactggccaggccaatgggccgcctgctcccaggtcctctgtgtattcagggccatggtccccaaagccaaaagttgggtcccagctctgccatctatttattgtgtgatgaatcatacaccttcccagagcctcagtttcttcatctgtaaaacaagggtgtcagatgggagatcactagttgctctttttcttttcttttttttgagacaaggtctcactcttttgcccaggctggagtgcagtggcgcgatcacagctcactaagttgtgcagcctcgacctcttgggcccaagccatccttccacctcagcctatcgagtagctgggactacaggctgcatcaccacagctgtctgatttttttttttttttttttttttcagtagagacaaggtctcactgtgttgcccggactggtctcgaacacctggcctcaagtgatcctcccaccttggtctcccaaagaactgggattataggcatgagccactgcctctggccacagttgctctttattggccccctgctaagccagggactgctttgcactcatggtcttatttagaatctataatgaccttggagggaaggcttcagtgagaaaattaagacccaaagaggttcagtgccttctccagggccacatggctggggaggggcagagctgcgctccccagcctcagctgcctcattccagagcttctgctcttttagtcactccactaaagcgcccatcatgggggcctccgaggtagagtacaattcaagcctcctactttctgactgtttgatctagggtaagttgattgacctcttttgagttttactttccttctctgtaaaatgggggccatcataggacctgttcttgtggggttattgtgaggaccaggtcaggtgtgcataggatatgtggcactgctgtgtctgctgcacagtaggcatgtggtatgtggcagggacaaagatgatgagggtgacagttgtatctgagattggcccagacactggttcagtgacctcagcctgggggcagcccctctgactcccctgtttccctttggagctcccaagaagtacagatacccagccttccagccctgcctgaccatgtgctttaggtctctggaccccttcccaccccagctttctgctgggcccagggggctaggaagatttgctgtaaaatgagtacaacagcttcttaatggcctccttgagaagattgcattaactgggctctttatgagtcaggcactttgtgaaaatgacccaggactacaggataatgggcctcagccctggtgcagcaggaaccatccttgctagggtagaggggagaggcccagagggaggctcacagagatgtagttcactgggcactgatttgctcatctgctcaaccaactttgcccatgaacagctccctgcagtgggcagggaggagacagagggagaagagacacagcccctcccagatctcatggtccaggaggaaacaggtagaaaaactgatagtgacagcacagagggaaaagagctatgaaagagctggcacagggacagagaagtccgggggatcatgtatcggcgatggcttcctggaggaggtagtgtctgagctgagatgtgtgggaagggcagaattaactaggtgaggaggtggaggaagagwgacccgtggagagggagcagcctgtgcagggttctgaacgcacagggttgccaggacctgaggcaaaatgaggaaggtggtgtcctcctgtcctgggctgtggtcagaggggattgatgagcacggtgtctttttgggagaggatgggagtcattttaccgayggagaaactgaggccaagagaaaggaagagcctttcctgggcttcaggcagagctgagactagaaactgaggctcaggatacttagcctggaggatgtgtgtgtgtatttgtacgtgtgtttgtgtgtgtkaggtcatagggctgtacctcctctgtccctccacagtctggagtctgggagggggttgtatttaggaccctgactccatggaggggtcctggggcagaagtgggggtactgaactgtgttgcagcatcagggacaccccacctctgtgagctggtgctgaagggcagaggcagtgagagagaaggctggggggaggttctggggtgggtgggagtgatccaggcctattcctggaagcaggcagcctcatgtaggagcgtgtgaaccggttaaggtgtagctttctagctgcacagcagtaggcrtcagtgcagtttgcaaagggttcatcttggctgatctgaacgtgtcagtgcagaacgcattggggcaggtgggccttgcagcctgtgggcaactggtggtgattgggggagctgctgaaggtgagtctggagtgagtgggtgggccagggttcgtgggagccacagggcaagtgtggagcccttggggtgggcatggctgtggggtgagccccggccaggctctactcagctctcccctctccgtgctyatgcccagccctgcctgcagtactggccagagccaggccggcagcaatatggcctcatggaggtggagtttatgtcgggcacagctgatgaagacttagtggctcgagtcttccgggtgcagaacatctctcgggtgagtggtctgaggagccccagggaaggaccctgggtggtggctggggcagcttttaatgaccctctgtgtcatcaggggcccctgggaccctggtgctcatgtcctccctggctggctgcccctgtccccagttgcaggaggggcacctgctggtgcggcacttccagttcctgcgctggtctgcataccgggacacacctgactccaagaaggccttcttgcacctgctggctgaggtggacaagtggcaggccgagagtggggatgggcgcaccatcgtgcactgcctgtgagtacctgccctgtgggagggcgggtggaggggttggggagccaggggcagaggtccagtctgaaagggtgccagctttggctggactgcaaagctggcaccgaaacccctgggctcttagatggctgtggccaggatgctgcccaaccagccaaggctggccctggaggaatccagtgagtttccaggctatagactcagccctgaacaactgcccagtatcctctgtgtgatgtctgactttgccaatttaattagagtccttggtcagaattttttaccccatgagattgtggcacacttttatgccaatagaattccagtctttgttcatgcatgcacacatgtgactttttccatccatccatccatccacccatccatccatccatccatctgcatgccccattcataagttcatgtattcactcatgtctgggtgcagtcactcctttgctccccactttttcatgctttcagcatttactgagcctttcgagtggcaggctgggcctactggaagctggtgcggagctgagtcagtccgggtctggcccccaggggttttggttctggtgggaaagacccctgagaaggggagtgagggccgcatcagtctgccattccccaggaggcaccccacacgtggagtcacagggaaggagggagaggcacggaggggatggagctctgtgggaggctgtgggtttgacttggggtttgggtacgtttgtgcctgtgtgcccacgwtgccaggtggtgaccagtcttctcagcattcctgttccaccttgctctctgggtacgcgcttgctgctcctccgcccttctttgtcactgtctttgtctctccgggtgtttctcttggagtgtgtctggcctcctttctctcagaatccgcagtctgtttcgccttgagaatatgtcttctgagatgtcttagcctctgatccttcttaacctggtcctgctcctccctctgggttccctagccccgccccttacctctgggtcctctgccccgcccttctgagttccctagttctgcccctcaccttgggctctttggccctccttagtttcctagcyccgcccctcacctctggackctttggcccctcctttctgggtttcctagctctgcccctcatctctgggctctttggcctcttccttctgggttccctagctccgcccctctcctctaggctctcgggcccctcctttctgtgttctctaactccgcccctcacctctgggctctctgccccacccttctagattccctagctccgtccctctcctctaggctctctgcccctccctcgtggttccctggcccttttcttaccttcaggttccaaggccccgcccctcagcttttgcatctctcattcagaaacgggggaggacgcagcggcaccttctgcgcctgcgccacggtcctggagatgatccgctgccacaacttggtggacgttttctttgctgccaaaaccctccggaactacaaacccaacatggtggagaccatggtgaggggctgtgtcccgtgcccagccacttccaccttcctggtccatgccaggccaggttccttagcacccactctcccatatctgggccccaccactgggccttggttctagccctgtggtcctaaaacattacccccatttctcccttctcccygagggcgggcctgggctcgggctcgtgcttgccctctcactccccgttcccctccccccacaatactggagtnggggtcaggctcatgattccctccctctcttcctctccccaggatcagtaccacttttgctacgatgtggccctggagtacttggaggggctggagtcaagatagcggggccctggcctggggcacccactgcacactcagggccagacccaccatcctggactggcgaggaagatcagtgcctcctgctctgcccaaacacactcccatggggcaagcactggagtggatgctgggctatcttgctcccccttccacygtgggcagggcctttcgcttgtcccatgggcgggtggtgggccaaggaggagcttagcaagtctgcagcccagccccacctccatagggtcctgcaggcctgtgctgagaggcctggtgctgcctggcagagtgacaaaggctcaggacggctggctctgggggactcaggccaagccccttggcaccatcctggcttttggcagggatgagtgaggccctgcagagagcatcccaggccaaggttcccactcagcctgccccctctgcatgtgggtagaggatgtactgggacttggcatttaggattccatctggcccagcccctgaaggtcctggggaagcaggwctcaattctgaatagccagtggggcacactgactgtcctccccaggggaactgcagcgccctcctccccactgccccctgcagcccctgagatattttgctcactatccctccccacttgcttccctgatatgtgctctgagcttccctgaaccaggatctgcctattactgctgtgccccatggggggctccttccctgcctgacccactgttgcagaatgaagtcacctcgcccccctcttcctttaatcttcaggcctcactggcctgtcctgctcagcttgggccagtgacaatctgcaaggctgaacaacagcccctggggttgaggcccctgtggctcctggtcaggctgcccgttgtggggaggggcagtgttagagcagggctggtcataccctctggagttcagaggaagaggtaggaccagtgcttttttgtttcttttgttatttttggttgggtgggtgggaaggtctctttaaaatggggcaggccacacccccattccgtgcctcaatttccccatctgtaaactgtagatatgactactgacctacctcgcagggggctgtggggaggcataagctgatgtttgtaaagcgctttgtaaataaacgtgctctctgaatgccacagagcagccctgtgtgtgtctcaccagcctgacggggcctgctcacctgcccccagcctccagtgcagtgggagggccctggagaagcctgggttctgatctggtcctggtttttccattcgtaaaatggtgggagtgtggaccaggacatcactcagggtccttccactttcagagttggttccaagggaccctggccattgctgtccccatccaggcctctgaagcagttcctcaggtagggtatatcaactcgagatccctgagggccacagagctgcctctcactccactgggggccctggatcaggttcagctctttctggggcagcatgggaggctcaggctttggtgtcaggcagatgggcccagcagctgcgagaccctgggcaagttagtgccctctctggggcctactttatcatctgtaaagtggggacagtcctgtttggatcagatgaggtaatgattaagtgccttatgtagtgccaagcgtgttgaaagggcttactttacaaacatcgcagagatgggggcagaggagacacagccctgctggggatgaccgtcccattgccccagcccagcccattcccagccccagccgcctccatggggtagagagggaggaggagcaggctggctggtagggacctgggtcactcctgactctgtcacaggcttgctgcctgaccttggacaagacaattcctgtttctggaactcagtttcttcatatgaaggctgactctatgatgtactcattctgtttgcacactggctgaccctctgtgcctcagtttctccagtggtcagaggatacaacccattctaatgacctcacaattcagcatactttaatctgagttaaaaattaaytggccagttaggatcacacttggatagggcacagactgaccccctcatcctcattctgagctgacctctgagccttacgcgatgcatcacaaatgtgtgtcacgggtactggccaagcgatagaatatgacttgctttggccaatagcatgggcagaagtgatggcgtgtgagttctggatcccaggtctcatgaggccttgcagtttttgcttttgctcttctggaactctgctatacaagggaagctgtctcacctaccggatgatttgagggcacacagaggagaaccagcgcgtgccatgaacagtcagtagcaactcccaggctgtgagtgaggctgtcttgaaccttccagtctagctgacctgtcaggtaagtgtagccacatggctaagcttagaagacactgcccaaccaacccctagaactgggagagatgataaatggtttttttttttgaagacagtctgttgaaatcacttgttacatacacagttagtttttgctaactgatacacacgcgtgcggagcagtctggatgcggctcggccctttgctctgttcggtgctggctcctcaagggcagggagtatttctgtgccatcttgtgtccattgcccagtaaggggcttgtcatggagctagtgccctggaaatgttggcacgagggagggaaggaaggagaggttggacttgcctgcccgactgaccaggggccttgtgtggcctctcagagaagctggggaggtgggctctgtattaggaggagcaccagctccagaacccatagtcccgcccccagctccacaacccacagtcgggtgaccttgcacaatcccctaacaaccctgcaataaacataacaggacctacctgcaggattggttgtgaggtctagggacaaaatatttaaaaggaaccagcatactccctggtgacataattgaccctcaataaagggcatctcacgccataatactgaagcccctggataatgaaaatggtgacgatcacctttcatctagtgcctattcctgtgttatgtgtcctacaccctttggctcttccttactccatacagcagctctttaaaggggggattcctacccctccattttagagacaagacatggaggctcagggaagtgagtttactcacccaaggtcacctggccactatatggcagagcagggacttgaacccatgtttaggctgactccaacacctgggcctttaactgctctgctctgtggcctccctggcccaaaagcctaaggatcccctcggtgtaataccagatggggaatttgtggcctaagcactgcttttcaaatgctgtgaaatgtgtcagaggtggcggcctctcagacaaggtggcggcctctcagacaaggtggccaggagcacaggaagatgaatggtccagccgggttctgtccagggcctctggctgagcaagtgtgggtagaaacctccacccacccaggccccagcaaataagatttctacaagtgcagctaggccagctgcctgttactgccagaagctaagttgtttctttataccataataaatctggctgtaggagtcagcgaaagcaatgattacttcacacaacctctctcagcccctgattgagatgcattatatatcccaggcacccaggagatggagccgtgacattgatggatgccaaggccacttgcaaggccctcattgggagcagggcctggccaatctctctccctgggctccatggacctccccctgccccggtgacctctgatggacaggagcttaatgagctttggcctcaacatccccatggctaagggcagtgcagaaataatggagtcattgcataggcaggatcaacaggttcaagtcaggcaatgaatggccagcaggtagaggatgagggctttggacgtggggatgtaagaaagcaaagctttattcggcactgaaatgcacattgctcagtgctctctgtagactgtcatatgtcagtctccagttccacctgtgaggtaggtactatgatcatcgccattttacagatgaggagactgaggcttagagagcttaagcaacttgccccaggtcagagagccaacaaggtcacacaaacaacagcaaccagtgtgatcgtttgaaaaaacaggccagatcccatcactcacctgctcaaaccctccagtgcctcctgctgctgtgtgcatgagcactgtgctcctgaccatgacctctgaggcccacctgtcctggctctaccctgtctgtccacgtccctcctgcacgctcctgcgcactccaggctcttcttcccccatcattctgagctctttgcatggacacccttctccggtcctgcatacctggctcttgcctggtgtccagttcccagatcagatgtccccttcctgagatgccctccctgaatgccctgagtggccctccagcacccactgtccctgtgtctttcagggcccatcctgtgtctgtgccttgctgctttctcacagtgggtgatgagcttgttcattcactgggtatttcttctcaccagactgagcagcgagaggccagggccatgtaggtcttgtcctcctgtgtctgttgcactgggcatggtgcctggcacatgacaagaactcaacgagtatttgttgaatgaatgaaagttgcagagctgggactggagctcaggtctgtctggctccaaagcctatactcttaagcacataatttttagtccttggatgaccacatggcttgaagtcatgaggctgggttccaatgctggctcagctaccaccatgctgtgtggcattgagcaaacatctggggctcagtctcctgatttgtccatgaggaggcagagctaggtgctttctaggagctcattctaagtaggacagcatcaggttcaacatccctcagacaatggggctgacattgctcagtggggtccaggccattggcctaagcatcgggtgtctgaggctggtggctttacactgactttagtctgatgggcctgcacccccaccctggctggtcctggtgatcacaatagtgactgctgtgcattgtccctaatacagactgttcctaatctccccagcatcctgagaggtgggtatcaccaagcccatttagcaggcaagaaagctgaagctcagagaaatgagggcagagctctcaatgtcacagctagaaaagattcagtctctggactagaacttgggactgactccaaagccggtgctcatgcaaacaacagccagtctatgcctgcaccacaccagctgcttgaggctgctctcaaccctcagccaggctgctctcccaaccctgccctagctgggctcatctccactgtgcctcaccatcaacagcctctccaggtccagggccggcttgaaacactgcctgatcatcctagtctgctgcattctcaccgtgagggtggcctgagtcagcgggagcgcaggagctgagaacgcctttcaagaaaaaggaaactcgtctaagctcacctcctactctctccctgggatgggaagagggaccctgaccagaaatgtcattttctgctcatttcaaagtgaataatgtggctgtcttgggctgtgtttaatctcttaatgcatccctgtttgaagagcaatgggctcaacatccctcagagacaatggggctggcattgctcattagtgcccaggccactggcctaagcatctgctttctgagcctgatgaaatcttgggtgtagtctgagctttggtctgatggacctctgtacctactttggcaggtccttgcattatacctaatgtggacattgtccctaatcttcccagaaatcctgagagacagatgttaccaaaacaatttgatatatgaggaaagaggctcagagagctgaggtgaattgcttaaggctacacagctagaaaagagccaagacagaattaaaagccatgtcacttgactccaaaccattgctcttataatcattggagaaatactggcagatctaaacctgaaccacattaactgctggaagtttctcttgtccgtgaaccagtctgccctttcaacactcactcaagctaggctcagccacagccacaaacaggcttagctgaggcccacagtcaaacagggctcagggctgggcatctagtaggcctgcagcaaaagccagtgactggacaattgaatgtcttgaatctgcagagggtggaggtggcctgagtcagcaggagctgagaaagccttttgaagaaaaaygaaatgtatctcaacccactccctacttactcccagaagtgggaagagggaacctgtccaggaattttattttctattcttttgaaagtggaacaatgtggctttcttgagctgtgtttattctgtgactgcattctctctttgaagagggctgggattgctccccagggctccagcccatgcatgctcctttccctacaaaaggcatagcaactcttccccttctagcctcttccccaatcaaccctttgctcccttccatgtctgcctctctcgcccatgacagttcttaatttattgtctctgagctccaaatacatccttcgttgccctgctttgtaatactggagctggaccctgtgaacagttctcttgtgccagctagagcaatgttaggctttgtcaggagagggcgctagagggacactgtaaggtccctctgcagcgggaaggcacttcccttccaggttctggtcctccttccatctttttgtttccagcacaggagccaaggcccagtgctatcatctcagtggcctgtgtggaccagctccaaacgtcttttctgtataacaggaaagaaccatcaggcttcactctctccacctggacatcgattctatagaccagccctactcacacttgacaccagcctgaacccatgtgggatcaggttcccacaaagacggccatgtccacagactgagccagcttactttccctggcaggtttcttagccactggaggctgcatgttctcatggtcatcactcactcatagaggaggtctgagtcagggggaacaccttctcctgagg

SEQ ID NO: 94112 - DNA, 96239 bp, Homo sapiens
  misc_feature (1)...(96239): n = A,T,C or G
cctaaggtacgaaacgcaaaagatgcaaaagggtgtacaataaatattcacctccatcatctctgtcctcaagccaacaacttttcttgcctagaggatatttctacatatataagcatatgggaattttctttctcctatttttacataaatgatgaaataataatcatggttttttattttgcttttttcactcatcagtgtgttttatgagtacatattgctctgtctcattcttttttaatgactgcatagtaattcattgtttttctgcatgtacttttttttattttgagacagagttttgctcttgctgcccaggctggggtgcaatggcgtgacctcagctcactgcaacctttacctcccaggttcaagcaattctcctgcctcagcctcccaagtagctgggattacaggcatatgccaccacgcccagctaattttgtatttttactagagatggggtttctccatgttggtcaggatagtctcgaactcccaacatcaggtgagtcgcctgcctcggactcccaaagtgctgggattacaggcgtgagccaccacacccggcctgcatgtacattatttaattagtttctttaatcagtttgctatttccaacaatgctataataaatttccttaatcatatatcatttcaaacatctttgggtatatctgtaggtgaattccaagaaattcttttgctaggtcaaagagtttgtggatttgcaattttgataaatattgtaaaagtactatgcagaatggttgtgccaatttttacttgcaacagtaaagtgtgataatattcccacacccctcactaattacagtgtgctaaactttatgttatctgctaatatgataggtgaagtatggtgtattattattgtatttctcttatttggtgtgagattaagtatgttttatatttgcttactttttctattctgtgaattcctcatattctttgaccattttctctttcattacagatcttttttcttatcggtttatagttctttatatattaaggaaagtagcccttcatctgtgataagagttgcaaaattattccgtctgctgtttgactttctctatgtgtatgttttgctgtgcagattttaaaactttttcatgtagttgaagctatccttccttttttttccattatagcttctgagtattgtgttatacttagagaagctttctctggctgggcacagtggctcatgcctgtaatcccagcactttcggaggccaaggcgggtagatcagtttaggtcaggagttcgagacagcttggccaacatggtgaaactgagaggtgacagcgtgctggcagtcctcacagccctcgctcgctctcggcgcctcttctgcctgggctcccagtttggcggcacttgaggagcccttcagcccaccgctgcactgtgggagcccctttctaggctggccaaggccggagctggctccctcagcttgcagggaggtgtggagggagaggtgcgagcgggaaccggggctgcgcgcggcgcttgcgggccagctggagttccgggtgggcgtaggcttggtgggcctcgcactcggagcagccggccggccctgccggcccggggcaatgaggggcttagcacccgggccagcggctgcggagggtgtactgggtcccccagcagtgccggcccaccggcgctgcgctggatttctcgccgggccttggctgcctccccgcggggcagggctcgggacctgcagcccgccatgcctgagcctccccccgctccgtgggctcttgtgcggcccgagccttcccgatgagcgccgccccctgctccacagcgcccagtcccatcgaccacccaagggctgaggagtgcgggcgcacggcgcgggactggcaggcagctccacctgcagccccagtgccggacccactgggtgaagccacctggactcctgagtctggtggggacgtggagaacctttacgtctagctcagggattgtaaatacaccaaggtttgtaaacacaccaatcagcaccctgtgtctagctcagggtttgtgaatgcaccaattgacactctgtatctagctgctctggtgggggcttggagaacctttgtgtggatactccgtatctagctaatctaggctaatctccacgtctccaggctggggacgtggagaacctttgtgtctagctcagggattgtaaacgcaccaatcagtgccctgtcaaaacagaccactgggctctaccaatcagcaggatgtgggtggggccagataagagaataaaagcaggctgcccagagcgagtagtgccaacccgctcgggtctgcttccacactgtggaagctttgttctttcgctctttgcaataaatcctgcggctgctcactctttgggtccacattgcctttatgagctgtaacactgcaaaggtctgcagcttcactcctgcctgagctagtgagaccaggaacccaccagaaggaaaaaactccgaacacatccaaacatcagaaggaacaaactccagacgcgccaccttaagagctgtaacactcaccgggaggatctgcgaaatcattcttgaagtcagtgagaccaagaacccaccaattccagacacaaaacctcgtctctactaaaaatacaaaaaatgagctaggtgcagtagtggatgcctgtaattctagctattcgggaggctgagccatgagaatcatttgaacttgggaggtggaggttgcagtgagccgagatcatgccattgcactctagcctgggcaacagagagagacttcgtctcaaaaaaaaaaaaaaaaaaaaaaaaaaaaaaaaaaaaaaaaaaaatttttttggtttaaaaaccccccaagggggttttaaaannnnnnnnnnnnnnnnnnnncagggatccagcttttttttccgagggctaatcactggtcccaatcacttcttgaattactgagttttaaaatctagaatgaacgtcagattttgtcaatgacctattaagcctctgtgaatataagtttttctcttttaaactcttaatattcattttattaattgatttcttaatagtgaatcatccttatacttctggaataaaccttgcttatttacagtgtgttattcttttcacatgctacaggatacttcagttattttttttgcttcttttttggagacattctctcactctgttacccaggctggagtatagtggcatgataagagctcattgcagcttcaaactcctgggctcaagtgatcctgcctcagtctcccgagtagctgggactacaagtgtgcatcattacgcccagtttttttaaaaaaatgtttgtgcagatgcgggtctcactatattgcccaggctggtctcaaactcctaggcttaagcagtttgggaggcccacctcggcctcccaaagtgatggcgtgtccgaaattggtgggttcttggtctcactgacttcaagaatgaagctgcacaccctcgcggtgagtgttacagctcttaaggcggcgcgtctggagtctgtcccttctgatgttcagatgtgttcggagtttcttccttctggtgggttcgtggtctcactggctcaggagtgaagctgcagaccttcgcggtgagtgttacagctcttaaggcagcgtgtccggagttgttcgttcctcccggtgggctcgtggtctcgctgggctcaggagtgaagctgcagatcttcgtgataagtgttacagctcataaaagcagcgtggacccaaagagtgagcagtagcaagatttattgcaaagagcgaaagaacaaagcttccacagcgtggaatgggacccgagcaggttgccaatgctggtttgggcagcctgcttttattctcttatctggccccacccacatcctgctgattggtagagcccagtggcctgttttgtcagggtgctgattggtgcgtttacaatccctgagctagatacaaaggttctccacgtccccatcagattagttagatacagagtttcgacacacaggttctccaaggccccaccagagcagctagatacagagtgtcgattggtgcattcacaaaccttgagctaaacacagggtgctgactggtgtatttacaatccctgagctagatataaagactctccacgtccccaccagactcaggagcccagctggcttcacctagtggatcccgcaccggggctgcaggtggagctgcctgccagtcctgcgccgccgtgcgctcgcattcctcagctcttgggcggtcgatgggactgggcgccgtggagcagggggtggcgctcatcggggaggcttgggccgcacaggagcccatggagtgggtgggaggttcaggcatggcgggctgcaggtcccgagccctgccccgtgggaaggcagccaaggcccggcgagaaatcgagcgcagcgccggtgggccagcactgctgggggactcagtacaccctccgcagccactggcccgggtgctaagtcccccattgcccggggtcagcagggctggctggctgttctgagtgcggggcccaccaagcccacgcccacccggaactccagctggcccgcaagtgccgcacacagccccagttcccgctcgtgtctctccctccacacctccctgcaagctgagggagtgggctccggccttggccagcccagaaaggggctcccacagtgcagtgggggactgaagggctcctcaaatgccaccaaagtgggagcccaggcaggggaggtgccgagagcaagcgagggttctgaggactgccagcacgctgtcacatctcaatggggggttacaagacatgagccacagcacccagcgtagttaatattttatttagaatttttccactgatacttacatgtgaaattggtctgtcgtgtgtgtgtgcgtgatatctttgttgattttggtatcaaagttatgtttactttttaaaaagagtttggaagacttccatcttttttgtgctctgggacagaattaatagcatttgagtcaattactcatttgtgtggaattttcttgcaagacatggagggcttttgtaacttttaggggtgaaggtgaaggtgaaagtgggccatggtggtagcaaggatagttctttgataaacttctctattttttctgtggtaacggtttgcttaaattttgtctcttccaggatctattttgataaattgtattttcttgtaacatcatccatttcatccagagttttaagttcacttgaagttaagcaaaattagcatcttacaaatctataatttgtttcctgtgtctgtgattttcccctgcttgttttttaaatcatgtcaaatgtgcatttttctctatttctgattagataactattttattttttgtgaacctgtgggtttattagtcctttgacactggtttcctgaattcatttatttattcctttatcttccctaatttctccctcctgctttcctcatgaagcatctacatgtagtgtttacagtttctttattctctagatgttcctcagtttgctctttgacttcctctttttcccaatagtcagttagaatacctgttttaagctcaggtggtttaaagattttcactttagcttatttattttttcatccctgagagcactagagaattgtgtatcctgctgtccatccgcatttggcttcttccccagggttcttctcccagaaggtgacgagagcgaagaaaccccacgggatgcaggaagaaacagtgacaggcaaccaagagggggaggatggagaaaacccttgccttagtcagagcaggccccaggggacgcagaaacaaaggccacacccccacgagcacgtggccagactgcccaatcgtcgctactgaagccgggctctggtctttgattggtgttcgtggagacgccctcacattcttggatcagcccaaaggtaggctcaggctccgacggtggccsgcgggggtcacgaggcttcgtagtggaggaacgggtttggcgtgtgrgacgcagctgcctctgtactggggagtmacggagtggccgggctccagggacatggcggcggcctctgcggtgtcggtgctgctggtggcggcggagaggaaccggtggcatcgtctcccgagcctgctcctgccgccgaggtgggtggaggggccatggctcagtgggcagaggcgggagcraggggtgcacggacccgcgtgagcggtgggaggtgcggcrgaacccagggtcggtgtggggaggacggtaggaaaaccccaggcactttcggaggggttctgccggcagtcacggcgtcgggaggaagacatccccaccagcccttccctttctccccgcttccgcacatccacgcttcagcgcgcctttggcttctgtttttccatttctgaggactgggcccgccatcctccaggctcccctcgccgtcgctgcagctcgtagccgtttacatcgggctttcgcagcaccccttaggtgggagcgttgttataatccggttccggggaagcccaaagggatcaacgacttcctcaacgaaacacagctagtaagaaatggggccgggatgccctcaaagccatttttcagttcagctgtgccccatcaggtgtccagttcagagaaagactcctggagttccttctcattgttagaagagtgaagttgtcaagaagagcaaatgtaccttccacagagctgggaaattattttgtcaaaaactcttgtacccaagtttgaacaacgctatcagatgactcagtctagctcacctgactccagctctgtttcaaattttgagctctaagctttggtggcaataactctggcagtgaaaaaaccctcaggcttgtagatagctttgcttctttgtcttcttttgcttcatcgttatcatccttcatcattctggaaagattgacagtttagtgttcaagggcacagactctgcagtcaaggctgaggtcttagttagctactcactaggtgtgtgactttgggtaagttacttaatatttcttctttaatttcctcaccttggagatgatacgagtaccttgggttgtgaaaactaaatgaattaattcatggaatgaggtttaagcacaatctggtacataagatcagtctataaatgcaaactcaaccatttatatgaacgtttgcttgcttttattttccagaaatattgtagatgccctttttagttacttaattgtaggagtgccccagagaaacataagaaagttgttggaagttggcggggcgcggtagctcacgcctgtaatcgcagcactttgggacgccgaggcgggcagatcacgaggtcaggagatcgagaccaacytggataacacggtgaaaccccgtctgtactaaaaaatacaaaaaatttagccgggcgtggtgacacgcgcctatagtcccgcctgttagtcccagctactcgggaggctgaggcaggagaatggtgtgaacccaggaggcggagcttgcagtgagctaagatcacgccactgcactccagcctgggcgacagagtaagactccgtctcaaataaaaaataaaaaaataaaaaaaaaagttggtgtaagtaatgttaatgttcttcttgttcttctggtttttcttttcttaggcctccagggctcttcaggatagtaccatagacccatttcctgtcttccctttcaaagcttagctattgtctaaagaactrtcctcaagtatgtcactctggagagtgttagagttgttaatggcttatagaagtaaaactctttgccaggagacttggttcatgcctgtattttcagcagtttctcagcactgtgggatccaaggtgggaggattgcttgagttcaagagttcaagaccagcctgggcaacacagtgaggcttcatctctacaaaacattaaaaaattagccaggcgtagtggcacacacttgtagtcacagctacttgggaggatgaggagggcgaggacggcctgagtccaggggttccaggccgtagtgagccatgatcacaccactgtactccatcctgggtgacatcccatctcaaataaaacaaaaacaaaaaaatcttaacagcacagatagtttacattatttttatgttatgaatctttagtagctcacagaaaataatctctggtggcagaattatagacatgacmataagctggtatagagctaccttgaatcagggaagcagcttctttttttttttttgagacggagtctcgctctgtcgcccaggccggactgcggactgcagtggcgcaatctcggctcactgcaagctccggggaagcagcttcttaatcttgtttaagccattgcttttaagttgcagcttagataattgtgaaaaatggaatagatgatcagaacattgttgggatagtggattacagttaagtgggatctctgtctctttctscctctttttccctctctcccttcttctgtcttcactagaagattgcaaaagaaagctttaggtcaacagtagccttgaaaccgaatcagtcttaagctagctttaccaacaagcaaccatttaatagatacatctgcccagaataggccttgaaacttatcagaagcctatctgaagaatgtaaagggaagacgatgctatgagctagaaaatacctcataaagatcaggaaagatgatccccctccttcaggatcaagaaggtaacatcagctgaaatggaaaggtgtgggaaagcagcagcctcgtgaggaagctagctcacggaactctcctgccaaagctgtgggtcttcccagcagctcctcatggatggcagcatctgagtgtgcattgtagggcaatgagtgtatagacgcatatagatgtgtagatgtctactgcatctccgctccagtgaaatactagtcctgctcaactacatagtcatatacataatatgtatatactactgcctagttacatagtttctaatgcacacgctgtgcttttatcttgtgctttgtgaataatctaaaatggttagttagtcctttataaccacatcttccaggtatagacaaaaagataggtggaattgcttctgtaatttgtttgtttccctgcatatgctttttatttatttatttatttwtttttttgagatggagtctcactctgtcacccaggctggaatgtagtggcacgatcttggctcactgcaacctccacctcccaagttcaagtgatactcctgcctcagcctcccaagtagctgagattacaggtgcgcaccaccacacctggctaatttttgtattgttagtagagatggggtttcaccatgttggccaggctggtctcgaactcctgacctcaggtaatccccccacctcagcctctcaaattgctaggattacaggcgtgagccacygcacccagcccacttatcctctttagctgaaacttaatagacgttatacttttttgttcctaaagtgaatctggcctgttttctgtcagctcttggttactttattttatacacaggtatcacgaaacttaaaaattgttgagacttctacctcattaaaatacctcaagtcattttgtctccccatttctccatttttttaaatacaaggacttggaatagaattgtatagtacttttaaatctgagaggtaccttcaagatcacctcttatagtctcatctcgtgtgtgagaacactgaagcccaagctattaaatcttgcatcctcaactgggatgataccaccgctaaagggtggaaattgattcttaggagagccaggaaatcttagattttgtcatggtttacggctttccaaagctcaaccttaccccacccttcctacaaggaataaaatcttttaaaagttttctcattaggagagtaataatgaaaaaaaagttggagaaacactgatgtaaagtgactcgaccctgggcaagctggtcattggagggactcggatgagaatgcagcttttctggtcccacagccaacattctttctgttgcccctgtttaacttccgtttatttctctggtcttactttttaaacatgtctcatgtttaaacttgattggtatttttcaaactgtagattgaccagcatattttaataaaataggatacaactgaaagaaccaaaagagttttgttctttttgtttttgtttttttttttgagacggagtctcgctctgtcacccaggctggagtgcagtggcccagtctcggctcactgcaagctctgcctcctgggttcacgccattctcctgcctcagcctcccgagtagctgggactacaggtgcccgccatgacgcccggctaattttttgtgttttcagtagagacagggtttcaccgtgttagccaggatggcctcaatctcctgacctcatgatctgcttgcctcggcttcccaaagtgctgggattacaggtgtgagccaccgtgcctggccagggcagaatgagtcatttttaacaaaacatctgttttcattaagtgtgtgtcctgggtagtttgtattgtgagttgtagccaaaaaggtttcaaaaaagctaaactagatgatgttggtataccttggttgtttaatcatctctgactgtggtcttatgccagcctcaggaacaagcaggctaggtgactcattcaaggacaggtagtacgagggaaaacagccagaactctaactcttgagttctagattagttttctacccactaagaaagtcttactaaagcactgttagttggcttaaggtttcatgttttaagaaactgaaattcttttgaaagaacaattgtgttgcctattctgtttaattgtaattccttttggatttatgttataggacatgggtgtggaggcaaagaaccatgaagtacacaacagccacaggtactgacagactttgttgttctatttgattttgcttcagactggaagtgtttaagaaagggaaatgtttaatcccttaatatatgcataatagaattagttatcataaattttggattttcacgataattttctaggaagtgttaagtcatggttttcacctcttttgtatcaaatctctcttgctgttaagtctaaaatacagagggcagccgggcgcagtggctcatgcctgtatcccagcactttgggaggctgaggtgggtggatcacctgaggtcaggagttcgagaccagcctggacaacatggcaaaaccctgtgtctactaaaaaatacaaaaattagctgggcgtggtggcgggtgcctgtaatcccagatgcttgggaggctgaggcaggagaattgcttgaacccaggaggcgcaggttgcaatgagccaagatctcgccactgcactccagcctgggcgacagagcaagacttcgtctcaaaaaaaaaaaaaaaaaagtaaaaataaataaataaaatacagagggcaataatggagaacattttatattcgtttgttctttctgtccatttgaccctcttagtgtattggattggaaaatcataactacgatggtctaaagcagttctttgaaaaagctattttaagtagcaaaacctttttttccaaataaaatttaacatggaattcccaactatgaaacatataaaagtgtaataaagtataacttctagctgattggatatagccctctacctactgtgctctccttcccctgcccacactcatacatatgtcatccatcagcccctgtgacaactcttgggctccatagagccccatcgaaaaacacttttaaattaggtgcaacctttttttttttaaaaggagaaataactttattatgttgagcctatggattctattgaagaaataactttattatgaactgtcaaagaacatttatttcacgtgtgatattagaagtacattttatatatgcagtagcttgtcattatggtgccatgccagtagactggtacaagagtcacttgtgttgcaagagaaccacacacacctatgtacatagggatagaggcagaggagcagagtgactgaaagcttaaattctggagtgacgcagatctaggttgaagtcccagattgtttctttagctgtgtaattttgggaaaataatagctctttcagcattagtttcttcatctttaaaattgagataacaatgatagtatctatttcattaggattattgtgaaaatttaagtcgatgttgagtctttagcacaggacctgaggcacagaaagtgcttattaaagattagttagtattggccgggtgtggtggctcacacctgtaatcccagcacttcgggaggccaaggcaggtggatcacctgaggtcaggagttcgagaccagcctggccaatgtggtgaaaccccgtctctactaaaaatacaaaaattagccaggcgtggtggcaggcacctgtaatttcagctactcaggaggctgaagcagtagaattgcttgaccctgggaggtagaggttgtagtgagccgagatcacaccattgcactccaacctgggggacgagagcaaaacactgtctcaaaaataaataaataagtaaataaataaatacataaaagagtagttattaatgatgataatttaacactattataatttgatccttggcataacaaagcatcttttaattttattttatgttgctttgtattttaagtttaaaaagctgagtaatttatgttaatgagtaccttgaatttaagagaaaagaagtgcactgtctaatattagttaaagtggtcattttgggctcagttatgctagttttaccaaaaaccttgaacttatcagtcgagtccttatcagccagttaagatcgtattctcattctcattctttgctctccagtaacatttctgtgtgattttcatggtgttttaaacaggaagaaacattaccaaggtcctcattgcaaacagaggagaaattgcctgcagggtgatgcgcacagccaaaaaactgggtgtacagactgtggcggtttatagtgaggctgacagaaattccatgcatgtagatatggtatgtgttaaaaattggaagccacgtcttacgtttattcgtttactgtgtcmgtattttcgttctttatgatgacagttgatatttgctagtgttatcagggttgaagtaggtaagttcaaactgctcactgctaattcttgggaacatttttcagatataacatcagttgaactaagcggtgtgcttagtagaacagttgatttacaggcaaggtctttatctccttgaggattggttaaaacggttcacagaatgttgcggatccactgactacactttgagtagctcatgtccagattccgtatatacaaggagaaagatccaggctctattctttttttttcttttttttttgagattgagtctcgctctgttgcccaggctggagagcagtggcacaatcccgactcactgcaagctccgcctctcaggttcaagcgattctcctgcctcgattctcctgcctcgacgtctagagtagctggaactataggtgccctccaccacgaccggctaattttttgtatttttagtagagacaggttttcaccgtgttagccaggatggtctcaatctgctgacctcgtgatccgcccacctyggcctcccaaagtgccaaacaggcgtgagccaccgtgcctagccaatccaggctctattcttagcacctgctacttactggctgagtgatcttagccaagtcacttcatgtttctgagccttgcttcatctgtaaaattataactaataagacccaactccctgaagtttgtgaatgttacgggtgagttattactagttttttttgttttgttttgttttgttttgtttttgtttttgacaagagtctcactctgttgcccaggctggagtgtagtggcgtgttcttggctcactgcaacctccaccttccaggttcaagtgattctcatgcctcagcctcctgagtagctggattacagacacacaccaccacgcctggctacttttttgtatttttagtagagacaggatttcaccatgttggccaaaatggtctcgaactcctggcctcaagtgatccacccaccttggcctcccaaagtgctgggattacaggcgtgagccactgcgcccagcctatcactagcttttatccaccagaaataactccaagcataggtgactcccactgttggacttcattatgcctgcagtaagactccaagcactagcatcaattcatgatgagcagcctcacctgggcttttatcactgtacagcaggcccttgtggctctctagccactgtttttctcactctgtgcaatgagtatttcaaacttgtttcgcttcattccaacctccaattctccctctacccacctttttgcagcaggatgatcttgatttcacagagaaaataaaattgaggttcctgccacagaatctgctgacttagttatgtctgcatccatctttcccatcgaaggtcagtgctctggatcccttctcttcttgtctttttaagaattttcccggctgggcgcagtggctcacacctgtaattccagcactttgggaagccgaggcagatgaatcacctgaggtcagggttcgagaccagcctgaccaacatggagaaatcccgtctctattaaaaatacaaaattagctgggcgtggtgtcacatgcctgtaatcccagctactcgggaggctgaggcaggagaatcgcttgaacccgggaggcggaggttgcagtgagctgagatcgtgccattgcactccagcctgggcaacaagagcgaaactctgtctcaaagaaaaaaaaaaaaagaattttcccaaaataagagagtaaattttaaatgtcttaccatgaaaaaatattaggtaagtgagatgatgcctaggttaattggcttgattcaatcattccacattgtgtgcatgtggcaaaacatcacattgtaccccataaatgcatacaattatgatttgtcagttaacagtattaataaaacataaagcaaaatgagacattcctgtgtcaaaaagaaaaggatcttctatttttcaatgatgggtcttcaaccactctctactagactgatactatccatgtccctaaatccagtggagtctccagggctgagctgacttgacccctcagcagcatttagcatcctagtacactgctcccttcttttagaaataaattcttctcatggcattctcagcctcttgccttcttgtcttctctcagtgtcctttatctggaccctacccatctaccagaccctacccatctaccagacccttatgttgaagtttcttgggacttggtccttggccctcttttctcagtgtgcactctcattctggatcattttatatactcctatagctttgagaaaaactcccaaatttctatttttagtccagactttcttttgagcatgatacatatatatccaactgcccattcaacatctccacttcaatattgtcacaggtaccaaactagtgtgactgaaattgaactcatgacctttcacctatactgaacctgcatttcttacagaattccctaaccccgtagagtacaacaccattgctaataaaaacaataatgtcagagatctagaagtctttgagcatttttctctcttctttcctactctagatccttcccccctcatctagtaaatgaccaagtactgttaattgtatttcccaaacatttctttccacttctttccaccccctcccacctataacttaactcaaagccacagtcacctttttttttgagccagggtctcactctgtcagctaggctggagtgcagtggcacagtcacagctcactgcagcctcaaccccccaggctcaagcaatcctcctacctcagcctcctgagtagctgggactacaggcacttgctaccatagccggctaatttttaaaattttttgtagagatgatgtctcactatgttgtcccaaagcgctgggattatagggattataggcataagccaccatgcccagccccactatcacctcttgcttgaccaaatgctgcagcctcctaagtagcctctccacctccactcttaactgtcccccacccccagccaacaatctattttctgcttttcagccagactgagagtataaaataaaaatgtacttaagttactcctcttcttaaatgctttaaacctttatagggtgcaccagcttatcagtaatgtaaaaggtggataatattcagtgttgatgagggtggttagaaactggtatgttgatggaaatatatattggtaaaaccatttcaaggctgattaaccaggagctattaaactatgcatatccttcaacccaaccctacaaacattcctgtaggtttctgtcccacagacgtgctcacatatattgtgctaagagaagcgtgtacaggaatgtctgctttagccttgcctgcatccagttttttgccgttataacctaagtgcgcattaagagatacatgattaaatgaactatgatactgccatactatggaatagtttgcaaatgttatacaaaatgaggtatagacatgtgtactagcaagaaaaagagttcccaagacataccgttaatggaaaaagcagttgcagaagataattatatagtatgatcctatttatgtaaaaacaagaactaaaactgcatgtgtttatataaacatatatgactagttaggaatatggatatggaacaatatgtcccaggtttattatagtggatgttctatctggaaggagactgcaatgggggggagtaccaaagggctactttgcgtttgtattataattcactttctttagaatgagaatagatttgtgttttgtggagttaaaagtaaaaaacaggctgggnnnnnnnnnnnnnnnnnnnnnnnnnnnnnnnnnnnnnnnnnnnnnnnnnnnnnnnnnnnnnnnnnnnnnnnnnnnnnnnnnnnnnnnnnnnnnnnnnnnnnnnnnnnnnnnnnnnnnnnnnnnnnnnnnnnnnnnnnnnnnnnnnnnnnnnnnnnnnnnnnnnnnnnnnnnnnnnnnnnnnnnnnnnnnnnnnnnnnnnnnnnnnnnnnnnnnnnnnnnnnnnnnnnnnnnnnnnnnnnnnnnnnnnnnnnnnnnnnnnnnnnnnnnnnnnnnnnnnnnnnnnnnnnnnnnnnnnnnnnnnnnnnnnnnnnnnnnnnnnnnnnnnnnnnnnnnnnnnnnnnnnnnnnnnnnnnnnnnnnnnnnnnnnnnnnnnnnnnnnnnnnnnnnnnnnnnnnnnnnnnnnnnnnnnnnnnnnnnnnnnnnnnnnnnnnnnnnnnnnnnnnnnnnnnnnnnnnnnnnnnnnnnnnnnnnnnnnnnnnnnnnnnnnnnnnnnnnnnnnnnnnnnnnnnnnnnnnnnnnnnnnnnnnnnnnnnnnnnnnnnnnnnnnnnnnnnnnnnnnnnnnnnnnnnnnnnnnnnnnnnnnnnnnnnnnnnnnnnnnnnnnnnnnnnnnnnnnnnnnnnnnnnnnnnnnnnnnnnnnnnnnnnnnnnnnnnnnnnnnnnnnnnnnnnnnnnnnnnnnccagctaatttttttttgtatttttagtagaaatggggtttcactgtgttagccaggacggtctcaatctcctgacctcatgatccgcccgccttggccttgctgggattacaggcgtgagccaccatgcccggccagtcttgatcatccttgaggagcctcccctgacttcccttctaggcatttcctgatcaccttcagaccagatcaggccttcctcctacagcatttatgcccttggtttttcctccatgacgttcatcacagttgtcattaagtgtgtgaatgtatttttaatgtctgtctctccccctagacagggacatttgtcttgttcactatggtacaggcagctcccacctcaaagtgtggcacgtagtaggccttcagtaagtcttggaatgaatgaatgatgtgctctaaatggtctacttcaagggatgctatgattttgtgtaagttttaaggaataatataaaataattcacaaatgtatgaaagcattatcatactctgataattatataaactttaatcaactttgtaagcttttttctttgtgtacatctgtcacatattttgtttctattatcaaatataaatttttggccttgaatacatttaaggttattattgttttagtaataatatcatgactaatgtctgttgctttttatcctgagacactttagtttcacaccagtgtgtggcttatgcatgaaaaccaagttttgttaccctcttcatgcaaaagattctaagactggcttatttttatagtgtagacatacattggtacttcagtttttcaattcttgcactgttcttgagggagtggcatttttatttacaataataaaatgaccctgaagcagttctgtatagtgtatgagtatgtactagccacaaagtcttttaagcatgtgatgtttcttaaacaggcagatgaagcatattccatcggccccgctccctcccagcagagctacctatctatggagaaaatcattcaagtggccaagacctctgctgcacaggtgagggttgtgaagagatttgcagtgcaaaaggaatacgttttgtgcaactgatgcaaagttacttatagaaattttctatttttagcctttccyaagatctttacatttgattattggattatcattgtaaactaggcatgtcccatctcatttctcagccagtctgcctttttactggatcctgtgtactttagatcctttgggaaataggtggaaagagggtctaaattacaagttaaaattaggagagaattcagctcttctatcctcaaaactacaagctcaaatcctttgggagaaataggtaggtagggctctgaattacaaggtaaaatataagcaagaaagaaatatatttccaccccaacttcccagtctcattctagggccacgtagggaacttaaggaagacgattcaggcaaatggaattgccaagactctgagatgaaaacaagcttggtgttcaagggagaagaatgttcagtgtggttggagtgaaggcagtaaggggctgtgtcattcaggtatagtcagtaaaaccaaaattccatttgacgtttcagcagaaggaacttagtttaggaattagttccaccagtgttagagagctgaaggcagggtggggatgttgaaattaccctttaataataacagaaattgaaaaccaccctttgggctgaaggagagactgggggagggactttctgcagctgttctcagatctgtggaggggccctgcctggctgccgagggcttaatgaggctggttcttggagttccaaaagaacctgaagactggaaccaatggccgcttcccggcggtgaggagaaggaaagcttccttgttcaagtttccctacagtgacccctactggtgaaacctaacaggaagcccactggcaaacaggcagagccccttcacaaggcaccacgtagaaggctggatttgcagctgggagaaccatcttacaggaagaaagtggtaggagacgatggagcagagagaggtaggggtagcatcatttagaacattcttttttttttttttttttttttttaaagacagggtctttgctctgttgcccaggctgcagtgcagtggcacaatcatggctcgctgcagcttccaacacccaggctcaagtgatcctcccacttcagcctcccaggtagctgggaccacaggcgcatgccatcacacctggctaattttttattttttgtagggatgggctttctccatgttgcccaggctggtgttgaactcctaggctcaagcgatctgcctgcctcagttcccaaagtgagaacattataggtcttgataaggagtttgtatttcattctgagtagccattgggaggttttttaaagctggggagtaaagccatctgctttactttttaataaaatcgctgtggcttctgggtggggaaatggatgattgaagtgggggcaaaggtagggacaacaacattgaaagaaggcaaaacaattaaaagtaaattgccgtagtgttgcccatcaccctcacctgaattccttctccttagaaattcttcgttgtctcctctagcacattgatcattccgcatttgatttcttgttctagtcatatttatacttaattagtgctttgtttaacgagtttaatgtagatgttggctcctccataattcctttgtgctttcctaagggaagaactcatatctgacacctttttatttttttaagcatacctyctagcaacccagtgagcttgtacatagtcctcaatttgtttttatttttgttttttgagacaggggttcacttatcatccaggctggagtgcagcagtgagggttcaagcaatcctcccacctcagcctcccaagtagctagagctacaggcttgcatcaccatgcccagctgattttttaaatttttgtagagatggagcctccctgtgttgcccaggctggtctcaaactcctggcctcaagtgatcttcccacctcagcctcccaaagtgttgggattaaaagtgtaatccactgcgcccagccaagtccttaactaaattagtgaatatgtatagttgttttgtattgatgtatctcttctttagaatagtgttcttaaactgaataggtattaatttatacaaatgcatatttaaaatatgcttgtttatgaagcttttttggttacagcttgaagtaaaaggtccttaggagggtaaggagatgataatagtacgtggagatatacatatgtatctcacatgtccttaggagttcaggccctttaacataaatatcagtttgtgcatttatcatgtatttaagcataaatgccatggtagtattaccttcatcttatgggcataacatctaatgcacagaaggttgcatgatgttattccaaagcatctaaatcttgctactcaaagtgtggtccatggacagcaggtttgacattatgagctcgttagaaattcagacttttaagctggacacagtggctcacatgtgtaatcccagctactcagaaggctgaggcaggaggattgcttgaacccaggccagcctgtagaagatagcaagaccccatctctgaataaaaaacaataacagcctttaagtcctaccctaaacccactgtaatttgcatttatgcaaaatttgcatttttatcaagatcccccagtgatctgaaatcaaaacttgtctaatcattgaaagagaaaggattaaacaagagtattctgactcccagccccattccctattcattggaccagactgagcagtagaactttcttgccctgcattttggaaaaagggaaggtgttgtttaattagaaatttttattaattaaaaattacttcttgtaggccaatgagcttcctttttgttttattattgctttcttttctaagctgcctcctgaagaattgaaaatccactttctttttaatgaccatttttctgagaccattttttagtttaaataagaaccttctagcaaatgtatgatatgctaattccagggactttatcaagcttgtacctatttagaatagtatcatgttagttgctgtaacacaatgagaaaggaataatacttattttgaagtatatttcaaagaatgtttgaaaagaataaaatactttcagacagtatttttaaaagaataaaatattttcaaaaaataatcattttgcctggatattgaagatttggggtggcttgcaaaaattagtggtgaaaataaaggataaaagagcaaaagccaagtaacatgagtgaatgaacattggaattaaatcagaaaatttagcctaagtaaagctgtttagctctttggggcagacctgatcagaaaggaaatttggtgggttataatttacaaagttctcctctaataaaaagatacttgccgattaggagagcaaaccttcctttaatgttgactttaaagaagaaacttattggccmtctagtaaaggacattgaataacacttgtatagtgatttgaaagaagttttctaaaagtctagaattgttcttaatgtggccattttgacatacttttatagaaattaaagtaaaatttacaagtgagctaaatttctggtgatgtctggtgatatggctatattgagaaactcaagaagatgtaaatattttttaggctagccttttttttttaagacgttgtctcactctgtctcccaggctggagtgcagtggtatgatcatggctcactgcagccttgaactcatggactcaagtgatcctgccacctcagcctcccaagtagctgtgatgggactgtaggcacacgtcactatgcccagctaattttttgtttgtttgtttgtttttgaaacaaagtctcactgtgtttccyaggctggtctcaaactcctgggctcaagtgatccttctctcttggcctgcctaygtgttggcgttaccgacgtgagccaccgccctggccacactcgttctctcgattgccagttgtcttcagtcttctctggttgggaaagaggttgtagttaaccctgtctgcagattagaaccacctgagcttttaaagagactgttgtactgccttgcggaagaggcctaactgtaaggaagcataaagcagtctctggaatgcttgtgatgttttgattcttgagttgagcactggctgcacaggtgtattcagtttaagtaaacaatggacttaagagctgtacacttagggcaaatgtgcttttctatatgtgtattatacttcagtcccctcagttatctgaagttgctcctgagcatgaatgttttataaaagtgctccatttttttttcatgtgctaccaagagttaggaactttattacaggtacttgaaaatcactgacaagtaacttaaatgcatatagcaagtcatttactgaatacagctactctgtggttgaccaaaaggaaacccatatgttttaagtatcacagacgaaggtaggaaattcttggtgtccggtcccagggtctgtccagcccatgctgatgtctgaggagagtgtgtggatgagcagaaagaacacttggggggccgtaggcaggtgaatatggttttcttcagcagcagctcttattagcagcttagttagactaggtctctcatactgttcacctttatcttagctgtctgctctggctctgtggttcctgccactcccatgcccgcagctgcacagctggctctcccttgccttcagggtcagcagcttaactctttctctctctgggcatgagcaagccaagctgtgtcctggctcccacctgtccggctgcaagatggacaactttggcactctctctgggtgccagtgctcccaccatgtcaagccatgttgagccgagttgagccccaagagcccctgaacagcattagcagggcaattataccttttacagacaatagtggcatatgagcttacacaaacaggttatataacaagtgcagtatgtgcctgtgccctaaatttgctgagtcatgcaggtctggatgtccacctcagcctattccttgaccaaagcacatctatgtaccttacacttggtaataagaatttaaagaccatgacttgtccgcttcaccatggaaaggacacttctcatttttgcttgaaggcagagccagttttttgtcaaactctgcttgagggtagaaccaacaactttgcttgtgtgtgtcttcttgaacaagttacagagcaaagtaaatacaaactaaaaggttggaataaattattttggcagagatttaaggaggacaagagatactagttttctgtgtttactaataaaggcatgttagtaccgtgcaatgaacaatctcaacaggtttgcaatcctatgacccaccagggtgaagtggcagctcaatacatgcctgaagcaagggaattagcccgctggtaatagtagtggtgctgttgttttcccttttaatccattcaaatgctcaagaacatcatggtttggttatattaaattgttcttcctaagagaaattagttaaacttcttaaggctgttcccagagtgtacgactgaattttattttcacaaggagatggctccttttgtttttagttattgatatggtttcgctgtgtccatacccacatcttatcttgaattgcaactcctacaattcccacgtattatgggaggaacccggtaggaggtgattaaattatggggatgggtctttactgtgctgttctcatgatagtgaatgagtctcatgaggtctgatagttttaagaaacaggagtttccctgctcaagctctctctttgcctgccgccatccatgtaagttgtgacttgctcctccttgcctttccaccatgattgtgaggcctatccagccactaaacctctttcttttgtaaattgcccagtgtcaggtaatgtctttatcagcagcatgaaaacagactaatacagaaaattggttccagtagagtagggtgctgtgaaaagatacttaaaaatgtggaagtgactttggaactcggtaacaggcagaggttggaacagtttggagggctcagaagaagacaggaaaatgtgggaaagtttggaacttcctagagacttgctgaatggctttgcccaaaatgctgatagtaatgtggacagtgaagtccaggctgaggtggtctcagatggagatgagaaacttgttgggaactggagcaaaggtgactcttgttatgttttagcaaagactggcagcattttattcctgctgtagagatttgtggaccttcaaacttgagagagatgatttagggtatctggcagaagaaatttctaagcagaaaagcattcaagagacgacttgggtgctattaaagggattcagttttataagggaagcagagcataaaagttcagaaaatgtgcagcctgacaatgtggtagaaaagaaaatcccattttctgaggagaaattcaagctggctgcagaaatttacataagtaacaaggagcccaacgttaatccccaagacaatggggaaaatgtctccagggcatgtcagaggtcttcatggcagcccctcccatcacaggcccggaggcccaggagggaaaaaatggttttgtgggccaggccagactgctgtgtacagtctagggatttggtcccctcagtcccagctgctccagctgtgattaaaaggggccaaggtactacttgggctgttgcttcagagggtggaagccccaagccttggcagcttccatgtggtgtgaagcctctgggagcacaaaagtcaaaaactgaggtttgggaacctccgcctagatttcagaggatgtatggaaactcctggatgccaggcagaagtttgctgcaggggtggaaccctcatggagaacctctgctagggcagtgcagaagggaaatgtggggtcagagcccccacacagagtccctattggggtactgcctagtggagctgtgagaagaggtccactgtcttccagaccccagaatggtagatccaccaacagcttgcaccatgtacctggaaaagccacagacactcaacaccagcctgtgaaagctgccaggagaggggctataccctgcaaagccacaaggttggtgctgcccaagaccatgggaacccacctcttgcatccatgtgatccagatgcgagacatggagtcaaaggagatcattttggagctttaagatttgactgccctgctggatttcagacttgcatggagcctgtagcccttttattttggccaatatcttccatttggaggctgtatttaaccaatgcctatacccccattgtatccaggaagtaactagcttgcttttgattttacaggcttataggcggaagggacttgccttgtctcagacgagatgttggactgtggacttttgagttaatgctaaaataagttaagactttgagggactgttgggaaggcatgattggtttcaaaatgtgaggacatgagatttaggagggatgaggagcggaatgatatggtttggttctgtgtccccacccaaatctcatcttcaattgtaactctcacaattctcatgtatcgtgggaggaacccagtgggaggtgattgaattatgggggcaggtctttcctgcgctgttctcatggtcatgaatgagtctcatgagagctgatggttttaaaaatgagtgtttccctgcacaagctctctctttgcctgccaccatccatgtaagacatgaattcctcctccctgccttccgccatgattgcgaggcctccccagccatgtggaactgtgagtccaataaacttctttcttttgtaaattgcccagtctgggatatgtctttatcagcagtgtgaaaacagactaatacagttatgaaagaagagcatttatctagtacaccaaaaagttccatcaaattcagaatctgttaaaggagactagtaacaaacactccggaaatgaaattaaggaaacagttacattcacaatagcaatcaaatagttaggaataaagttagcaaaagcagttcaagacatatttactgaaaactataaaacattgctgagagatactaaagaagttctaaataaacagatatttcatcagaacactcaatattattaaggtggcattatatatttaatgcagtctttataaaaatcccagcaggctttaaaaaaaatagaaattgataagctaatcctaaaatagccaaaaagcctaatatatacctaaaacaatttttgaaaagcttatgtaactattttgtaggatttagactctgtttcaaaactcattatgccaggtgcagtggctcacacctgtaatccccagcattttgggagaccaaggtgggcagatcacttgaggtcaggagttcaagaccagcctggccaacatggtgaaaccctgtctctactaaaaatacaaaaattagccaggcatggtgacaggtgcctgtaatcctagctgctcaggaggctgaggcaggagaatcrctggaacccaggaggtggaggttgcagtgagccaagatcatgccattgcactccagcctgggagacactgcgaggctctgtctcaaaatatatatataaagctacaataaccaaaacagcgtggtattggtataaggataaaaacaggtcagtagaacaggatagaaaatccaaaaataaactcacatatgtagtcaattgatttttgaataaaggtgctaaagtaattcaatagaggaaaggagagtttttcaacaaatagtgctggagtaatttgacatctctttgtaaaaagatgaacccgaagtctagatcctagactcttgcctcacaccttaaacaaaaaaaattaacttacaatatatcacagacctaaatgtaagagctaaaactataaaacttctagaagaaaacataggagaaaatctttgagaccttggattaggcaaagatttcttagacataatactataagaaaggttcacgaaaaaaaatgataaaattgacttcaaagcttgaaactgttgctaggaaacctaattttttaaaaaaatgagcaaaatatttgaatagatccttcaccaaagaagttatacaaatgaccagaaagcccattaaaagatgttcaacatattagctgttagggaaatacaaatcaaaaccttggtgagataccacttcatactcactaggatgctataatcaaaaagagatgataacaagtattggtgaggacttagagaaattggaacccttctatgttactgatgggaatgtaaactggagcagccactttggaaaacagttttgcagtttctcaaaacgttaaacatagagttactttatgaactagtaactctacttcttcagtatatacccaaaagaaatgaaaacacatccgcacagaaatttatacctgaatgttcatagcagcattatttatagtagccaaaaaagtaggaacaatgcaaatgtctatcaactgatgagtggatagataaaatgcagtatagccatacaatggagtattattttgccatcaaaaaggaatgaagtactgatttgtgttaaacaaaaaatggatgaaccttgaaaatattacrttcagtgacagagccagtcacaaaagactgcatgtattatatgattccatttatatgaaatgttcatataggtaaatctatagagacagtagattcacagttgcctagggctgggggtttatggggagtgaggaatggctaagaggcacaggatttctttttgcagtgttaaaaacttacattattagatcttagtattttagattatagtgataattgtgcgactttgagtatactaaaaatcattgggttggccgagtttatggtatatgaattatatctcaacaactatgtttaaaaagtgcagtaacactatgcacccactagattggccaaaatcagaaagactgatagtacaacatgtgggcagggatatggatacacactttaaagcatcataaattgctggtagaaatgcaaaataaaatcatcgctttagaaaagttaaatgtattcttaccatattaggaccaaacaattgcactcctgggtatttacccaagagaaatgaaaaatatgttcacacagacttgtctgtgaatgtttataacaccgttattcataataaccacaaactggaaaataattcaaatgaatgggtaaacaaaatgtggtatatccrtataacagaatccatattataaaaagaaatgagctactgacacactccacaacatgaataaaccttgaaaaattatgtgaagttaaagaagccagacacataatactatgtactgtatgattctgtttatatgaatttttttaaaggcaaaactatagagacaacaagtcagttgttgcttgggtattgggaacagattgcacatgggcacatgggaactttttcaagtgatgcaggtgttctcaaactggattgtagtgatccaattgtagttgcacaattgtatagatttactaaattcaccaaactataaatgcatgaatattatgtattataaatcatatctcaaaagaaaacccaaaccagggaggactaggacatagacctgtttcatttgcctagtatagatgtttgaccattttatataaaatactcaaattgtgggagaaaatatttgcaaagtttgcatctgacaaaagtctaatatctagcatctataaggaacttaaacagatgtgcaagagaaaaacaaccccattaaaaagtgggcaaaggacagccgggcacagtggctcacgtctgtaattccaacactttgggaggccgaggcgggcagatcacacggtcaggagatgagaccatcctggctaacatggtgaaaccctgtctctactaaaaatacaaaaagattagcagggcgtggtggcaggcacctgtagtcccagctacttgggaggctgaggcaggagaatggcgtgaacctgggaagcagaggttgcaatgagatgagatcatgccactgcactctagcctgggtgacagagcaagactgtctcaaaaaaaaaaaaagtgggcaaaggacatgaacaggcacttctcaaaagaagacatacatgtgaccaacaaacatgaaaaaaagctcaatatcactgatcattagagaaacgcaaatcaaaaccacaatgagacaccatctcacaccagtcagaatggctattactaagaagtcaaaaaaataacagatgtcaggaggttgtggagaaaagggaacgcttatacactgttggtaggagtgtaaattagttcaaccattgtggaaagcagcagggtgattcctcaaagagctaaaagcaaaactgccattcaacccagcaatcccattactggttgatacccagaggaatataaattattctaccataaagacacatgtgcatgtatgttcattgcatcattcacaatagcaaagtcattgaatcagcctaaatgcccatcagtgacagattggatgaagaaaaggtggtacatatacaccacggaatactatgcagccataataaagcataagatcacatcttttgcgggaacatggatggagctggaagctattatccttagcaaactcccacaggaacagaaaaccaaatactgcatgttctcacttagaagtgggagctgaatgataagaacttaagaacacaaagaaggaaacaaaagacactggggtctacctgagtggggaaggtgggagggagaggagcagaaaagataactattgaatactgggcttaatacctgggtgacgaactctgtacaacaaacccctgtgacatgtattcacctgtgtaatcttcacatgcaccccaaacctaaaataaaagttaataaaataaaattgaactttkgtttaaaagatataaaactctaaactggctgcaacatatgagtatccagcattttatctgtatctggcattgcattgtttcctgtcactaggatgtgggtttttctattcgtatgagtttcccagatatgtgaagcttacccctttaattttgaaatgttctttgagtgtaactattttgaaacaggattggctgaacctttgtgtttttacattgttttggtcataattataatactcgctcacattttagaagaacaaatcccctcagggctactgatgttggagagggtgtggcttcatyactcattaaatcatccaagtcttctctgccttttgcctccttctgtttcttccctttttgctgtcagcgtgtttacttttagaaatcttgctgtccttcagttactgaatttcctcttctgtgggctaaaatcccagtaagtatgtttgttaaaattctgagtacactggaagtaactaggctgaagtctgagggatgcccttttcactgaaagtacacgtacagttgtcccctttatccacggttttgctttgagtggtttcagttacctgcagtctactatggtgtgaaaatattaaatggaaaattccagaaatcaacaattgataagtttcaaattgcacgctattctgagtcacacagtgagatcttgcacagtctgctttgtccctcccaggatgtgaatcgtccctttgtccagtgtctccacgctgtctccactccccatctgttagtcactcaggagccatctaggttatcaaatcgactgtcatggtaccaccatgcttgtgttcaagtcacccttattttatttaaatcatggccccaaaatgcaagagcaatgatggtggcaattcacttatgctaaagagaagccatgaaatgcttcttttaagtgaaaaggtgaaaattctcaaggaaagaaaaaaatatgtatgttgaggtttcttggttcttggtaaggaccaagtttctatctgtgaaattgtgaagaaggaaaaacaaattcatgtcattttcctgttgcacctcaaactgcaaaacttatggccacagggcatggcaagtacttagttaagatgggaaaggcattacatttgtgattggaagacatgaacagaagcgtggtcaaattggtatcagtccagttctgtagtattcatagtttcaggcatccactagggatcttggataaggggacactcctgtagactttaatacatgactttcatttgcttcttagctttttttctggaaagatgacattgatgacctgaagataagtgaggtatttattgagctagtgttctgtttggggcttttggatgccatgatttcaattctaggccagttttacacagagacagaatagacaaattccccttaccactctgaagccctttacttcttgacattctaccctaattgcaatattattttaaatttaagtatatagaaacttctgtaccatatgatccagcaattccacttttggtatacagctagaagaatttaaagcagggactcaaaacagatacttgtataccaatacttgttgttcacagcagcagtattcacaatgtgtagaaataacacaatgtccatcaagagattaatggataaacaaaatgtgtacaaactggatattattcaaccttaaaaacaaatggaattttgatacatgttacatgaatgaaccttgaaaacattatgctaggtgaaataagccaaactcagacaaattattatacgcttccacttacatgaggtactttggctagagaaattcataaacagaaagtaaaatgctggttactagggactaaggaacaggagggaatggagaattatgtttggagattaaaacatcctgaggatggatggtgatgacagttgcccaacattgtgagtgtacttaatgccactgaattacatacttgcaagtaactaaaatggtcagtgttttgctatgtatatattatcacaataaaaagaaatatagattcatctggtttaggtaagccttcagagctttcatatgaatatttcagatatttctttggaaacagagtttaatagagaccatactattaccagtgtagggagaggcctcccagaggaagacagcttcacctgcattaaggtgttgccagttgagcactgatgagtaaattttttattttatttctcatttctaggctatccatccaggatgcggttttctttcagaaaacatggaatttgctgaactttgtaagcaagaaggaattatttttataggccctcctccatctgcaattagagacatgggtataaagaggtatgagtttatatcttttaaaatataactgtatgaaggtcagttgaaatagtttgggccaggcatgtggctatgcctgtaataccagtgttttgggagactgaggcaggaggatagcttgaggccaggaattcaagaccagcctgggcaacttagtgagaccttgtctctcaaaattcttttttttaaatcagccaggcctgggcacagtggctcacacctgtaatcccagcactttgggaggccaaggtgggaggatcacttgagcccagaagtttaagaccagcctgggcaacacagggagaccctgtctctacaaaattttttaaaaattccaggcatggtggcacgtgcctgtgggtccagcatcttgggaggctgaggtgggaggattgcttgagcccaggagatcaaggctgcagtgagctgtgatcacaccatcatacttcagtctgggtgacagagtaagaccccatctcaaaaaaaaaaaaaaaaaattcagctgggtatggtgacacacacctgtagtcccagctgcttaggaggctgaggcagaaggatcacttgagctcagaagtttaaggctgtagtgaggtataattgcaccactgcactctggcatgggcaacattgtgagaccctgtctctttaaaaaaaaaaaaagaaatagtttgttttacctataatattttaattctacccttctgttgtcataggcataagttatttatctgtgacatagagaaattctattgagttacagaaaatacttaatgtttctaatcaatatgttagtattttgggattaaaaaatagggtgagatgagctaccacatgaaatgagggaaactaactaatagacatattaaatttgtattattttgtcrtctcagactcgatgttttctttaaagagttccattgtaatttatagactgggctatatttatgtttgtcttgaatgaaataatttgtagaatttggggcatgttgttttctttcccactctaaagcacatccaaatccataatggctgctgctggagtacctgttgtggagggttatcatggtgaggaccaatcagaccagtgcctgaaggaacacgccaggagaattggctatcctgtcatgattaaagccgtccggggtggaggaggaaaagtaagattgtgcatgcttgtgtttgccaattcaggcttgtcttctttgttttatttatgttgtagtcataatcatcttttctctcttagggaatgaggattgttagatcagaacaagaatttcaagaacagttagagtcagcacggagagaagctaagaagtctttcaatgatgaygctatgctgatcgagaagtttgtagacacaccgaggtgggttggccttatttttctgactcnnnnnnnnnnnnnnnnnnnnnnnnnnnnnnnnnnnnnnnnnnnnnnnnnnnnnnnnnnnnnnnnnnnnnnnnnnnnnnnnnnnnnnnnnnnnnnnnnnnnnnnnnnnnnnnnttaaaaattaaattataaaaataatgcatgcacattctataaaatataaaactgtagtagtatataagtatattattacaagtttcccagttctgtcctgtgatgtaaccactgattgtaggatggtatgcattcttccagccattttctatgtgaatagaaacctatatacatatacatacagcaaacaaaatacatacctaagaacagtgaatagaattttttttttttttggacggagtctctcattcagttgcccaggctggagtgcagtggcacgatctcggctcattgcaacctctgcctcccgagttcaagcgattgtcctgcctcagcctcctaagtagctggaattacaggtatgccccaccatgcctggctaatttttgtgtttttagtagagatggggttttcccatgttggtcaggcaggtctcaaactcctgacctcgtgatccacctgcctcagcctcccaaagtgctgggattacaggcgtgagccactgtgcccggccagtgaatagaatcttatacactaatattatatcacagacatctttccatgtcagtaattgtagatcagcctcattctttttgttggtgacctagcggttctatgatcttgatataccattaattcattcagtatgtttcttgttgatgaaatttagggttttttttcaatattagcaaattattgtaataaattcagctatatttatagaactctcagttgagatgctcaggaaatggaagtaattttctaaattgaattacaagtgatatgctgttaataggagctaacacttacattgcacttaccatgtgccagattttaaatattttacacatgctaaataatcttgctgtccttctaattctaatataattcttacaacaacctcattaggtaagtactgttttcattttacaggtgaggacactaagcaacagaatggttgtgttgtgttacttttctgaggtcactcagctgttaagtagtaaagctgagatttgaacccaggcactttgactccagagttcatatctaagccactgcactaagctacttctctgggtaccactatagcaaatgcagtgtgaatccctatttttttttctggaattttattttcatgtttgttgtttaagatgctgattataaagtttctcatttcatagatttttatgacaattgttaaattttatatatatatgtgtgtgacctgtaagtcaagtgaaaagaataatttatttgggaaccatgactggaaagagatttaccttgaaggtaacagacttgaaacttcaggcccttctttgacattaatctcttccaagaccctgacctaattttgtatttgcagttttgtattcttctccttagagaagacccccaaattgttttttgtttcaggccctataaaacaactgtcctgagcatggcatagtaaatgaaattcaattaaggcaaaaaaaaaggggggggcatttctaaggtacattgaaggcttcctttcaagaaagaataggctagccatccaaatcagcatgctcttaagttagaattgtggagacatcaatagcttatttcagtaacttatttcagagacatcaatagcttatttgagttattatgtaactccatgcctgcagcattttttgaatatgtaagttctttacttatgaaatgttagccatacattgcrtcacattataatttattcccccaatagctggaaagcccctgggaatcaaagacctggtagtatatacatttttattttttgtatatattgcctggcatactactttccttgtaataggcatcagtaatattttttgaactatagaagtaatatgaatacattacaaatttttggaaaatgcagaagatggaaaacaacccataattgtattctcctaattattattaatattcttatatacagtcatgtgttgcttaatgacagagatacattctgagaaatgcattgttaggcaatttcattgttgtgcacacatcatagagtgtccttacacaaactgagatagtatagtcaactacacacctaagctatggtatagcctattgctcctgagctacaaacctgtacaaacgttactgtattgaatactgtaggcatttgtaacacaatggtaagtatttgtgtatctaaacatctcaaaacataggaaaggtaatgtattgtgctattatgtcactaaatgataggaatttttcagctctatcataatcttatgaaatcaccatcctatatgcagtctggcattgatggaatgtcattgtgtggcacattgtgtgactctatttctattctgtatttctagtaataacttctttttaattgaaagcaagtttattaagaaagtaaaggaataaagaatggctactccatagacagagcagccccaagggctgctggttgccatttttatggttatttcttgatgatatgctaaacaaggggtggagtattcttgcctcccctttttagaccatatagggtaacttcctgacgttgccatggcatttgcaaactgtcatggtgctggtgggagtgtagcagtgaagacgaccagaggtcactgttgttaccatcttggttttagtgggatttagccaacgtctttactgcaacctgttttatctgcaaggtccgtatgacctgtatcttttgctgaccttctatctcttcttgtgattaaaaatgccttaacttgctactgggaatgcagcccagcaggtcttagccttattttacccagctcctattcaagatgggagttgctctggttcaaatgcctctgacatttcccttttcccttttgtaagagcacgcttaatcctaagggttgcagagggacaaagatccatcttctgtaacttcttcaggctgaatggggtgatgatattcctgcctaactattaggatctcttgtgttcagtatagagagaggagcttagttagaaagcatcggtatgttgagggccactcataactcatgagttccgacaaaaggtgatatctggaagattaatatgtgtttttaaaaaaaaatttggtaagcttatcctgcatttctacacaaagagtataacagtaatatattccacaacagtagagcaaagtaagcaagattatcccaagttaactaagttagaaggctttccactaactgggcaactgttggaaccaagccgatatgaggttgctaggtgattccaatacatgcccaggattagaatattgattcagatatttgcattaccagtccctcctgtttcttctgagcagcatccagggatcactggttggtccacaggaataagcagggttagtctaaattgtaggaaatctcaaaaacaactgatgagaccaaaatttaataacaaatgtgccatagttcttgaaacataatttttctctctccggtttcccatttttactaaagacaaatcatggtaagactgatttgctttattatacatggcctgattatttgtacaaagtgcagcaagaataattatttgccatacaggcttttaaaattggttttgatataactcttccataaggaatgtcagagaagaccttttttgtatttaagcccagcccagccatgggtttataccctcaaatacctatgagttgggtaaatttttctcctcttgaggtctcacgataacttggggctcctgagtctttcagaaagtgacattctttacttactacaggttaggaaccctatatagagactgtgtagacaaggaatgaggccagttttccccaggggcttttattggctttacaagtcaagtttgattccttaaaggaaagcatgccattccagtcaaagccttggtaaaataaccagtttctccagttgtgtcccattgcaaaagaaagcagattcttattgcatttatgcaaataactatattgccgtaagttaagatagtcacaaataatttccaaattctggagaaatcagatagagagaaacaaatatgctccaaattttgtttatgagtgtgcacattacttaattgtttaaaaagctgtcaatagcttaaaagaaaagtttcctttactctgaagaacaaaacagaggatcagcaatgttttaagcaaaaagtcaaaaaagattacttcagacttctgttagtttagtctgtacagttaactcctgttttgcttgatatacatgaacatttcaactttccatgagagtcctgaaagtttctttttcccttttctaatgtcacaatctccaaagttaaatgaaacctgcattcaagaacacctattagagttgtatagttgattataaatcaccttttggggcttggtggctcatgcctgtaatcccagcactttgggagactgatgcaagtggatcacttgacctggagtttgagaccagcctgaccaacatggtgaaaccctgtctgtaataaaaatacaaaaattagccaggcatggtggcatgcacctgtaatcccagctacttgggaggctgaggcacgagaatcacttgaacctgggaggcggaggttgcagtgaactgagattgtgccactgcactccagcttgggcgacagagtgagactcagtctcaaagtaataataataataataaatctccttttgaagaggatcaaaacaagacaattgtctgtggatggcaaaaagttttagggcagccacagttaaaaacacaattgacaaagaaatttggttacctctgttgcatacaatggttttatgtaacagttataattatactgataatgtacactaagtcatatcagaattataggagtttcccattattttggaacacatactaacaacatatttatataaatatagcccaaagaaagctaaacactatttcacatttgacactgcttcctgtatgactcttatgccaaataagccaaatttcacctttacataactgtactattaatgttaaacccaattttcaataaaaccttatagacatatctacccaattttaatgtttgaccataaggtgaggttctcataaaccttttataaccctttacaaatttttgttaaagagcagatcagtgccttaagaagaacctgttgtgcttttattccaatgttcaatttacagaaaaactgaatacccctttaactttagacaatatgttcacacacagaatttcttttacaagattaattttttacaaaccttccacaacttgcttaaaccttaagcattatcttatttaacttaaaacaatcctttaactttttaatctagacaaaaaaaaatccacattcctgtgccttcttataatcttttaccaaaaacgcatttcaaaaacaaaacaaaacaaaacaaaaaaaacrcatttcactttccttacacaccttacatgtagaattgtttcaatttctcaaagattacttaaatcacataaattaaaggcattatactttttacttttccgacaaaatatttgatataagcacttatttttaaaccagttaaccaaagctctttcatatcacacacacaacacatataaatacacagacaaacagaagaaaaggactcattccctaagccaggaactgaatcctgaacccggkataccattgtgaaaagacaaagctaggccacatggttacaaggtcaagctcccaaggacatacaagacaagaggggaaacctcatccagttttttttttttcagggacctgcagcaaagtttataactgactagtttgctgggccatcttaaacagtgggcttatggtgttctaagcctgtgttttatcctaaggtatccatctctatgacagaacaattcagaaagacatgcaaagcacaccagattcactacagcttaagactagcctcacaaatcctttttttattaatcaaaactttacagaggagataaacagtgatttttgccattcattcaaccagtttgcacagagagagaaagggaagggaagggagaaaagcattgctttgtggcaggatggggaaagcaaggtgctcagagagaccagagaaagacccgcccattgcaaccgacactaaataaaaagttcaggtggccacttgtcagttaagaagggatcttttgcccgccatggctctgaggcgcctcctgccggtgctgcacccctacattacccgcttcgccctgctgtccacggagccggctgcccgcgaacagcctgccgtgggcccagcagccatgccaggacgtgggtcggccgaggcagtgtggccgccggtgcccgcagtggacttcggcaacgcgcaggaggcgtaccgcagccggcgaaccggggagctggcgcgcagcccgctggtgctgcacttgtgcgcctggcccgtgctggtggcgtgccatgagcaggcgcgcggggtgcaggcaggggcgcggggcttctgcccgtcccagaagcctttacggagcttcctgggtgcccaccaagcgtctcctggagcgagggaagccaggaagggaggcgtttcctgcagtccctctcggacctcgcaaattttcctacttgtcgatgtctaccaactaaaaacaatgatcattttaatatttacgatatataccacttgtgggaatacagagttatcacttggaattaaaaaaaaagggggatcttttctagcagtcccatcagctctcaagtttctccttttagggaggtaaaagctccccatgtcccaccatcctgtacatgcctaatcctatcaccgaccgccgtcagcaaagagtgcaaggcagattaattcaaacagaatagcagttaacatccatagtgccaaacccattcttagccgagagggattttactgagaggagcccctaaatcttaggaaggaatctaaccttcctaagttgggcttcaaacccaagttcagtcaagcatccttgccttttattgagaggggtctttaacccactctgtcttaggagagactttaactccaccaagttgggcctgtaacccaatcctatcctttgcccgggtgtatgcaccccgcttacccaaagttggccaatcagtgctgcagtctttgggttggagggtctccgcagtatcgtcccttccgtagttcatcagaaagacgttaccagaccccaccgctttgggtcgggatttccttagtattgtcccttctgtggtcaccagaaagatgttaccagacgggggtcctgatccagaccccaagagaggattcttggatctcacacaagaaagaattcagggcgagttcatacagtaaagtgaaagcaagtttattaagaaagtaaaggaataaagaatggctactccatagagagaacagcctctagtaataacatttaaatatcctgataatcatactgtgtattctttatgtcctgctaaataattacctgttgaactaatggagtgccagaagattgtcaaaatagtgctgataactgagaagagtcaatatcaagatattacacaaatcttatcaaaactatttagtgtatctgaaagactgggataagaaaccacctttaaagtatactattttggaagaaaaaacagaaatcagatttcttcctcagttcatatataatacatattctagatggattaaaaatgtaaatagggccaggcgcagtggctcacgcctgtaatcacagcactttgggaggctgaggtgggcagatcacgaggtcaggagatcaagaccatcctggctaacacagtgaaaccccgtctctactaaaaatacaaaaaattagccaggtgtggtggtggacgcctgtagtcccagctactcgggaggctgaggcaggagaatggcatgaacccaggaggcggagcttgtagtgagcctaggtcacaccactgcactacagcctgggtgacagagcaagactctgtcttaaaaaaaaaatgtaaataggaaaatggatatgttaggactcttagaaaatatcaaggcgctcatgataggactcagctgcatctgtctgtctctctggccgtactctggcagtggctgaattagggcagctgggatttgatgcacctcctggttctcagacacttatagacactatgctccagaaactctaagttagataaagctgcacagaaaagggtcaatcagaaaaaggtaaataagactgattgaatgactacagaaatcctaacagaacacagatcttcactgaacttcccttataagcagccaaaggaaaagtgtttccaacttctaagacctcagacaaggctgggcacagtggctcacgcctgtaatcccagcactttgggaggccatggcgggcagattgcctgagctcaggagttcgagaccagcctgggcaacacggtgaaaccctgtctctactgaaatacaaaaaattagccaggcatggtggtgtgtgcctgtagtcgcagctacttgggaggctgaggcaggagaatcgcttgaacctggaagatggaggttgcagtgagctgagattgcaccactacactccagcctgggcaacagagcaagactccatctcaaaaaaaaaaaaaaaaaaaactgaaaaaacaaaactcaggcaagaattgctctgtgctcttgatgtggcccccacacattcccttcataacctggaatccctgctgtagtgtttcctcttacctggagcacctaaaagatgagggagagtcagaagtggtatgtgttagtctgttctcatgctgtcaataaagacatacctgcaactggataattcataaaggaaagaggtttaatggactcacagttccacatggctggggaggcctcacaatcatggcaggaggtgaaggagaagcaaaggcgtgtcttacatgacagcaagcaggagagcctgtgcaggggaactgctctttataagaccatcagatctcgtgagactttactatcacaagaacagcacgggaaaaacctgcccccatgattcagttacctcccgccgggtccctcccaccacacatggggattatgggagctacaattcaagatgaaatttgcttgtggacacagccaaaccatatcgtggtagaactttacaattggaattagaaaaacaaacacttcagctccaacatgtaaagagcttgaaagttatcagtcatatccaaaaagcaagaaaaaggctaaacaaaatgaaagtcagtggttttagaaccatcagagaattgaggccatggggcaagccttcactctaaaatctggacaagcatgcaagtatagtgagtcacagccagatcagtttacctgctggagccctaacacttgcatgggaattytgaaaaatggctgaggctaagtgtgggccagtgtgcaagtgagaaactccttggggccctgtcttagagggacctcccactttcatgggttttgcctccaggaacctcaccaagttcccacagtaaaaatccaagaaaaaaaaatccctcatgttttacagcagtgggaggggaaaagtaaccaatttgaaagagatccagagcattctatyctccctaacagaagaaatcctaactccaagggagatgttgccagaaccttttttgttcagggggaaggtagttagccaaccacaaccccctttagtcttcccatttcacctaaggggagggggaaaaaaaacaacttagaaatacttcgcagcacaaacacaggaccactaaaagacttgagatttaatcacaagtttatagaatgctttccctcccccataccctaccaycatgttgcaatggtctaaatatttgtatccctccaaaatttacatgttgaaacctaacccgctatccccaagtattaagaggttggggcctttggcaggttattaggtcctgagtgctctgccctgatgaatggaattggcttcagtgagcgcaggcactttgtctctgctcacctctgtacacccagcactagttgggagcctcctacgtaatattaatagatgctcgcagccataaaaaaggatgagttcatgtcctttgtagggacatggataaagctggaaaccatcattctcagcaaactgtcgcaaggacaaaaaacggaacaccgcatgttctcactcataggtgggaattgaacaatgagaacacttggacacaggaaggggaacatcacacaccggggcctgtcgtggggttgggggagcggggaaggacagcattaggagatatacctaatgtaaatgacgagttaatgggtgcagcacaccaacatggcgcatgtatacatatgtaacaaacctgcacgttgtgcacatgtaccctagaaattaaagtataataaaaaaaaactataagtgtatttgcaaacatattggaaaacatggaaaaaacaatgaaaaggatttcagtcatatagcaaaatagctgatttgtgttatgtcaatagctttcttctcacgtttgttctgtctgcttcctatacttagcaataagaagatactgtaattatttcacttatctacccctctgttcttaagtatctctttttcctataattttgttatgtaaaaggtaaggtttagaatgtgccactcagacctcaactttccattgtggattatgcaaggccacaaagatttcgtacaactatgatgggacaaataaatacaaatttgtgaacaacaacaacaacaaaaatcagtgatcctgaacatagataaatagaactttcccaaacggaaatgcaaggagaaataaaaatgaaagaaaaaagagagaacagaatatccaagaactgtgggacaatttaaaaggatgtaacacgttatttgaataccacaagaattagaaagcagcaggagagatatttgaagtagtaatggccaagaattttccgaagttgttgacagatgcaaaactacagaaccaggaaactcagaggacaccaagaagaataaataccaaaatatatacatctatgcacatcatcttcaaatgcaggaaaagaaagacaaatagaaaatactgaaagaagccacaaggaaggaaaatactagaggaataaaaataagaaatcttatcagaaaccatgcaagaagagagtggagtgagatataaagtgttcagagaaaaactactaacctagtcttctgtatccagtgaaattatgcttcaagtatgaaggagaaataaagactttcttagacaaacagaaatgaagagactttgtcaccagtagacctgtcttgcaggtcatattagtagatgttctttagagtgaaataaaatgttttaggtcagaaacttggatctacataatagaaaagaattagagaaggaataggtagaagtaaaatattttcctatcctaacataggaatattttcctattttgaattgatttaacagataacagtttgtttaaaataatggcaataacgtatttggtgattatatagcttgtggataaagaggaaaagtcaacaaggcaagaaaactaaaaagaaaaaatcagctccaagaattttattaagagaatgtattggacaggttggaaaattcaaaatgggaacattcagaaaagatgatatatcaagaagataaattctttttatttttgagacggagtttcactctgtcacccaggctggagtgcagtggcacgatctcggcccactgcagcctccgcctcccaggttcaagtgattctcatgcctctcagcctcctgattagctgggattacaggtgtgtgccaccacacctggctaatttttgtatttttagtagagacaggatttcaccatgttgcccagctggtcttgaactcctggcctcaggtgatctgcctgccttggcttcccaaagtgctgggattacaggtgtgcaccaaccgtgcccagcaagaagacaaattctttgaagtggttaaataaaatacttcatgaagtaaacaagaatagaaatgaactattgtactgaagcaatacatttataagacttcctggcattttttgtctcttctatgtttgacagtttttattttaaaaaatcaacaggaaaacatatttgctgatcacttctgtattatggcgtattatggtggtraataggtgaagtgaactacagtgtgaccatatcacaaacctaccgagaagaatttcatgttcaccaaatagtccatattagccttatttccacaaaagttatgtgcattcactcttaatatgatttgtcataattttactattttataatcaacatgtaattacctttgttggttgttgttgttttttccttagagatggggtctgactttatcagccaggctggaatgcagtggcgcaatcgtagctcactgctcactgccaccttgaattcctgggcttgaggaatcctcccgcctgagcctcctgagtggctaggactacaggcatgtaccaccatgcctggctaatttataaaaaaaaattttttttagaaacagagtctcactatgttgcccaggctggtcttgaactcctgggttcaagcagtcctcctgccttggcctcccaaagtgctgggatttataagtgtgaggcactgtgcccggcccttttttgggttttattatgatttattgttcatgtatttctgagatactaatggtccatattaatttaatacatttaacttttctggatgagccattttaatttcagtcttctatattcataaaatctaactgtaagagttgcttaaaaacaaaaagtcataaaaaatttttcattggtcttttgacaatataggaagtgactataatttgtaattttgatgtagtcaaatttgtcagtcttttctttgacagtttgtactttttgttacgtatccctactttagtctctattttctgtcttttaaaaatatttatttattcattcattcattcattctcctttaggttggagaagtgtcttaattgccattttatgtagagagattttttctctttaatattcatcctacaaatggtaacattttcattgagttttacaagattatagtttctttgttttgacagggtctctcactctgtcacccaggttggaatgccgtggcacaatctcagctcactgcagccacaaccttctgggctcaggtgatcctcctacctcagcctcctgagtagctgggactacaagcatgtgctaccatgcctggctagtttttttgtagagattggggtttcaccatgttgcccaggctcatcttgaactcctgggctcaagcattctgcctgccttggcacccaaagtgctgggattacgggcatgagccatctcatttggcctgtggttctttttctaagtccataacctctaatttgaggtcaaaatatcagatcttacttaaaggaagtaaaaatggagaaatcctggtgattgtgcctaacagtttagcttaacgaatgtgatatttatcacccctaacaaatatattaacatacatgtttgcttttatataggcatgtagaagtccaggtgtttggtgatcaccatggcaatgctgtgtacttgtttgaaagagactgtagtgtgcagaggcgacatcagaagatcattgaggaggccccagcggtaaggaccttggaaagaaatttgtaagcttctccrtaatgtgaatcttactctgattttcacatcagaaatctgtgratctggtgtctctcacccctcaaactcctgctggacaactgttgcctaatagcagtgtagtgaaaagacctcctgtggtattggggatgaggaggagattgatgttctgggggtagacacaacagggtcatgttccttctggataaaatatgggaaaatctactctgattcacctatctgatttacagcgaaaagctgtctagtgaggtttcaacgcacattttaaattgtaatgaatggccaggcgcggtggctcacgcctgtagtcccagccctttgggaggccgaggtgggtggatcacctgaggttgggagttcaagaccagcctgacccacatggagaaacccccatctctactaaaaatacaaaattagccgggcttggtggcgcatgcctataatcccagctacttgggtaggctgaggcaggagaattgcttgaacctgggaggcggaggttgcagtgagccgagatcacgccattgcactccagcctgggcaacaagagcaaaactcttgtctcaaacaaaaaaacagaaaattataatgaactagaattaattactggaatggaatgatctgattaattgaatctattttttgtggaaaagccttttttaattaccatttcagatgttctcaaaatatgtgagagattttcctgccttactggttatattatagagaagagagagtctctcgtttggcagcgtttgctcatttaacatttgtttatatctctttgagccttactcttgattggtttaggtgattatctgggtcaaagcctactactaggactacctatttttggatttacatttctgtggaggttgctactgccatgggttcttgttcaacgttatatagattttttttcaataaatatttatttccaaaaagtcagggatcagaggtttctggttaatcaatacatttttcttataccatattcaaattttaatttatgttgcagaatatatttaacttatgttgtagaatatattataacattatatattataccagaatatgttatgccatgaatattgacatattaaatgtcaatagaaattgcagtaaagccttattttcaagtcgtgattacttaaatttatatctgtatagcactgtttttaaaaagttaaaaactttgtttacttctagacatacatttattttaatgtacctttcttattaacttggaatctcaaggtttcccattattttaagataatcattaggcacatcactcagattgcttatcatcctgaaacaaaataaggattgttgaaagttaccatattgatacgtatagttttgttttgtttttttgagacagggtctcgctttgtcatccaggctggagtgcagtggcatgatcataactcactgcagtctccaactcctgggctcaagcaatcctcacctcagcctccagagtatttgggactacaagtgcatgccaccatgcctggctaattttttttttaatgtattgtagagatggggtcttactgtgttgaccacgctggtctcaaacttctggcttcaagtgatcctttaacctcagcctcccaagcacttggattacaggcccgagccactgtgctcagcctgaaacatataattataagtggacatatagttatgaaagctgtcatgtagatacaagggacaaagatacgtaattatgctgagtaatatctgcaatgcatagaaattagtagcagaatcattaaactttggtatattgacagttaaactatcataggacagtttttgatgaagtatataatattagctttttatcctttttttttgagatggagtttcgctctgtcacccaggccggagtgcagtggcgcgatctcagctcactgcatcctccgcctcgcgggtttaagcagttctgtgcctcagcctcccaagtagctgggattaaggcacccaccaccacacccggctaattttttttttttttctattttttagtagagacggggtttcaccatcttggccaggctgatattgaactcctgacctcgtgatccacccgcctcagcctcccaaagtgctgggagtacaggcttgagccaccgcacccggccagctttttatcctttttaatgcagaatttggtacacagaaatataatacagtcatgcattgcttaacaataggaatacattctgagaaatgcgtccttagttgattttgtaattgtgttaacatcatagagtgtacttaaacctaaatagcaaagcctaccacacacctaggctgctggtagagcccattgctcctaggctacaaacctatatacagcatgttactgtactcaatactgtaggcagttgtaacacaatggtaagtatttgtgtatctaaacatatataaacgtagaaaaggtacagtaaaaatacagtataaaagattattaaaatgatacacctcctatgtggaatacttaccatgaatggagcctgcaagattttcagttgctctgggtgggacagtgagtgaatgtgaagacctagtacatcactgtacacttggtaaacactgtatacttacagccaattaaatttataaaaaatatttttatttaataaattagccttagcttgctataacttttttgctttataaacttttaaattttgttttcacttttgactctttttaataatacttagcttaaaacacaaacacattatgcagacatacaaaaatattttttctaggccgggcgcggtggctcacgcctgtaatcccagcgctttgggaggccgagacgggtgaatcacgaggtcaggagatcgagaccatcccggctaacacagtgaaaccccgtctctactaaaactacaaaaaaaaatagccgggcatggtggcaggcgcctgtagtcccagctactcaggaggctgaggcaggagaatggcctgaacccgggaggcggagcttgcagtgagccgagatcgcgccactgcactccagcctgggcgacagagcaagactctctcaaaaaaaaaaaaaannnnnnnnnnnnnnnnnnnnnnnnnnnnnnnnnnnnnnnnnnnnnnnnnnnnnnnnnnnnnnnnnnnnnnnnnnnnnnnnnnnnnnnnnnnnnnnnnnnnnnnnnnnnnnnnnnnnnnnnnnnnnnnnnnnnnnnnnnnnnnnnnnnnnnnnnnnnnnnnnnnnnnnnnnnnnnnnnnnnnnnnnnnnnnnnnnnnnnnnnnnnnnnnnnnnnnnnnnnnnnnnnnnnnnnnnnnnnnnnnnnnnnnnnnnnnnnnnnnnnnnnnnnnnnnnnnnnnnnnnnnnnnnnnnnnnnnnnnnnnnnnnnnnnnnnnnnnnnnnnnnnnnnnnnnnnnnnnnnnnnnnnnnnnnnnnnnnnnnnnnnnnnnnnnnnnnnnnnnnnnnnnnnnnnnnnnnnngttttttttttgagacagagcctcactctgtagcctaggctggagtgcagtggtgcagtcttggctcactgcagcctctgcctcctgggttcacgccattctcctgcctcagcctccagagtagctgggactacaggcgcctgccaccacacccggctaatttttgtatttttagtagagacggggtttcactatgttggccaggctggtctcgaactcctgacttcatgatccgcccaccttggcctcccgaactgctgggattacaggcatgagccaccgtgcctggcccctatttttaaatttttaaattaaattaaaattttttgagatggggtcttgctgtatcacccaggctggagtgcagtggcacaaacatggttcactagacccctgacctcttgggctcaagtgatcctcccacctcagcctcctgagtggctggaactataggtgtgtgctatcatgcctggccaatttttttatttttgtagagacagggtctcgccatgttgctccatggtttgattcttgccaggctggtatcaatctcctgggctcaagtgcttcacccgtctcggcctcccaaagtgttgggattacaggggtgagccaccacacccggcctgttttaactttttaaccttttctgttaaaaatgaagacacaaacacacccattagactagacctaaacagaatcaggatcatcagtgtcactgtcttttctccacatcttgtcccaataaaagttttcagggtcaataacatctatggagctgtcatcttctatgataacaatgctttcttctgaaatatctcctgaaggaactgtctgaggctgttttacagttaactttttttttaagtaaaagggatacactttaaaataactataaaaattgtatagtatagtaaattaaaaaaacaatagcgtggttgtattatcaagtattatatacggcacatgattgggctgtatttttttttttttttttttttttgagacgaagtctcactctgtcacccaggctggagtacagtggcgtgatctcggctcactgcaagctccgcctcccagggtcacgccattcttctgcctcagcctcctgagtagctgggactacaggcgcccgccaccatgcctggctaattttctttgtatttttagtagagacagggtttcaccgtgttagccaggatggtctcaatctcctgaccttgtgatccgcccgcctcagcctcccaaagtgctgggattacaggcgtgagccaccgcacctggctgattgtgctatacttttgtataatggcagtgaagtcgttttgttgacaccagcctcaccacaaaacacatgagtaatgactgtgctgtgatgttatgacagctacagtgtcactaggtgatagggatttttcagctccattataatcttatgggacaactgttgtatatgtggtctgttgttgactaagaaacgtcattatgtggcacctgactgaattgaattttaatggaatttctagtaaggcaagctactaatggagatttatttacatatttttttcatagcctggtattaaatctgaagtaagaaaaaagctgggagaagctgcagtcagagctgctaaagctgtaaattatgttggagcaggtaggttaagatttgcttctaatggaagagacgtaacagtgtttaatttatgttttagaaggcaagagaaacacaacttttaaatcagttgctttcaagctgttttgaccatattcacagtaagaaatacattttatattgagacttagtatgtacacataaatgtttatttttacatacatatatatttgaaacaaatgtttcattaaacagtacttgtcttaattatatgagttttgatattttgtattctattttaaaatcactagattgatttttttacttctttatggttaataaactttctcttttagagcagttttaagcttacagcaaaattgagcaaaaggtacagagaattcccatataccccctgtcccccactcggataccccccaacacacaagctcccacagtatcaatattcctgcaccagagaggtacgtttgttacagtcagcgaccctacattgacacatcattatcacccaagtccatagtttacattagggctcactcttggtgttgtacattctgtgagttttgacaaatgtataatgatatgtatccaccattgtactatggtatagaatagtttcagtgccctaaatatcctctgtgctctgtctattcatcccttcatcccccctaaaccccggcagccactcatgtttttactgcccccatagttttgccttttcaagaatttcagatagctggaatcatacagtatgtagccttttccgattggcttctttataatatgcatttaagtttcctccatgtcttttcatggcttgatagctcatttcttttttatgctgaataatatttcgttgtctcgatgtctcagagtttattatctatttagctactgaaggacatcttggttgcttccaagttttggcagttatgaataaagctgctataaacaccctgaaaacaaacaggcttttgtatggacataattttttagtttatttgggtgaatactaaggagcgtgctactgggtcacatggtaaaagaatatttagttttggaagaaactgacaaactctattctaaagtgactgtactattttgcattcctgtcagcaacaaaagaggtttcctgttgctccaaatcctctccagcttttggtgatgtcagtgttttggattcaggccatttggtatctcattgttttaatttgcacttccctaatgacatacagtgttgaacatcttttcatatgcatacttgccatctttatatcttctttgatgaagtgtctgttcaggtctttcacccattttttaatcaggttgtttgttttcctattgttgagttttaagagtcctttgtatattttgaatgacagttctttatcagatgtgcctttgcaaacactgtcagtctgaggcttgtcttcacttctcaactttccctttctttttttttttttttttttttgagacagagtctcactctgtctcccaggctggaatgcaatggtgtgatctcggctcactgcaacctccgcctcccaggttcaaatgattctcctgtcccagccccctgagtagctgggattacaggcacgtgccatcacacacccagctacttttttgcatttttagtagaggcggggtttcaccactttagccaggctgatctcaaactcttgacctcaggtgatccgcccacctcagcctcccaaagtgctggaattacaggcttgagccaccgcrcccggccgactttccttttcacagagcagaagttttaagttttaatgaagtccagtatataaattatttgtagatcatgcctttggtgttgtatataaaaagtcatcaccatactcaagcttgtctaggttatattatactcagctggccttgtgctttctgttttggaaggttattaattattgacttaatctctttaataaatatagctattcagattctctttttttaatttaattttatagagacagggtctcatattgcccaggctggtcttagactcttggccccaagggatcctcctgccatggcctcccaaagtgctgggattacaggcgtgagccaccatacctggcctatgctcactgcaacctccacttcctggactcaagtgatcttcccacctcagcctcccaagtagctggaactacaggcatgtgccacaacactcagctaatttttaaattttttagtagagacagggtccccctgtattgccaaggctggtctcaaacccctgagctcaagcagtcttcccaccttggcctcccaaagtgttgggattacacacatgagccactgcacctggccctaggttctctctttcttgtaggagttttgacagattgtgtctttgaaggaattggttcatttcatctaggttatcaaatttgtgggcatagaattattcataatatttctttattatcattttaatgtccatgggacctgtagtaatagacctctttttgttccgttactagcaatttgtattttctctcttctttttttcttagttaacctggctaaaggttattgtgcttttgtttcttttcttttttcttttttttttttttgaaacaaagtctcattctgtcgccaggctggagtgcaatggtgagatcttggctcactgcaacctccgcctcctgggttcaagcaattctcctgcctcagcctcccgagtagctgggaactacaggtgcacgccactacacccagctaatttttatatttttttagtagagatgggtttcaccgtcttggccaggatggtcttgatctcttgaccttttgagctgcccgctgtggccaaggktactgattttattgatcttttcaaggaactggtttgggttttggkgatttttttctattgattttccattttcaatttcattaatttttgctttaatttttattatttcttctgcttactttggatttaatttgctgttctcttctcattaattaaaatataagcttagattcttgattttggtattttcttttctaatatatacattcaatgctataaatttcccactaagcactgcttttgatgcattctacaaattttgaaagttgtatttttatttagttgagaatattttaaattttttcttgagatttctttattgattcaggtgtcatttagaagtgtgttgtttaacatccaaatatcttaggattttccagatatccttctgttagtgatttctagtttaattctgttatgttctgagagcagacactgttatgatttatattcttttaaatttgttaagatgtggtttatggtccagaatgtggtctatcctggtgaatattcctttctagcttgagaatgtgttctgctgttgttggatgaaatagtctatagatgacagttgtatccagttgattgatggtgttgttgaattcaactatgtccttagtgattttctgcctgctggatcatccatatctatttaataacagatgggtgttaaagtctccaactgtaatagtgaattaatctatttctccttacaattcttttttgctacatatattttatgctctgttgttaggtacatgcatgttaaaaattgttatgtctacccttttatcattgtttaatgcccctccttatccctgataactttccctgctctgaagtttgctctaaaattaagatggctactcgcactttctttggtgttagcatattctttgtctgtttttactttaagtctataagtctttaaagtggatttcttgtagataacatatatttgtcttttgttttttaatctactccaacaatctctgtcttttaattggtatatttagacatcaacatttaaagtgattattaatgtactttgattaatatttaccatatttattattgttttctgtttattccccttgtttgttcctatttttatctttcagactttttctgcctttcatggttttaattgagcatcttctatgatccaatttcctctccttttttagcatatcaagtacagtcatatgctgcataacaccattttattcaatataacaatggttccataagattaaaatgcagctgaaaaattcctatccagtgacattgtggcaactgtaacatcatrgtacaatgcattactttctttaggtttagatatatgtagatacacaaatacttaccactgtgttacagttgcctacagtatgcagtaacatgttattattgtttcaaatattacttctgttccttcctttcttctccttctggtattctcgttctgcgtagttaataccttttgtagttgtcttgcagtgctaggtattgttctgtttaaggttttttttctcactgtttttcagaattggaagtttctgttgtcatatcctcaagttcagaggttctttccctgccatacccaacgtactaatgagcccatcaaagcatgcttcatttctattagggttatggttttttttttttcaattctagcatttcctttttattctttcttaaaattttcacctctctgcttacattatctatctgttcttgcatgttgtctacttttttcattaaagcccttagcctgttaatcacagtttagaatttctgtgtctgataattctaacattcctgccatacctgatgcttcttcagtctcttcaaactgtgttttttgccttttagtatgccttgtaattttttgttgaaagatggacatggtgtactgggtaaagagaattttgctaaacaggcctttggtaatgtgataaggctggagggggcatgttctcttgtcccatgatcagatctcagtcttgctgagcctgtgcccctggtgtgtgaacttcaccagtgcttcctggtatgtttttgttttgttttcccccaccccttagggtggacagtatgtctggcaaaggctggagttgggtatttctcctcccccagtgaggttaggctctgataaaatcccaatcgtttaggctctgataaaatagtttttctcaagggtaaaccttgaatgttttggtgtatttcaaagtggtttcatttcccttctgagctggaagcatgggaggatttttctctgatattcactgtgaagacctggtagagctcctggaggtaaaactcacaaaagtgtgaggtcctcctgtaactgggtcgccttggagtttttaactctcagagttgtccacactgagctaccaggaatttgtcaattacagctcaggcttctcctcatggcatctctgtatctgcctgtcagttgtctgtctctctggttctgaggacaagcagcttgccctgtgacctgatttctctgacaaatttaaaaattgttgattttcagcttgttcagctttttacttgataggacagagtggcagcttctaagctccttagatgccggatcagattgattttcaaattgattttaagctgggcacagtggctcacacctgtaatcccagcactctgggaggctgaggcaggtggatcacttgaggtcaggagttcaagaccagcctggccaacatggtgaaaccccatctctactaaaaatacaaaaaaattagctggacatagtggtgtgcgcctgtggtcccatctactcaggaggctgaggtggaggaattgcttgaacccgggaggcagaggttgcagtgagccaagatcacgccattgcaccccagcctggatgacagagtgagattccatcttaaaaaaaaaaaaaaattgattttaaaatccactaatgggttgtgaccacacttttaaaaacaactttacattgtattcactttaagctaagagaaaaacacagaaacacagaagactacaaactatatgatttcatttatataaaattctagaaaaactatagtgacagaaagcagattggtggtttcctggatcccagggtttagtgaagggactgattccaaatgggaacaagggaactttttggatgatggaaatgttctgtagtttcattgtggttctgtgattgtattcaattgctaaatcacatgcctacacttcaaatagttacagtttgttgtctaaaattaaaccttaataaagttaggggaaattttttagagcttaatagaatgccaatagatattaacataaggtttagttgccaaacaatctttcaatgggttaccagcaaaagggctttaaaaagaaattcctaggagcccacaatcagggaaaaaaaagttttctttttctccatggggttagggtgagatgggatgtcatggtatgakgctcccaggatcttggtgctctgaggcagtaacatgtggtccacccttgttctcactgttacaagctgaaayggattcataatttgggcttaccatttgctcacaaccccaaatatacttttccgttgccaaatttcatgcagctctctatttttgactaagattcatatgctgctgcaaatgcgagatgttttcttcatgaaatgcaaagtgttaccattgaatgaagacagcggtaaaacttgatgtgatgcatcatggaagattttggtttgctactgattatacactattgaatatgaccattgttttttaccttttagggactgtggagtttattatggactcaaaacataatttctgtttcatggagatgaatacaaggctgcaagtggaacatcctgttactgagatgatcacaggaactgacttggtggagtggcagcttagagtgagaatattttttctattaaaaatcagccttggctgggtgcggtggctcaagcctgtagtcccagcactttggcaggccaaggcaggtggatcacctgaggtcaggagttcgagaccagcctggccaatgtggtgaaaccctgtctctaccaaaaatacaaaaattagccgggcgtggtgccaggtgcctgtagtccccggtactcaggaggctgaggcaggagaatcactgagcctgggaggcagaggttgcagtaagccgagatcgcgccactgcattccagcctgggtactccatcttaaaaaaaaaaaaaaaaagatcagtcttgatgggagggatgtgagggctgaaaaactacctaaatggtaccgtgttcactgtttgagtgatgggttcatcagaagcccaaatcccagcattatgcaaaatacccatgtagcaaacattcacgtgtaccacctgaatctataattcaacaacaacgacaacaacaacaacaacaacaacaaaacagtcttgagaataggttactaccttctggcctcctaaaacaggtgtcattttggacggggttcagttcttggtggttatgaggacaggaagatgggaggttaaaagtgaagccacatttgatgctgtagctttttttggcactttagggactcagattcacttccccctaggcccgggcagccagcaggtgagattgtgtcacaggggcttgctcacaaccacatcacctcaaggtcaaagcctcatggtctacytaaggccacagcattctgggccaggccatcattcggtttcagatcagggcagatactaggcaagatgaaatgagctaaggcagagttgggaatgaagagccaaggagatggtctagaatgatccaagtaaagtgcggatttatggctgttgcgggcccatgagtaaatgttcattcagagtaaatgtttggaaacttttaaagcattttggcattgctatgacatgcctactgtatttttcaaacatgtaagtttataactgttcttttactatggatagtttgagaagcactggtrtaaaccagaattccacaaaacatacttctcaaatattaataatagcttagtctgtttttgttctcataagaacaatagattttactttagccttctttttcctaacatgaaaaaaatctgttaagtaatatagacggtcctgatatatgtaggattcgtggttccttgtatatcctgcatctaaattgttttttcctggtgtgacgccaaaatcttgattattttggtaattttatcttttcagaacttctgtagataataatatgatactccttttgttggttccttgggggtgattggtggttctaattgagccaaaaggttcttctagggctctatatcctagggtgttaacgaaaaccaggcacagcaagctggtaagttttagtgagtgtcaagaaaaactgtagtggctttggaaacttctggaaggagtgtttatatttccagaattcaaggaaaaggaggataatttttctgaagcagtaaatcaagagagtttcgaccttggaaatcataagagaaaaaaaggtttctaagggttaaggaaggagaaagcttttgggtattaaggaaaccagcagacatctatttcttgtaagagcttgtcaaggctcttcagaaagagaagccagcttttatcatctggggagggacactagaacttagggaagctgctggacctggtttatagagttcaaggcatttggcatctggccttcaaacagaggtaaaacaaaggggctcaccatttggtgagtcaagagtctaagctcgaggacctgcctgtgcagtcaagccttcctagaacaagggttgaatgatgactgatgtaagtgtcctrggttcaggctgcagatacagatagttaacagtgttcagggaaagctggtgaaaatgtcaaggttaggggttccggagagccagtgtcagcctgagagaactcaaatggcacatatctccaaagacccagaggcatgattggggcctgtcttttctgggctcaagtggaagccaagcttggaggaaaatggacaggcaaagacaagtcaaggtgaacacaagagacagagttttgctctttttgcccaggctggagtgcaatggcgtgatagctcactgcaacctctacctcccggcttcaagcaattctcctgcctcagcctcccgtgtagctgggattacaggcgtgtgccaccatgcccggctaatttttgtgtttttagtagagacagggtttcaccatgttggccaggctggtcttgaattcctgacctcaggtgatccgcctgcctcggcctcccaaattgctgggattacaggcatgagccaccacacctgacccrgaattatttattaaaacgttaaaaaactggttccaagtctattgtgaacagtgctgcaataaacatacacatgcatgcgtctttatagtagagtgatttgtaatcctttgggtatatacccagtaatgggattgctgggtcaaatggtatttctggttctagatcctaaggatggaatgataataggtaacatagtgctgactgtatgccagacacttttctctgaagcatggaaagcttaagaaacttgtctagatgacaaagtaagtatagagacaaaatttgaacctaggcaatctgtctgcagagcctgaggtgttttcaaaatatactgccataaaggtattacctagttccgtttcctttcattcttaactgctgtgcatcctgatctttcatatttacagattcagaaaaatgaaacttttgcttctgttttatacttaccggtttagttcaatgtcatgctaagttacttagagtctagattttcctgtatctatattgctttctcaggttgtcattttctcatcttggaaaaaaacttaagagtaaagagagaaagtgcaatgtgtcctccaatagccatttccaatttatactagttaattgaagagagtgatttgttgtattggtacataataactaaaatagtaataattatagtaacaacaaacaatagtgatcaccctgtttgtaatctggtatcatgcagtacmtatcaacataacaaaattgaaaaaccatcattttcccctttctgttttgctttatcacccacttactggtgaagattacagcgtaggatgacaatgtcagctacactttttgcttggctgtgaatctagtcctaaacactaataatatactattttttaaaaaaaattgatttgggaattaagtgctaatgttttaaatgaaaactgagagtgtgttgctagtaagaagttttggttttgattatattgaacaaacactgatttttatatttgtaagttagccatcactttgcctgcttttgccatttaaaaactccrataccccaaatgatagactgttgccaagctgcatctgttttttrattttttgttttgcccaatactcaaatgagtagacaaaataatagtttttatttggctgcattgcaaaacctaaatgtacattttacctagaaaaaaagcaagaccattgatttactaagtctggtagccgctatacggtagatttcataagaaacactattctattgccagattgcagcaggagagaagattcctttgagccaggaagaaataactctgcagggccatgccttcgaagctagmatatatgcagaagatcctagcaataacttcatgcctgtggcaggcccattagtgcacctctctactcctcgagcagacccttccaccaggattgaaactggagtacggcaaggtaaagtgaaagaaaatgaaaagtctcactctttttaagtttttagtacattattgtttttggacacattcttatccctgagtcttacagaactgtctagcatattttaaaataaagaatttaagtgatttctcagtaaccattactttttgcctctggaattgttatttttaaagaataacaagtatttttcaacaacggactccttttttttgaaattcagcagtacttggtcaaacctaaccaggaaatattttrtgtgtactgttcttgaccttgcctcattccaaaaatgatttaagatgactgatatctgctatgcacaaggcagactgccttcaaaggacataaagtcaagttggagaattaacacataaacttagtataagctaaacaataaaaaaattaaagtaaagaaacagtggaagagctatcacagttcagcatatgattaataacagtggtcataactagtgattatttaggacttcctacttacaggcactgctctaggtgatttttctacttgtgttcctttcaccatgagaagtaccctgtaagtaggcattattatcatccctgttttctagatgaggaaactggagcacagaagagttaagtgacttgtccaaggtcatccttggagccaagattcagacccaggcagtcttgctccagagtcagtgctctgagcctccacggtctcctgtcatcttaatttcaattgctggaataagttatacagtgatgggatatagcaattctcaggggtaagaggtcacactagactgatataattaggacaagttttttgtttgtttgtttttttgtttgtttttgtttttgagacaaggtctcactctgtgcccaggctggagtacagtggtgtgatctcagctcactacaacctttatctccctgacttaagcagttctcaggcctcagcctcccgagtagctgggattacaggtgtataccaccatgcctagctaatttttttttttttttttgtatttttagtagagacaggttttcaccatgttggctaggctggtctcaaactcctggcctcaagtgatctgcccaccttggcctttcaaggtgctgggattacaggggtgagccaccgtgcctggccaggacaagtttttaagaggatgtctggaatggatttagataggtagatttaaacagcataatgaagagtgaagaaaagagaaaaaggtatgtttgaagaatagtaagaaaatatatgactggagacatgggttgaaggcaaatcctagtgtcctaaaagccaaaatgaggatttaggtcttcttaaaaataaattggcagcattttgagagctctggataagccacagcaagatttggtagttagtagactttttaacttagcaaagcatcttaactctgcttgccccaccggttccttccttttttttttttttttttttttttttttctgagatggagtttcactcttgttgcccaggctggagtgcaatggcacgattttggctcactgcaacctccacttcccaggttcaaatgattctccttcctcagcctcctgagtagctggaattacaggcacccgccaccacgcccggctaattttttgtatttttagtagagacagggtttcactatgttggccaggctggtcttgaactcctgactttgtgatctgcccacctcggcctcccaaagtcttgggagtacaggcgtgagccacctgtaggcacctctaatcttatcaacgaggactctggggttcaaagaggtcaagtgacctgccaaaatcctggaaagaccctgcaacaacgttcttttcaacacaccacatcctttctacttgaaccatttctaaccagtggaatgtgccctggttcagattcttgttctctaggactgtaaccatcccagtgatgatagctgccattggtttatcagctttgccaggtatggcacttgtcactttattgtcactcctcccagcaaccctgcaggacagaggaattattaaacttgcttgactagtacggaaactgaaagagtggaggggaggggaatgctaagggcagaaatgaggggaatgtgagagggtggagggagattgtgttgactttgaaaatgagaagggaaaagaagattcagaagaagataggacggggaaagccagcttgtgtgccattgaatcaccacgttagggcctggtgctgttgggtggcccacctcgttacacctggtgagttttcaaagccytctgaacctcagggtcctcatgaataaatttgtgttgttatttatcatgcaggggtttatgaggattaagyrtgaaatgtacataacaaaatgtcttgctcgttgtattttattccttcgtgttttgacttgaagaggttaccgtggttttcaatttcaggagacgaagtttccgtgcattatgaccccatgattgcgaagcyggtcgtgtgggcagcagatcgccaggcggcattgacaaaactgaggtacagccttcgtcagtacaatgtgagtgatctgagaccgtgccagtgaccttgatgtgtttggtcagcaccagaggtcagcctttgtctttggcagggccttggtctcgtcagcatattttctatttccatcaattgcccaaacaaaatagtttcacatgggagaattttgcgtgggccagaacagggtttgaggacttcttcatttcagttacaaaagaaagattgcagaagtaaaattgttagtgtcagtgctatgcttcggtgaaatcctattcactctgtagataaggccagctatacatggtaccttcgtaggttttttatttttcctaagagctgtccacagtagaaaatacttaggaaataaaagcagatgttttcctgaatgttgttttcgctacccagtatgcctgcagtccagtagtttttctctaaagtaaaataattatgttcagtttcatccctttaatagagtttgttatttttctgtagaacattaatttccttggtgcagaaagtcccataccacattgatttggctcatagaaggatttattaacccagttattcaacttgttattgttaataattgatcaaagctctggtctctgtggctccaaccacactggccgcctcaccgcttctgagactcactcagcatggagccatgcattcctgtccaatcttccagaatgttcttcccccacatgattgcagggctccctcctgactaccctgctctcctgctctgagccctttcccaggctgccccatttaaagtatgaccttttgttattctttatcctcttagccagccttcattttcttcatagcatgtaacattatattcaatacctgtttacagatattgttacttgttgccctagaatgtaagcagagactgtgaaggcagggacatcatatgttttgttcctcactatgtccccagtgcctggatcagagcctggcacttaagagatgctcaggaaatggctgttaaatgaatgaaggaatggatgagtgaatgaatgaacccaaagctcagatagctggttttacttttgatcccatttattggtgtatttgggttaattttataccttttaaaatttttgtatcggtatataaaatttggattttattgttggaaagaagctcttttgagggcatttaatcctatcctctccccagtatagcaatccagcttgctgtttgcagtcttcctattctgtggaagtgttctgagcagcaagtcttcgataccttgcaaatgaatttcatttatgtttcttaacatttattatgttcctaacctgagtcaagtaagtgcctcggtatttccagcatcctctttgtcatattaaaatgtaatttttagtgtcaagtccagatggatatagtaatagcggatggacatagtgatagtgagatggtttttttgtgttttttttcctgagaattgtcctgttgccacatggtaccttagtaggttttttatttttcctaagagttgttcacagtagaaaatacttagataaaaagagcagatrgttttctgaacatattgttttccccactcagcaggaactgggggtttattctcttcctagattgttggactgcmcaccaacattgacttcttactcaacctgtctggccacccagagtttgaagctgggaacgtgcacactgatttcatccctcaacaccacaaacagttgttgctcagtcggaaggctgcagccaaagagtctttatgccaggcagccctgggtctcatcctcaaggagaaagccatgaccgacactttcactcttcaggcacatggtatggaaggcttttctctttcctctgcttgtcaagttytgcaaatcatcattgaacatgcttttctttctgtatggcacactgacctctcttttctcctctcagtgactgacaccattcttttcagatgtgttttttagtatgaaggaaagctcttcacttaccrtggatgcacccataaacactatttaacccattaactggagtgtaactaatcacctaacattgtagaaatggatctctttggccrggcgcggtggctcacgtctgtaatcccagcactttgggaggccagggcggctggatcatgatgtcaggagatcaagaccatcctggctaacacggtgaaaccccatctctactaaaaatacaaaaaattagctgggcgtggtggcacgtgcctgtgatcccagcactttagaaggccagggcgggcggatcatgatgtcaggagatcaagaccatcctggctaacatggtgaaaccctgtctctactaaaaatacaaaaaataagctgggtgtggtggcacgcacctgtagtcccagctactcgggaggctgagacaagagaatcgcttgaacccgggaggcggaggttgcagtgaaccgagatcgcgccactgcactccagcctggacaacagggcgagagttcatctaaaaaaaaaaaaaaaaaaaaaggaaatggatctcttttcagtcaaacacttgttctccccacatcctacactaatttcttatcacttcttttgttcgccactcctcatagccctactttgttttgtcctctgtacctgcagcaactccctttgtcccagagtctcaagacaatctaagactggagacttagattccccagggttacccatgacttattgtcgaattacttccgctttttccatcctgtgattgaatgtctacctagagacttcatagtgtcatagaatccaagcataggaagggccatagtggggttcatcctggctaccacacatatgcattgcatccctaccccagcacacccactaagctgttgcccaacttcttcctaacaccttgggaaactggaagttcattacctcatcaggtagcttacagtttcagtcagttctccattagaaagttctgcctttaaaccaaacaccgcatgttctcactcataggtgggaattgaacaatgagatcacttggacacagggtggggaacatcacacaccggggcctgtcgtggggtggggggaggggggagggatagcattaggagatatacctaatgtaaatgacgagttaataggtgcagcacaccaacatgacacatgtatacatatgtaacaaacctgcaccttgtgcacatgtaccctagaacttaaagtattaaaaaaaaaaagttctgccctttaaattgatacaaaatctcagctctcacatactttttgcatttcaggctagctctgactttcggagcaaacagaatttttaaaaatctgatctatttttctcttttattggtaattattatattaccctatacagtttgagcatcccaaatccccaaatccaaaatgctccagaatcggaagctttttcagcactaacatgatgctcaaaggaaatgctcattggaacagttcagattccagatacttggatcagggatgctaagccagttaaatataatgcaaataatccaaaatccaaaaaaaaaaaaaaaaatctgaaattcaaaacacttctggtcccaagcattttgggtaagtgatactgaacccgtattattataggatcctatcattagaatctttaatttctgaattcatttagattcattcaagatagctgtatggaaagcttaaaatgtaaaatgttttaagtcccgaaaactgcatctttagaagatttgtgctctatcctcattttatccttttacattgaatgaaaatgcatctaaatacgtcccatgtggtattcctgagcctgaccttaacgtttttagaatggarcgttgtcttactgtgaccttccttttgaaagtttataattggtacagatatgaggttcagaataaattgcatcagcttagctatgctgaagctcctggatattgtccaatagaggatatacacccaaatgcctataaggggccaggcgcggtggctcatgcctgtaatcccaacactttgagaggcccagggcgggtggatcacttaaggtcaggagtttgagaccagcctggccaacatggtgaaaccccatctccactaaaaatagaaaagttagccagctgtggtggcacccacctgtaatcccagctactctggaggctgaggcaggagaatcacttgaacccaggaggtggaggttgcagtgagccaagatcatgccactgcactccatcctgggcgacagaacgagactcgtctcaaaaaagaaaaaaaaaaaaggcctataagggctgggccaacaacataaaaacataaaagagtaaaagaggccaggtgaaagaaaaatagtgaatagtagagactggtgacctggaatgaatttgccccatcaaaaggtggtgactgtggtacagtttatgccactatgggattagagtttagattgcaaatattcagattcttcaatagaagctagaatttttcacatgaaatttcataagatgtaaacaaaacyakccctttaaacttaacaagaagaacaaaaaaagcacatctgagctgccagtttaggacgtgtgtttttttttttttttttttttttgagacggagtcttgctctgtcgcccaggctggatccggtgcagtggcgcaatcttggctcactgcaagctccacctcccggattcacgccattctcctgcctcagcctccagagtagctgggactagaggcgcccgtcaccatgcccagctaatttttttgtatttttagtagagacggggtttcaccgtgttagctaggatggtctcgatctcctgacctcatgatccgcccgccttggcctcccaaagtgctgggattacaggcatgagccactgtgcccggccagcacttgcattttatgttttcttttgtaaggtgtaaatttcataggcttgatactcataagtttgttactgaattttaaattttttctagatcaattctytccattttcrtctagcagtggaagaagactgaatatctcgtataccagaaacatgactcttaaagatggtaaaamcagtaagtaatgtttcattaaaagagaaatgtgagtcatagaaatgtatcacattaatctgaaaaagaggattccagcctggccatnatcagtcagttacattttttaaatgcctaggctaaacattggagggaaatatgccaatataatagaattgattggctctgggtagtagagttgatggtatttgcttttcttctttacactttttaaaaattttgtaaatattctaaaaatatgtcataaaataaacatagcaaaacagctgaaatgaaatatgccagaatgttagaaatatgcccaaaaaaacctctttttccccaattctttgtacttttttttttgctttgcaatttttctgcagcgagagtgtattacttttaaataagaaaaacagttttcaaaactatgtcagagagggacgattacccactgcccatgcagtgtttcaggggtttcaggtggaagtgggtcactgcagagctgtaatttattaagtgccttatctgatgtaagtttttatcttcacaacgtaaatgagggggagtcgctgttatacccacgtatggaagatgaaagcatggatggtaaggcacagaagtgaagtagtttagtcaaggctagtgagtggcagaactaggattcacaccyactctttgtgacattgactcttaggctgtttccaccacttttccagtagaaaattgatttttgattgtaaactaatttgagttggctcgacttagtgactgattttctttaactgatgtcaaaagaggctgacgcttaagccagaaggcagtttataaacttttggctggagcagtgtagcagcaggaccagaattctatgatagctggtcactgtatcccttctgctgtgagacagtttgtgtgggaggcccaatgggcagagtcagagctcagaatcctggctaaccttgaatgtgacatgtcattgaactgtgacagttctggtataaaaatatgcctcccaggtagagcagaatactttcaccagctgatcacagaacgctcttccttggacagaggaaaatctcttttacttcacctctatgaagacactcacccagtaacaaatttttttttttttttttttgacacagactctggctctgttgcccaggctggagtgcagtggcacgatcttggctcactgcaagctccacctcctgggttcgtgccattctcatgcctcagcctcccgagtatctgagactacaggcacccaccaccacgcccggctaagtttttgtatttttagtagagacagggtttcaccattttagccaggatagtctcgatctcctgaccttatgatccactcacctcagcctcccaaagtgctgggattacaggcgtgagccaccatgccagccagtaacaaatattttgttcacacaagtttattgggttacagctcttcagttatttttcaatcctgagcctagatggtcattatcttaagtgcattgggcatattgttaagcctttataatgaaaatttgtaaacatctttatatagtagcattctgcaaatggttaacccatccatttatgctcatttcatcctaaaaaatacaaccccccaaatctggaagtatcttattctagactcctatatgctgaatgcaaatatcaaaagcggtaaagtttcactggcttcttcaacctgaattgaacagaagaattacatatttgattgtaattcatataggccaactgtgttatttggcatggctcttcactaaagcaccaagcactgatttgaagtatgttgcattttttggaattaaaaaaagttttcatgaaaaaataaatacataattgaaaagccaacatgattgctgttcactacacccttttggcagtattctatgaaaataatccaagtctgtatgtaagagctttcagaaaatgatacatagctaagtctccaaaaaatgctaataagcaatgaccacaattaaatagaatgcatgaaacaggaagcttaagagaccargctggtcacagtggctcacacctgtaatctcagcactttgggaggccaaggcgggaggattgcttgagggcaggagtttgagatcagcctaggtgacatagtgagatcctgtccctatttataaaataaaaatttttaaaaaggaaaaaaaaaaaaaagataccagaagtgccaggcacggtatctcccacccgtaaccccagcactttgggaggctgaggcaggtggatcacgaggtcaggagatggagaccatcctggctaacatggtgaaaccctgtctctcctaaaaagtacaaaaaattagccaggcatggtggtgggcgcctgtagtcccagctactcaggaggctgaggcaggagaatggcatgaacctgggaggtggagcttgcagtgagccgagattgcaccactgcactccagcctgggcgacagagcgggaccctgtcccaaaaaaaaaaaaaaaaaaaaaaaaaggtgccagaagcatttatgagtccaaagcagaagcaacttctagtgaccacagtgagaatgaccaactattttaagtattcaaggcttgcaagctattcttactttgctactagaggccacgtttcacagaaccctgcctaaactcaatgataatagctaagatttattgagtttttggtttatgtcagatactgtattaaacactttccaaagattgtttcatttgcattttcagaamaggccaatgagattagtgttattgttagtgtgaactttataaattactaatctctgtgagccaaggtcaaggctcagagagattagtaattttccaaaagtcacaccagaagttattggtggagtcagggtttgaacccacactccaggatacacgtgctgacctaatactgcaggtgccacacttgataccttcttaaatgcatgagaggatgtttaaggtcctcttgtatgtgacaagagatatctagggtaggagtttttttggtagtgtctttactgtgatctgttggcattcgcgccagttaaatacatgtcgtattttataaattcaaagaaaatggccgtggtgtaactggaggcactttctgataagaagagtaaaagcctgttgacatgatatagggtggagagttttattcattcatacattcaatacaaagtttttgataaaatagatatgccaagtgatgtggagaagagaaggaaatgtctttgtccctgctttttttctgttaaggaatttgccatttggaagtgtgtatgwtgagaagctggagagcatgatggtcaagagtgcgggccctggagttcctgtactttagtatttgacttttgtgaacatttttattttgataatttttctgaaacaactgatagagaggaaaatcactctttgtaaaccaggatgaggagagaatcatagtgggtgttttgtatgcagaaggctaaatgttcagaggagggagaaattaagctgcccaggccaactcttcccaaggacagtgaggctgatgtgaatgggcaatggggtttctgtgctgtggcagggcaccagcagcgtagtgaaggagaagcgtgagcacagagccacagtgcagggaaagctgggggcatatatggggaattttttttgtgtgtattggttttttgtgttttgttttgagacggagtctctcattctgttgcccaggcaggagtgccgtggtatgatctcggctcactgcaacctctgcctcccgggttcaagcgattctcctgcctcagcctcccaagtagctgggactacaggtgtgtgccaccatgcccagctaatttttgtgtttttagtagagatggggtttcaccatgttggccaggctggtctcgaattcctgacctcaggctatccgcccacctcggcctcccaaagtactgggattacaggtgtgagccacctccccgggcctagagaatgttaattgtcccactttcctatttgggtggagcatcaggccgtccatggaggagaatggtaggaaataagactgagagggtggggcctccaatatcaggccaagtatttggaatggggtcggaacatcagctctgactattgagatgagaagcaggaagaccccagaggacctcctcagattcagccaggcctgaggcagtggggcctgaggcagggtagagcagtaggaatggaaggaagagatgcataggayagggaagaatttggcagctttgtagtaactgtccctatttataaaataaaaatttttaaaaaggaaaaaaaaataagatgccagaagcatttatgagtctaaagcagaagaacttctagtgacctcagtgagaatgaccaactgttttaagtattcagggtttgcaagctattctctgctactagaggccatgtttcacagaacccagcagtggaaactgttgcatgtgaaaagcgaaggagtacgaggcatggatgttgcatgtggaaaacaaaggaggatgaggcaaggatgacaggtttcaagcctggatgacaaggagcatagggatgccagtcagggagctcacaggtctggagaagaaggtagagggagatgatttgtcggccccgccatgttcgtcttaagtcaccagtggagcatccagctggtaatgacaataatcggaggtcacctggagaaggaatgtcggggctggaaacagatttgagctggcagcatcaaaatgatcattgaagtatcagaagcagacaaattgattttgacctgtatattctaccccacaaaactttaggttttcgtctcctcggataatcaaccatttccatactcatgtaatctaggcatactctggagttattacaggtttggttccagaccactacaataaagtgagtcaaagtttttggtttcctcatgcatataaaagttatgtttatattatactttattgtgtgccaataacattatgtctaaataaaaacaatgtatataccttaattaagaaatgctttatggctaaaaaaaaatgctaatgattatctaagcctccagtgagatgtaatcttgttgctggcatagggtcttgcctcaatgttgatggctgtgattgatttatagtggcaattgctgaagattggggtgactgtagcagttttcataaaatgagataccaaggaggtttgctgcatctgctgactcttcctttcatgaaagatttctctgcagcatgcagtgctgttgagatgcagcaattcagtcacatcttcagtctccacttctagtcctagctcccttactatttctaccacatctgcagttacttcctctgctaaagttttgaacccctaaaagtcatccatgagtcattaacgtcttctaaattcttgttaatgttgataattcgacctccttccatgaatcacaaatgttcttaatggcatgtagaaggttttcaatttactttgcctagatccatcagaagactcacaatgtatggcagctattgccttacaaaatatatttcttaataagacttgaaagttgaaattactccttgatccrtgggctgcagaaaggatgttgtcttagcaggcatgaaaacattaatctccttgtatgtctccatcagagcccttgggtggtgactatgtgcattgtcattgagtgataatattttgaaaggaatctttttatctgagcactattgagtaggtctcaacagtgggcttaaaatattcagtaaaccatgatgtaaacagaagtgctgtcatccaggctttgttccatttatagggcacaggtagatttagcatcattcttaaaggccctaggattttcagaatggtaaatgagcatttaattcaacttaaagtcactggctgcattaacccctagaaagagagtcagcctgtcctttgaagcttcgaaaccaggtattgacttctccactccagctatgaaagtcctagatggcatcttcctccaaaagaagactgttttgtctccattaaaagtctgttgttttttgtagccacatttatcaattatcttagctagatctcctggataatttgctgcagctcctctgtcagcactttctgctttatcttgaacctcatgaaccagtctctgctagcttcaaatattttttctgcagcttcctcacttctcttggccttaattgaattgaagagagttagggccttgctctggattgactttggcttaagggaatgttgtggctggtttgatcttctatccagaccactaaaacttctccatatcagcaacaaggctgtttcacagtatttattattatcattattattattttagagatggggtcttgctttgtttcctagggtggtctcaaactcccaggctcaagcagtcctgctttggcctcccaaagcactgggattacaggcgtgagtcactgctcccagcccagctatttcacctttttatccttcatgtgtttactggagaagcacttttaacttccttcaagaacttttcctttgcattcacaacttggtggtttggcatcagaagcctaacttttggcttatctcagcttttgacattccttcctcactaaacttaatcatttctagcttttgatttaaagtgggagayatgtaactcttcatttgaccacttataggccattgtagggttattaattagtctaatttcaatattgtattgcctcagggaatagggagacccatagagagggagagagacaggggaatggctggtcagtggagcagtaagaacacacacaatattgattgaggaagttctctatcttacatgggcgcagattgaggcaccgtaaaacaattatagtagtaatatcagagatcgcagatgactgtcacagatataataatttaaaagttttaaatattgtaagaattacaaaaatgtgacatagagacacgaagtgagcacatgctgttggaaaattatgcttgacatggtgttgccacaaactcaataggtaaaaaacatagtatctgcagaatgtgcaataaagtgagatgtgcctgtaacatgaatcatttattaggtgtatatagtcttaccatttctaaagcattttcatatttgtttaataattgttacatttttatacccatttaatggctcagaaaatcaaggctcggagatttagtgagtcaagatgacagaggtgatcaggtggcagattccattctcaaccaaaaacttctctttaccaattcattgcattttttttttcttgagatggagcctcactctgtcacccaggctggagtgcagtggtgcgatctcagctcactgcaacctccacctcgcaggttcaagctattctcctacctcagccccctgagtagctgggattacaggcacgtgccgccatgcctggctcatttttgtatttttagtagagaccgggtttcaccatgttggtcaggctggtctcaaactcctgacttcgtgatccccactcctctgcctcccaaagtgctgggattacaggcatgagccgccgcacctggcctgcatttttaaaattataatactgcagcctttttgttgagggaaaaatacgtaaaatattcgacaaccttaaaatatctaaaactcaagcctggatgtggtgactcatgtctgtaattctagcactttgggaggcccaggcagatggatcacttgagtccaggagttcaagaccagcctgggcaatatggtgaaacctcatctctacaaaaaaatcaaaaaattagccgggcgtggtggcacgcctgtagtcccagctacttgggaggctgaggtgaggggatcacctgaccccaggaggttaaggctgcagtgagctgtgattgcaccactgcagtccagccagggtgacagagtgataccctgtcttaaaaaataaatcaaaataaaaataaaacccctgaaattccattttaaaaaagaaaagtttgaaattcatctttattggtactagcttgacagatgcttttctaacaaaatactttatttccaagaagttcaaagttgttgattttcctttgaatagttggttgtctttaggttgagagtgagattctttatatctcggttattaaataaatgaatgtcttctaatttttcttcattttttccctttttccataaagatgtagccatagctgtaacgtataaccatgatgggtcttatagcatgcaggtaagccttactggttttgttctacagtgcagagctgaatctgaccgcttttatactgaatagggtctttcactctctggtttcccttaagcctttgactattatgactgtagttaagagaatatcttatgcttgtatttcagacccaatttggggaaattaccccctatacrgtttctaactgattgtttactcagttgggctgtgattcctttaagaataaaaacttggcaaaaagtaaaagctcaaatcagacattcacaagcccctaaagtktgtgcctgtatttacagcaaaagcagcagttttcacattttttgtctcaggaactgtacactctttaaaatacccaccagagcactttggtttgtgttaattatatctcttgatatttaccatttagacaatttaactgagaaaatttaatttctaattttttaattgtggtgaaatacacataatgtagaatttaccattttaaccatttgcattcagtgcattcaagttgatatgtaaccatcacaaccatccatctccagaacttctttcttcttgtggaactaaaattccgtactcactgattaaacagttaacactccgttccttcttcccccatcccctgagaaccacgattctactctctgtctctatgaatttgactactctaggtacctgatataagcrgaataatgtagtatttgtccttctgtaattggcttatttcacttggcacagtgtcttcaaggttcttccatggtgtagcatatgtgagaatttcctttttttttttttttaagggtgaaaaatactctgttgtatgtatataccacatattctttatccattcagccattaatgaacattcgggttgtttctagcttttggctattgtgaataatgctgctatgaacaggggtgtacaaatacttctttaagaccctgttttttgtcctttggatatatatccagcagtggaattgctagatcatatagtgattctgattctttgaaaaaccgccatactgttttccattgcagctgtagcagtttacagtcccatcaacagtgcacaatggctccaatctcttcacttccttgccactacttattattttctggggttttgtttttttttttgttttataatagcaatactaatgagtgtgaggtagtagtatctcactgtgactttgacttgcatttccataatgactaatgatgttgagcatctttacttattggccatttgtatatcttgttagaaaaatctctattcgagtcctctgccaatttcttaatttaattgttttgttgttgttgttaagttataggataaattgaaaaaattgtaaaacctaatcacaagtacacattccattagccatcagagtgataacattatcacacgttcagtagcctctggaaaattccactgtgtacttatgagagaatgagagtataaaaaacaaataatatcttaatctttttttctttttttttgttttgagaaggagttatgctcttgtcacccaggctggagtgcaatggcatgatcttggctcaccacaacccccacctcccaggttcaagcgattctcctgcctcagcctcccaagtaactgggattacaggcatgcaccaccatgcccgggtaattgtgtgttttcagtaaagacagggtttcacygtgttggtcaggctggcctcgaactcccgaccccaggtgatccgcccaccttggcctcccaaagtgctgggattataggcgtgagccaccacgcctggccttcttagtcttattatgactttgtggatgccctaaaagggtattagggaccccaaggaacacataggtcatattttgagaacctctagtgtaaagttcatggtaatcctcaattagaagaagaccattacattggcaaaatggaatgcttaaatggtttaaaaaaaaaagtgggaattcaatcaaattcctatagtaaggtacaacttcagggaatagaataaatcatttttaatatgagctaagagatgtcaaatcctgcagaacagatttatcagtggtatgtattagacctcccaacactttgagacacattgattttctttctgtgagattcagaaaaaccatggaaagtctgcctacttgggtatgagggttataattcatattaatgcctctggtttgagattatttcttgtccctgttagctggtaaagtagattgccaatttgttctaatctgctcatggaactacattcacaattttaaaatgtgttttcgtgaatctttaaacaaaactgttttcaatctaacctttatgtcctaagagttccacaaacattcaaatggctgttttagtaggttacaaagcatagtaaaatgtcatatttaacttaggatagatgagaaccaatgtgtaaatattgcagtgtgacctatttcaccttagtgtacgtaatatatttgaaaagaatagccatgtgacttctacactagcattgtgggaattgaaatgaagactagagagagaagatgtaaatggattttttacctcagggaaattttaaaacaggttccatgtccttttatcagcttccttgaaacattgtgaactttgttctttggcatatggtctctgagagtgagaaaattatggccaatctccagctaatttatgttcttaaatcataactgaaacccatgattgggcctacgtgttgataagataaaagaatatcatctaattatgtgattctggcatttttttggtgactgactttggcacaggaaaactaaatttgacttcaaatactcagaaataagtttatattacaaacatgtaatatatgcaaatgaattttaataattttgcataacttggtttgtatttttgtttcatatttttaatgctatctttatatgtttacgtgaacctttatctatagcattatggtgctatggataagttatataacttttttttcccttttaattatcttcctgtcatttctatgtaaagtatcttggttaggaataggggaaaagttccatgactttttaaaaaatatatgttatatatgtttaagacacattttatgttttaaaactaccaatagtgaagaattgattctgatcttattaattctgtagtgttgttcatttattttaaaaatcttatttttcatttttttcagattgaagataaaactttccaagtccttggtaatctttacagcgagggagactgcacttacctgaaatgttctgttaatggagttgctagtaaagcgaagctgattatcctggaaaacactatttacctattttccaaggtaatgtctcttctttataatatccctcctggggcatgggagaaaactgtttgaccagagacattccactgaaagagattagaaagatccagcttcctgtgaccactgctgtgacctttttccctcagtttcccccaccattctgtgtttctttgccaaattcctgccctctgtagtttcccattcacttctctcgttcacacagatgctcattgatagacacatacccattttcttcctgaattctgaaacaartccttccattttctttgtcagagcatatctccctgctcagtgggtggtggtatctcagggctttgatgtctgaacacttttccccacccaccatccccctgacaactggaatcctggtgattttggaggaggtgaccactgagagaggagtctgtggaccagttgttccttgtggggaaggtggacagtaggaaggtggatggcattactgctggtctcttgacagtcaaaggatagccgaggcaggctttgcatggttttggttagaagcctgctgcccagtgagtccttaaccttcggcctgggcagaaagaggataatgcattatcatatatgctgtggcctcacagtgctttgtgatgagattcctttagtagtctagtaattaaactactatatatggagttgaggatgatcccactttgccaggcattcctttccatagccaattacgctacagtaatatgatgatagaggccgtataatggaatggtgaaaaactcaagttctaaaatgtgaagctgctttggttcaaattctgccttgccacttaacagccatgtgaccttggccgttaaactctctgggctttagctctcctatctataaacagtttaataataacagcagtaacagtaataataataggtgcagtggcttgtgcctgtagtcccaacactttgggaggccaaggcaggcagattgcttgagaccaggagtttgagaccagtctgggtaacataaccccatctctacaaaaaattttaaacattagccaggcatggtggtgtgtgcctgtaatcctagctacccaggaggctaatgcaggaggattaataggctcaggagttcaaggttgcagtgagctatgattgtgccactgcactccagcctgggtggcagagtgagaccctgcctctaaaaaataataataatgacagtaccttcctcatagagttgtgatgattcacgacatgatgtgtgtgttaaagacagttcctagcatactgagcatctgagagtggggatgctactgaaaatggcttccagacagtggctacttgttgtctacagtgaatgctttattcttattttattttttgagatggagtcttgctctgttgtccaggttggagtgcagtggtgccatctcggctcactgcaagctctgcctcccgggttcactccattctcctgcctcagcctcccgagtagctgggactgcaggcgcccgccaccatgcccagctaattttttgtattttttagtagagatggggtttcaccatgttagccaggatggttttgatcccctgacctcgtgatctgcccaccttggcctcctaaagtgctgggattacaggcgtgagccacggcgcccrgcctaaatcttttaatatactgtgaggcatgtataccgttacgcctttacaatgggaaaccaaggctgagagaggtttaataatttgctcaaggtcataaagctagattagaaccctggtattaatggtgactaatttatttttttttttgagtcagagtctcactctgtcacccaggctggagtgcagtggcgcagtcttagctcactgcagcctctacctcccaggctcaagtgagcctcctgcctcagttcccaagtagctgggactataggcgcgtaycactacactgggctgatttttgtattttttgtagagatgaggtttcgctatattgcccaggctggtcttgaactcctgggctcaagccatctgcctacctcagcctcccaaagtgctgggtttacaakcgtgagccactgggcctggccatgatgactaatatttaacaaattgctgggaaacaattattacctcaggtatattagtaaaaatatagtgataggatgttgattcggttttcagtttgttttctgtttctaggaaggaagtattgagattgacattccagtccccaaatacttatcttctgtgagctcacaagaaactcagggcggccccttagctcctatgactggaaccattgaaaaggtaatcacatgacatctgtagaatgatgttcagtaagttttaatacgtggctttgttaaacttgtcatttatgtccttttccctttctaaaccktgctcattggaaagcatccacttcacaaaaacaagaggatctattacagattcaaattgtttattacagtcctcactgaaaatacccatttacctaatttatgaaaaagactgctgtttttgaaggcaggcatttgcatcaaagtacaaataatctaaattgtctttttatgattaaaactgagcattcattaagcattattcaaaaaagctggttttgaatgttaaatttaatagcagcaaatttttcatgaaataatgacattttcttttagtgtacgtagttgcatctgcgttaatgtaaaaggctggtatcggtgaagaacagtacggtttggtgttgaatgcagtatataattcacagttgcagtccatactgtctgagtcagttcaggctgctagaacagaataccatagactgggtggcttttaaacaatagaaatttatttctcacgattctagaggctgggaaatccatcaaatcaccagcagattaagtgtctggtgagagtctacttaccgatttcataaacagccattttttctctgtgtcctcacgtggtggaagggacaagggacctctcttcaggcctctttcataagggcactaatctcwttcatgaggccagatccctcatgacctaatcacctgctaaaggccccacctccaaataccatcatcctggaggtcaggattttaacaaatgaattctggagggatatagacatttagaccctagcacatactgatataacatcaaatggtgatagatcagtatccgtagtctccttttatatacttgaatacagtagagtctcctcaaatacacttaaatcataaaaactcaactgtatatgcttggaacaaaaaaagaagaagaagaaaataactacttaaatagtgtgggtgatttcagccactattctcgtttggaaatatttaccccaagtgggtatgagctaggagacctggatctgcctttagctcatttgatttcagttcccacaggcctctcatagtgcaggcatctctgcacaactctgttagtctcccacttagtagccatgttaaccaaaacgaaagtgagaccatataggatctatgagtccatttatatgtatacaaaagaaaatagaaatctctttctggggttgctaataagtttgattctgttgcatgaagattgtcttcacatttactacacagggctccgaagacttcaaacacacttactatacttagccctagacaaccccaaaacaagaaaaccagtcaagaccctcatccctcttccctctctggggaagacatttaagtatattagtccttccctactggcaatgtgtcttgtttctacattcttgaaaaaaatgaaaggatttcaaaatacatggagtatattcatgtgattcaagtaaaactaagtggttttgtgggtggggacaggggactaagcagtgctacccatggacgacagtgccagcaatgccagattgacctgtagggctctcatttgaccagtgcatttgggctgtaggcctctgatttgaccagtgcatttgacctgtaggcctctgatttgaccagtacatttgggctgtaggcctctgatttgaccagtgcatttgggctgtaggcctctgatttgaccagtgcatttgacctgtaggcctcttatttgaccagtacatttgggctgtaggcctctgatttgaccagtgcatttgggctgtaggcctctgatttgaccagtgcatttgacctgtaggcctctgatttgaccagtgcatttgggctgtaggcctctgatttgaccagtgcatttgacctgtaggcctctgatttgaccagtacatttgggctgtaggcctctgatttgaccagtacatttgacctgtaggcctctgatttgaccagtgcatttgggctgtaggcctctgatttgaccagtgcatttgacctgtaggcctctgatttgactagtgcatttggtctgtaggcctctgatttgaccagtacatttgggctgtaggcctctgatttgaccagtacatttgggctgtaggcctctgatttgaccagtacatttgggctgtaggcctctgatttgaccagtacatttgggctgtaggtctcagatttgacctgtacatttgggctgtaagcctctgatttgaccagtgcatttgacctgtaggcctctgatttgaccagtgcatttgggctgtaggtctcagatttgaccagtatatttgggctgtaggcctctgatttgaccagtgcatttggcagatggcacaaccacatgggctctacttctgctctgtaagtttatatamcaaatctrtggaccacaaaggacctctgtgttgttttttttctttttatttatgttttattgtttatattcatggtttgcaacatgatgttatgagtatatatagacmgtaaaatggttactataatgaagcagatkaacatatctaggacctctgtgttttcaaatattaacctgtcacactgaatctcaaggtgtttgtcaaagctggagacaaagtgaaagcgggagattccctcatggttatgatcgccatgaagatggaggtaaggaaatcatgagttcatttgctatgargactttgggagcaatcatacctaatggttcttttgccttattttgtaagttaataccaccttaaatatgaaaagccatgattgacgaagcattaattgtaggaaacaaaaccaaactatccttcttgtagaaaagagttttactttaactttgtgaaattgcacctgtcatttctgattctgaaattaatgaaattatcaatagcttggaatcaggcgataatccaactgaatgttaactgttggtattttctaagataatccaactgaatgttaactgttggtgtttctggaatgttaactgttggtattttctaatgttaactgttggtattatcttggttctaaggccgaaccaaggatgccaggcatcagtttcaaagtgaaaaccgcaatcaaattaaattagctgtttaggtttttagatggttcaaatggtaggtcagtgattcttagccctggctgaatattgcagacagtcctcaacttacaatggttcaattaaggatttttcagcttgacaatggtgcaaaaccatacacgttgaatatgctcctcagcttacattggatttatctggacctgaccccatcgtaagtcaaggagcatgtgtacagtcacctggggagatttgaaaaaattcttccccagacccattgaattgcaatctccaggagtagagcccaaggatcaatacttttgaaaggctgggcgcagtggctcatgcctgtaatcccagcactttgggaggcagaggcaggcggatcatttgaggtcaggagttcacgaccagcttggccaacatggtgagaccccatctctattaaaaatacaaaaattagccaggcatggtggtgcatgcctgtaatcccagctactcaggaggctgaggcaggagaattgcttgaacctgggaggcagaggttgcagtgagccgagatcttgccactgcactccagcctgggtgacagagcgagactccgtctcaatttaaaaaaacaaacaacaaggccaggcgcagtggctcacgcttgtaatcccagcactttgggaggccgaggtgggtggatcatgaggtcaggagttcaagaccagcctggccaacatagtgaaaccccgtctctactaaaaatacaaaaattagccaggtgtggtggcacacacctgtagtcccagttacttgggaggctgaggtgggagaaccgcttgaacccgggaggcagaggttacagtgagctgagaccatgccgttgcactccagcctgggtgacagagtgagactccgtctcaacagcaacaacaacaaaaaamaaaaaaaaaaaaacaaaagcaagcaaacaaaaaactgttgaaagcttcctaggtgcaattctcatgtgaagctcaagttgagaactgcgagctacaccagagcttcccagtcatatcgttgaaaggttactgctgtgtcccagtgttcattcctctcaacttgttgctgttctccctgtgtgctgtgatgttaaaaataaaaacaacaacaacaacaaagcgttggaaagcaccgagagatgacaaaacatcaaagttggctacagttttcatttttggtctccctttcttgacttggtgtatactcagtcctcattagtattgcagctatcatttgtcctgtcatgtgtctctgcagcataccataaagtctccaaaggatggcacagtaaagaaagtgttctacagagaaggtgctcaggccaacagacacactcctttagtcgagtttgaggagraagaatcagacaaaagggaatcggaataaactccagcaaggaaatggccagttaagtagtgtcttctctctccaccaaaaagaggaagtgcctccagcttttctgggggtctcataaagagcagttttactaaatgattgtatgcttatgctgaacacctttcatattggagaatcatgcatttgggtcactaattatctcaaaatatttcatactaataaagttgaattattttttattggaagccaatgtttgtttctgcctcaaattttttacaaggtagtctcttttaggaaggggggaagagaaaaggacatttaattaaatgaattactttccagttgctgttatgatgaaaatgagcagtaatatgtttcagagacaggtgccctggagttcaacaactaaggttttgtctggccaaaaagcaacttgctaggtagtttaaaagacatggatattagtcgggcgcggtggctcacgcctgtaatcccagcactttgggaggccaaggcgggcagatcacttgagttcaggagttcgagaccagtctggccaatatagtgaaacccgtctccacaaaaaataagctgggtgtagtggtgaacatctgtagtcccagcaacttgggaggctgaggcaggagaatcgcttgaacctgggaggcagaggttgcagtaagtcgagaccgcaccactgcactctagcctgggtgacagagcgagactctatctcaaaacaaatacataaatataaataagtaaagacacggatattgtttctagtgtttgtgattggaaagtttctaactagattgcctctgcctttattgtactttctaagcttataaaaatatatgtattatatatctattacatgctaaaatatattaatatttaatataacattttggtaaatttgaaaagcataattttacagaaaaagttggtaagagttaaaagcctgagcctgctgaatgctttttttagaaatacttttttcattatgaagaaaaaccattcagtttacttttgtctagattctgtgttacttttactaacagatgtgcagccctttgcatttttatgtattcattgaagtgttaaatatttgttgaattgagttcttgctgaatacataagactatgctaaatgttgtggaaaatacagagaaatataaaagatggtctccgtactttaagatgcctataattggaaaagtaaaacataaatcatgtctgctatgattagaatgggtcccctatgtttcacgtgttaaaaacttaatccccaagttcatgtgttgattagaggtaggactttcgagaggtaattaggattggatatggtcatcagggcggggcccccatgatgggactggtggctttaaaagaggaagagagacctgagctggctcgctcttgccctcttgccatgtgatgccctccaccatgttatgacacagcaaaaaggccctcaccagacaccggccccttgatcttgaacttcccagacttcagaactgtaagaaataaattagttcataaattatccagtctgtgatactctgtttcagcaatgcaacatagtctatgacaatgtcgaaagttacagttttagcaagggtgccgtttcccctttccaaacaaaactttctctgtttaaaagagggaaaagcagccgggcgcggtggctcacacctgtaatcccagcactttgggagctgaggcaggcggatcacaaggtcaagagatggagaccatcctggccaacatggtgaaaccctgtctctactacatatacaaagattagctgggcatggtgatacgcgcctgtagtcccagctacttgggaagccgaggcaggagaatcgcttgaaccagggagtcggaagttgcagtgagccgagatcatgccattgcactccagcctggtaacagagtgagactctgtctccaaaaaaaaaaaaaaaaaaatagagggaaaagcaaaaggtgctgtgatggaaatttcacattgctgtttgccccctttcggagaatgctgtttgtatccttcagtggaacatggttgagttcactgtttcattgttaagtgactgtgttggggatatgtgtattgaaggaattcgaagccagctagcccaattacccacatattggtagaattctttctttaggatctttgccagttctggtgctgtgtgagcagagttattttgcacatgaatgcatctgtttgtgctacagacacttacagagcatttgctctacactagggcctctggaacagagatggtaagaaatgatttctgctcttgccctatctaatgggaaacaggatccagctgcatagaaaaatgtaatataggccgggcgtggtggctcacgtctgtaatcccagcattttgggaggccgaggcaggtggatcacctgaggtcaggagttcgagaccagcctggccaacatggtgaaaccccatccttactaaaattactaaaattaattgggcatggtggcacatgcctgtggtcccagctactcaggaggctgaggcaggagaattgcttgaaccccagaggcagaggttgcagcgagctaagattgtgccactgcactccagcctgggctatacagcgagactccatctcaaaaaaaaaaaaaggtaatataattgacagtaagtggtataatataccagtctactaggtgccatgtgcggtgaggtgagtgaggtactaaattctgctttgggtcaggaggcagagggagaggcagtgatgtctgaactgggctttggaggatagctgtttgccagatggagaaagaaggtggtgagtccaaggccactgcaggcagaaggactggcaaggtctagaacagtaaggcatgaaggcatgcaatgtattcggggcacagagtggatggcctgggccactaggcagagaagggcaagcaagggaygcagctgcctagcaataaaaggccttctcttgtcccagaggacttcattctggaggcagtgaggagctgctggagattttcaaccaacttaagtttttcaagttgtataatgtccacagtctggagtacaggccggaaagtggagagaggctggagacagtcccaaacagacaccagatatgtgggccaggctggctgcagtggctcaagtctataatcccagcactttgggaggcagagtctggagggtcacttgatgccaagagttggagaccagccccacgccgcctgccccatgtctctacaaaacatttaaaaattagccaggcatggtggtgcatccctgtagtcccagctacttgggaggctgggatgggaggatcgattgaacccaggagtttgaggttacattgctctgtgatcacatgccactgcactccagcctggacgacagagtgagaccctgtctcaaaaaaaaaaaaaaagacaagaaaaagtacaggtcagagtggggaaaacagactttggtgcacatcttgacttaaaagtacttctctgttggataagacccattagaggcatggaccaaaacagagtcattagttgggaaaaaagcagcttgctaccttctctttgacagcagcatggctcaggtatttaataaccaagagaacaacaacatttaagcaccccaatgattgctttttgatcacaggggagaacacacagcattgtagttgaaatacagcggttaaaattcttgcattcaggccctagctttgtcacttattagctgtattgccttgggcaagtcatttaacctctccgagctttatctgtaaaattgaggtggcagcactacctcacaggcttgttttggagattaaaggagaaaatgtagaggttgcctttagcattgtacctggaaaatcatttatacttccctggtagttattaccaactctggttcttgctagggagcaattaagaaactgctttaaattcagactagctggttactcttgccaggaaaaatcccaggtcccaggatggtgaaaaatcctgcctggatatgcatcaccctgtcccctccctaccctcccttccccagctgtagcctgctccggtgtgacccaggcacctgtcaaccacttaacagactgtgttgctgccggactgtggggggaagcctccgtcagtagctagagctgtgtgctggtgggacagcggcccgcccacttgcatgaaggctgggtaacttggaaaaactcacttggaacaactcacctagaacaactcacttgtatgaaggctgggtccagacttgctccacctgctgccatcagttgtcacgtgtgtagctggtgctggaggggaagcctgtgtccggcttgcgcctcagtgtgggcaggcatcatacctgctgccggacagcagagtagggtggtctttcatttagctgaactctttcccccctttccccctccacaatcaacttctcactcctgcacacttactgttaaccctcaactagtcctcttaggaatattagaaggtgaaatgtgcatctgagccctgcgtagccagggctcttctgctgttgtcattaaaatattcacagcgttgttagtcatgtttgcacgtctattgcatctttcatcagagggtctcaaaaaagcacttctaggccaggtgcggtggctcacacctgtaattccagcactttgggaggccgaggcaggtggttcacctgaggtcaggagttcgagaccagcctggctgatatgatgaaaccccatctctacttaaaaaaaatacaaaaattggccgggcgtggtggcaggagcctgtagtcctggctactcgggaggctgaggcagaagaattgcttgatcctgggaggcggaggttgccgtgaacctaggttgtgccactgcactccagcctgggtgacagagcaagactctgtctcaaaaaaaaaacaaaagacacttctagatattcacactaggcttcaaaataccccagaagaggaaaatgtgatttaaactgtgtggtagaagaggagatggctgtccccaaatgctttgctccttgcctagtgcggagaaccttagggtaccagtcccctcctgctaataacatactgttccctcagggctgaccccagggtgctgcccctagaggttagtagtttttccccaccagactgggagtatagggcatcacaagaggccctgcccacagctgtcagctctcaaagccacaggctgagtggaaacactcttgcccaccctcccccaacccctgggaatgtccctggggacaccatgccttctggaccaaggggtgcctgggcctttaggagattataaccctgataccaatgattaccttgtcaccctgacatttgtctcccatttgctggatccctggggactcagaatgccttggtgcctctaactggctcagtctcctgcagcgagttccaagtgaagtgtgcactctcctctgccacctccaagccacagcacagacgttaactccctccctgctaagaatggctgacgtcattctctgtatctaccacccctcgctaccatttcgctaaactgttagattagattagatataattcttattccaaaaccagcttcccacagaaacaaaaaaccactaacaaaaacagggtaatttggggcttctccctcttacccagttattccttcatcatgaccaactatgtcataaaagcattacggttttttccattattgaaagcaggcagttaaaagtgctactccagtgaacacacaaatgataagaaggtgaaacagccaggctgggagcagtggctcacacctgtaatcccagcactttgggaggccgaggcgggaggactgtttgagcccaggagttcaggagtttgagaccagcctgggcaacacagggagaccccatctctacaaataatttaaaaaattaactgggcgtagtggtaggcatctgtggttccagctacttgggaagctgaaatgggaggattggctgaacctaggagtttgaggctgcggtgagccgtgatcgtgccactgagtgacagagcaaaactctgtctcaaaaaaaaaaaaaaaaatctatttagaatgggacttttattaaaacatttctccagactaactgatcctctgtttgacttacagaagaagactaatcacttgaaaccttaatagaaataatatgtttcaacgttgctgaggaatttgttaacttcccagacgaaaattc

SEQ ID NO: 94113 - DNA, 591475 bp, Homo sapiens
  misc_feature (1)...(591475): n = A,T,C or G
taagaaaatgtggcacatatacaccatggaatactatgcagccataaaaaatgatgagttcatgtcctttgtagggacatggatgaaattggaaatcatcattctcagtaaactatcgcaagaacaaaaaaccaaacaccgcatattctcactcataggtgggaattgaacaatgagatcacatggacacaggaaggggaatatcacactctggggactgttgtggggtggggggaggggggagggatagcattgggagatatacctaatgctagatgacgagttagtgggtgcagcgcaccagcrcggcacatgtatacatatgtaactaacctgcacaatgtgcacatgcaccctaaaacttaaagtataataaaaaaaaataaatggttggatttatttatccattcaacaggaatttactgtacgaaaggcactgtgctttgaataaagttacaacaaccacctccctatataaacaaataaatctattttttttgctctcatatatcctactatatagtggagaaaatatatacaaatcaccgtcatggaaaaatgtaaatttgccactgtgtttggtgcaaatgacagatgatataaggctttatggataataagataaactagagcaaatttgagtgtattagtataaagcttagtttaaaactaattatactttcttcatgtcatgaaattattgttacaaaacctataataataagatatattgaatcataagacttccaaataaaacaaataaaactttaaaacttttaatgagatattgctttcataaagtcaacattttaacaaaagattttatgcttgaagtagctatattatttactgattgtgacattttaaatgattgtgtaataggtttatcatcataaatgatgacaaaatttgtctgcacaagtataggtgagaaagattgtaaacatttgcttctatgaccaaatatttacatcagttaaaatcttatttaaaatatatcatctctacttttctttcattaattgattcaaatttttttgtggctatccatggattttatcaaatctattcaacataatgataaagcttgaatatgaagaatgcccgtgcattataagaacagtcaatctgcagctgacatggttaccactaaaataacaaatcaactatatatgaaatagaattacttaatctttatgttgctaaatctttgtgttattagctggagctattcccactagcagttcctgcccaacctccttgctttcccacccacaatgggctatactttgaactgcacatgcaggccattctccaagaagctcttatcaagtttcttatgatccaggctatctaattacgggccctagcaacttgaggctacactacytggctacttctgatgggtgtagtgatcgatatgttatggcatatctataaactatttgtggtgcatgagttgaaaagctcaactcttagcctatttcaattttcttctagaatttattatcacctgacgtaaatacacacctacttatttatttggttaggatagccctccccaacctttttggccccagggaccagttttgtggaagacaatttttccacagactgggagaggggatggtttcaggatgatttaagcacatgacgtttattgtgtactttatttctattattattacattgaaatatattatgaaataattatctaactcaccataatgtagaatcagtgggagccctcggcttgtattcctgcaactagatggtcccatctgggggtgatgggagatagtgacagatcatcaggcattagattctcataaggagcacaacctagttccctcacatgtgcagttcacaatagggttcacactcctaagagaatctaatgctgctgctgatcttacaggaggtggagctcaggcagtaatgtgagcaatgaggagtggctataaatacagatgaagcttcactggctcacccatccctcatatccttctgtgtggcccagttcctaacaggccatggactgccataggtctgtggttcgggggttgcagacctttgggttaggacatacctcagcaaaatgtagtattcatgaaggcaggatctatatcttttttctcactgctagacagtgctaggcattttcttcttctcactggtaggcactgggaatatagcagtgagcattagccttagctcactgctgtattcccagttcctagtaaataactgtcattctgtaagtgctcaatgtatattcatgggatgtatgactgaaccctaagttttgtgcaggctgtctttactttcctctttgtcttcaaaacctattgcagtgcttagctcattgtaagtacaaaggaggtaagcagagccccagagtataaaggttcttatagggcatgttagagattttagacaatttcttaaaatcaatgagaagccacttaaatgttataattagaagaaaatattattagatttcattttagaaaataaagttattgctttcagtgtcccttaataatggcatctccatcatcctactcatccaatcttaatctcttaaagttatataatacattttcctttatccatcattcctaataatttgccaaaacctggtaatttaatttcagcaagacataactatctcaccctttatttccctttagaatgagcgccttggttaatcacataatggacaattgtagctgctaaactcatatccctgtcttttgtatactctgtagctaaggccctatacatttggccttatattggccaatagacattcttggcctggtagcccttgtattggccttatagccaagaattgtacagtattggtcttaccatttatctaagcaaatacttgcaatagctccactttgattaaagataaatgccaaactttctgtttgaaaaaatatgactttttaataactttcaacactcattcagataaattattgtggttattattcttatgaggtaaataatgataactacctgatttttaaaaaagtatttaaacttcaagaaatattgcaaaattactacaaagaattaacacatacccctcaccaaaatttaccaatggtgttataaaaggttgccacatttgcatcatcattctctctataggtatttctggaccttacaacctctatgttctttttactgcaaaatattttattatattttttaaagatccagggctttcttatatatgatcacaatacaattaaattaggacacttaatattgatataaaactaatttgattataaataaaagtcatacagtttagatattatagtttttattaatattttgaattagattgtctcagtaatgctctttatattaatagatattattcccagtttgctctccaattctggattacacattgcatttagtagtcatggtttttaaatctccattagtctggaatatttcctcagcttttctttgactttcatcacagtgacatttttgaaaagtataggcaagatattgtgtagaattttccttaatttaaggctttctttgctttctcgtgattgcattcaattatgcattttttaatctggaatcctaaatcaataatgttatgtacttctcagtgcatcatatcatgaggctcatgatatcacttggtcccattattggtgactttaaccttggtcagttggttaaggtgatgtttaccagatttatccactacatgtaatttattattcgtttgtaattaaggatctatagtatattataaaaacagcctcaagttatttttgtgtatgcattctccttgaaatatggcattatagtttctcccatcaagacatggactatattatctatgtttgggccatgtaacttccatggctaatgagacaccagcaaatgtacgtccacagaatctcagagtacttcacattggagcttgcactcccttgttgctttttggagccctgcaactacgactactgctagcctattgaaggatgatgggctagattaaacaaaagacaaaacattgcagctgagtcccacaccctcaagactaataagtatgccacaccagacaagtgagtgaagccatcctagatctctaaaccaaactgagctagccagggcagaaaccaacctgacaacccacagagctttgagaaattacagatgtttattggttggggctaataagttttggaatggtgtgttatgcaccaaaagccaatactttctagggtgatactttgggactacgtaaatatccaattacccaaataaattttaccaagtttatgattctgcctaagttaaatattatcacaaagactgcaaaatggaattgcgcctttttttaagagatgaaacatgtaagaatgggggcttatttgtctttgaaaaacataggactagtaagtagctgtatcagcatcagaaccccaatcttttacctggtccacagtttttctcagtatgccatgtagaggtgagtgacctgatgttaggactggaattcactagagggagcagtagagagacattccagagtgttatgagtgggaccctgtgtactcacacatgcacagaagcatctctggtaaatgctccataattgacggtagggcaggatggacaatgtaggaggagatattaatacagttattaacatagaaatttaaatgatacttgactcacgaaaagatataaagataatatctctggaaattgcctttcatgagtataatcaagaatggcattgacatactagattatgattaatagtatcatatgtttgtcaaacgtggctgtttaatatttttatgtagtcgttatatcctcccccaattctgccaaaaacatcctataagatgtgtgaagtgacactgtgagaagcaaggacccctgtcagcccttattacaaacaagacaactgacacccgaagggccaaaactagccaagagccacagtgaataaattgccaagcaggcacttgaactcggcaatcccaatttcctagaaaagttcctctcccatggcagtgggggacaggtcccaagtctttgagacgctaataatgtctgcgtcttaggtttctgccttgtgccaggcactgttctaaaatctttacatgtatttaaactcagtaccatgggggtattggtacaacacattaactgagacattcatacgtccaggtacttcggagtgggtgtgtgtttaatatcatacctacttgcctgagaaaggaattcaaagccccacttttttctttacctcttcataaaaatttgagagccacaaggaagcgctctgtgtttccagtactcttacagtgcgttcggcggcagtagtcaccgccaaccagaacactaggatcctgccagggtgtagatactgtaaccaacaagaggccaacctccgtcctttctgcggagggcgccgaagcgtcaagtaccccgcagcatctctcggctggagagccgacggcaagggtggggttgccggcgctttccccgagggcagtctctgatcctccagctcccctctaagaggctccctggtgcattgggcgaacgcggtgcacgcaggccggctttggcgttgtggggccccaaagcggccaggggtcgcgaggcgccctccggcgagaggagctgaccccagggttgctcttgggggccgtgcctgccaagtatcgcgggacttgcgcacatcgcagaagcgccagctccagaagcagctggagcgcgctcggtgcgcaccgccccagcccggggaggagcgggagcagggagggaggagggctgggggtgctggttacgtaaatgatactagcccagtgagaggcctccaggctggggctacgagaggaggagggaccacgcgaggaggagggaccgggaggcggcgggctggggtgggaggggggcgggggccggggagaagtgaccaggcggcggcggctctgctgaggtgacaacgtgctagcagccctcgctcgctctgggcgcctcctcggcctcagcgtccgctctggccgcgctcgaggagcccttcagcccgccgctgcgctatgaaggcccctctctggggctggccgaggctggagccggctccctctgctcgcgggcaagtgtgaagagagaggcgcgggcgggagccggggctgcgcgcggcgctcgcgggccggcgcgggttccaggtgagcgcggactcggcgagccccgcactcggcgcggccggccggcgcctgctgggcttgatctgaggctgaatcccgtgtgtggaccgccgttccctcttcgcgggatcgttggccaggatagcaggtctccgtctctttctcgcttcccctcttttcctcttgattgtctgggacgagctccctctgggctgccagagtgccggggctaggtgccgcaaagtcccgcggcgagtgccggggcgcggagccgagcgccccgggccggtcccagggcaaaggcaggggcgcgggcggacctggcgacgcggcctcccgggagctccgagtgcgctcgcttgcggggctgcaggtgttgcgggaggaccgcgtggcgcggaactttytgccgccgcccaccttytgctctgcttttctggctaccccggtkagttgttggtggcgggggggggggggggagcggctctggccccctctgcgttctggtgacgttcctccgcgggggtggctcggcctccaagcccagacaactttctcgcaccagctgcaggcagccccggctgcgttgcgggcgtttctactcgacccgacaccaggcgctccctgggtcttgggtgtcttcctcgacggttgccttcgtatagtgccccctttgcctcgctttttcagagtcctcttgcctctcattctcgccgtgtgtgtytctgcctctgtttctctttctgagccttggtcccctcagtccacactctccggccatgtatctgtttttttctcttattctgtttccctctttctttcttgggatrtctgtgtccctgttaatctgtctttccttttgtctctccgttttgcaacatttgttctctttctgtgtctgcttctcgcagcttatctctgtctccctctgtcatctctctgccccgtcttcccgaacaccagccccgcgatcccgaagcgccttggttaggggagcaagccctggcgcatctaatgggtatctccaggtgcagagattttcctgcggggtcagtggggacgcggaggagacagcctgcccttgtccaggctgtcgtggacctgaaggaggggcgcmaggggttagagtggagggcaccgcagcaggctccccttgccgggtccgagggcgctgcgctgctgcgaacctgagcgcactgaggctgctactctggacagcgaaasstgcgcaagcccctcccgcatacccgattctttgactatggttagttgaatttccaggaggagagtctgcctccccaacctttatagccagctgcagaagaacggacagtgagcaggcaaacatagaygctttgggsttcagggaaactaacctcgaaagggtgggagctttcttcaggcaaaggtgttgctagcagaggagaggagctttggggactgaggtatgcstgccttaaactaccatgcattcattgcttaggaaagcggtttccttggagagatcgtggtcagccttccctgaaacaacataacaacatagaggttttattcgcaaggctaaaggcacttggctgccaaagcccccttgaaatttctggtatccttgaatattttcagctttatgtgaaagctgcctttcctcagagtctcagtccgtctctctctctttctctctctctctttttctgtgtctctctctctcgctgtctccctgtctctctctctctgtctcgtttgcgttcatgccctctagtgttaaagaaacctgctggttcgagaatattgaaaagtaaggtcaacctattggttatttacttttggacctctcaccttccgggataattctccttgtattacacgcatcctttccttttcctcaaagaatgacttttgcattacattactaatctttctttccccccgcacccccctcccgcaatctctgttttttttttttttttctttccccacgtctcctgcagaataagaaccttcatattgaaaccctgttcgtttgatttgggaattggataggtctggagaatttgcgtagcctaaggcagactttgaacattaaaaagatgcatttctctgcactgtttgccataaaccaggatttcacatctctcctttagcccctatccaccttcaattccatggagaattttcctggctgcttctgcttgtttaaataaatgcttttatttcaccatttctgtgatgcttatcccattccagggcttaaggtacttgcttaagtaggggcactgtgtctcggatccgctttggagaggaagaatagaaagcttttctaaagraattatagggtactgctggtatagattaattccagttcggaaagtcctgagtgggaatgtgagaatggaggctgtctcagatatgtagtccctaggacagtgtggggaaactagtaagtgcttaataaaacttgttggttgattgattagcatgcagcggatcataggcttccaagttaccaggtatgctaaggagcctgcagctaaattccacctccccgctccttttttgggaggtttcatttagattttttatgaatggtaattgagaactagtagaagggatattgaaacaggggtcttctgcttctttgtagttcatgttattgcttgaatttgcccctttttgcaagtctacaacttggctggtgttctttaacacagtcattgcagaattgaagaaatgagtttagaggggccctgaaatgtggcatctctcaatctccttacctgaaagtaagttgggacatggcatcatttttgggtgaatactttcatgtggtttctaacaagtgaaaagttctctcttttaatataaagaacagatatatcagcttaaaatacttgggggctatatattgatctgtaagctggatcacttaccctaaataatttatggattyccctactgcttcatatatatrtatatatawgagatgtgcgatactgcatgaatgtgagaatttcctaaagtacctggaaacataatgcctcctaattcaaagtaataatagaaatccatgggcagcaatactactttcttgatgatatgctagtcacctcttaaaatagttgctaatttaycatgagtatggtgcaggagcatgttcaaagcaatttttctttaaaaatattatttataaatcacttgatactgtacccaatttttatatttaaaaatagcaaagacataawgaaggtggaaaatctgatattgtttgagagaccttctatttgttttacaggtttaacttatgcatctaactttttaacttactgggcagtcatttcagtttaaacagttatgtcagagtgaactatgttgttatcatgccaagttgatttctagaaatagtagttgtaacaggarcattttcatgtaatagagcttgtacagcttataaagacttcgggattttaggaaaggsgtgagataagaagtaacagtaacaaatgggtatttttattctttatgaatgggcagatgaagagaatcctggtgtttctgaataataacagtcgagaaaatgcttgagaataaagtaggaatagaattaagccttactgtctaaaataaattataatgctacatatctctgttaggtgttcattgtccttttaaaaatggacacttcatatagttatgacctttaactaatttgccttattagacatgatattttaaagagaaacctcttgcaacaaacaacacattcttgacagcgactcttagtacatcaccttcttgtatttgtgtccctgtcagaaggaacatgtagacatcttaaatctaatgggatctaacaggatcactgctttgaagtctgaatgaccatatgcctaattatcaaaggatttaaactgggctttggttctaaatccttccctctgctcttgtcatcaaaataaacacatgtgaaacatcaaatcaagtcctacatatatatactcatatttattctgacaacctatttaatgacatttctaacagcaacccccccacactacacacacacacacacacacacacacacacacmtacacacacagtggctaagcatatgtttgaaaacgtaaatcacatttaaagatctggcactgtctgctttgataaaccatttattattttatcagattagacttctgtttacaatttctatcaaggcacattgttgaaggacttctgccattcaaatatatgcatacctgtgtttgaaaagtctggtttttcattgtgaaatttagcttttcaaggaaatttatgaaaatgaatacatttaattcagtaatagtcatccgtttggggcattataaacaattatatctagtttttgggaggagcagtgtaaaccaaacagactttaatcacttgatatttgtttcttcttgatttcatatttagacctgtgtctgtgttttcagtgtagtgtatctattataatacatttaattggtgttagcttgattaccaagaaatgattacaggtggctaaagacatctgtgtgattctgattactgtgtgctctcatgtccttaaattcatttatagctatgagtttttcaagctgtttttagtatgtctttagacttatacatttaaatgaaattcttaatttttaaaagttatcactgcagagattgatgggatctaaaatttaaattgttaagttaaagttgggagacatgcttttcctttaagggctcaacttcattcaatgtccaygtaattagagtcctcatgaactgtcaggctctctcttaatgtgtacactaccataattacctacccttcagaaatgaactcaaacacaattcaaaatatcagttattaaaaattgttccaggttaatggttaatcctctcaagatagtttgagagggatgtagggagaagaatgactattattaccatagatatgaacatrtttgttatcatcttgtagactatgtgagaaaattaaatacaatgtccataataaatacttagatttctttcatattttttaaagatatgctcattgttaagatagatgggggctgtgcaagatatatcatgttaaggttttaacatgaagaggaattaattgggactctgtttcatatattccactacattgaattgtcacttaaatcttatttaagctcttatacaacattttaggaagagtgtgattaatctgcttgttgacacattggtgaacgtaatgcatgtggtgagtagccactgtaaacagaaagaagaatttaaaagcatagcacaatcaaaaatcatccaaataacatcttgaagatagtagtaaatgtcaacttagtctcttgtcttatattaattgccttgatattacaagcaaagcacctcttttttgttaataaagtggattttgacatatgaggaggattatgtagcttagaagcataataactgacttaatttcctcttgagattattattatataattagtttcagatagagaaggtgagatttatatgactatcaaaaccccaatgaaatacaaccattagtttaaagaaagaaaaatggaataaaatatatgtaaaggtgtatccattccagcttatttatgaagaaggtaagatggtgtattgggttataaattgataaagtggctaaaattcgttggttgtttactttgtatttgtactgtggtaagtaaacatctggcaggtcttaacatgttttatctttataacaacaatatgagtaatagtatgttactgttgccattgtataaatgaggcmtcacctcagaatcacacagctaatatgtgtgagcatcaaggatgacaccagtttattctgccttgaagccaataatctaatagttctcagtctgacattttcactgactgataatttaaaaaaatcaagtggtaaactttatgtgattattttcttttgtatagtaagaatgattgaaaaagtctacttctatcatcwcaattttataaaagtggatattttaacaccaaataacatggaagaactgaatctcaaaataaataatagttatttaaagagaataaattaagctccctgtacatttttccacattgtactcattttcctaatttcacccaagactgatgaaaatttcatcacaaaaaatttcccgtagattgtgcttggatgcccatcttactctgaaccactgtgatatgctgcctactctatgcacccacacagctctggccggcatggtcatcatattcatgacttgatgacataatgcttatagcttattccattctcttcctagtttcaaataaaatttggacctaggaaagatgctagcacttgctttagccttagtttactgtgttaatgtttgttgaaatgattggaagattagggatgacttgttccttcttggtagttaactgccatttactgacactaagatggtgccactctgtgtcctgggattggaaatgaatattgggcaatgacaaaaagagcttgtcagaactaatttctccatcttccctccaaaaaacacatcccaacttgtacgggtcagtttgctccatttttacttctttgccttggcgaaagtgaagcaggtttggttagtgctcttgtaaaactggtggttggttttacatcccaggttgctttagatagtgtctatttgggccatcaaagaggaaaagaatactggtggagtgtgtgaaatgtggctaaattgacctaagacattagtttcatttctaccaaagcaggttgtaaatccaaattaccttgagtttatttattcattgtagttacaggtgttcaggtcccactgatacagagtctcatttaactgggatggatccacagaatctacctttatgcacattttcctatgtgattctgaggtgcagtgacatttcaagcaactaatctgcttgtagtatatcacttaacagatttatttaacaaaacacagcaattactatgccccagagttgttctaagtgctttgcagatattgattcatttaatcataaagaccttcaaaagtagattttattagtattcttattttagagacaaggaaagtgagtcacagaaaggttaagtaagttggccagtgtaagaagatcagtggaagggcaaggatgatgttaattttgataaaataattaaaactacctacgtgtgtgtgtgtgtgtgtgtgtgtgcatgtgtgtgtgtgttctgagacagagtctgcctctgttacccatgctggagtgcagtggtgcaattatagttcactgtagccttaaaccccttggcgcagcctcccaagtaactaggactacaggcatgtgctgccatgtcaggctaatttttaattttttttttttttggtagagacagagtctcactatgttgcccaggctggtcttaaactcctggcctcaagtagtcctcccgcctcagcctcccaatgtactgggattacaggcatgagccactgatcctggccgtgctttgagccacaaaacttgaagtagcagaattgaaaacagaacacagatttctatgtcttttccctatttgagtaagttttgcctttgaaagtgaaggaagaaaagctgatatttctcgagttggaaaatttttaaaaagtttatattttagaagttgttgcaccagataaataaatataattatgaatgggatagtaaacatggaaaaatcagagtggttttcctcaagtagtgtcatcattgacttggcctctaattagaccaaaacaatattaataatcagtaatacataatgttgcagacaagaatatttttaaaagatttggaaaataaacagctgtttgtttcaatccataacaaaataaccatatatacttcaaatacgtaactaagatttacatctttatactaaataagaaacaatttattttcctgtaatgctcctcataagatctttaagttacattaggaaatattcatrtttatggaaggattggggaaattctacctaaatttatggattttttctcaataatttttgtaagctttgtataagatggaatatttgtaatttataatcacttgtgaaaastgatgtattgatctttaacaaagtacattttctcctttctgttatttaatatttttgtttaatacactaaaataatcttgtaaaatggcttttctttggtgttttttaaaawgaattttattttagaccgatgtttgattaaattatgtaaattatttgaattctaaacycccaataatgagtcattccacttgtgtggtttaaaawmgagttaaaaatcggcatttagaaacaatgtgatttccaattcagtaaatgatttaagggtttatggggttactgactattctactttcaagactcactaccatcttttctctttttcttatagcaaatttcaccaggattcctgagacttatatttcttcgattctcttgatcattcagtctcaaataggattatatatcacttgtcctgaaaaatattagaaacagtctgtcactgaatatggtgcagattttattcatatgttatagattttaagcataccttttgatttttttcttaaggtaaatactgtatttattattttttagtattctttttctttgctccatatcttgttctttgttcttctttccattcttcttcatggtgctttttgctttaaattgtctctcttttatgacttaataaatcttcatgtagccagactgaactatgtattggtttccttgattctggtaaaacaaaacaaaacaaaacaaaaaacaaaaaaggaaattaaaaaaggctgttcatttaatcatttagtttctgaataggtaagagacactatagctcttgcatctaggtcatttaacaggtggaaggggatgctaaatttgcatctcattacctttgtctacttttagarttgtgtgcttgggccctgtggtcagttggcaggtggcaggccatggctccaaaggaatgccgtgttatttgaggggatgccaatttcacttgccacacggttctcacattacttggtcagactttttaaaaataaaacaaccaatatatgkttcattatttatgctagattactgacttcacrtcaaaaatcattgtgatattgataggctgtgataaataattttaacaatttatattctgtggtacccactgtcagacttatggatagtatttcctctattttggtaacctagagcagacattttgtcaaaaatttttaaaagacttttattgttgtgcactaaagttgagatgaattgtaggtaattggatggtacagctgaattaacacattgaattgctagttatgagacacttcatttgctgttgcagacaacaataggcccatttttgcttctacaatgcacaaattcttattatctatataaaatgctaattcaagtgggataacatgtatacatcatttccattccttttgtaaggaaaactaacttccacaaatgtaaaatatttgcaaatatctcaaataattttgaacttcaattaatctttttttgcaaatgttaatcagttttctcattttccacaaamagaacaggatataaggcatttcaaacatgaaatcagtagtatcaattttaccctgtgtcccttaaggtctgtgcagatgggcaattcacatttatctcaacagagatccttatttgaatcattctgaagaacattattactatcatgattatggtgacatgcaatagtgtaataattttgttggctcttgggtttttttcattwagactttttaaagtatagcttcttcgttttcaatagatgagtatccattttaagaggaaggaataagaactatttttatctaaactatctcctgaaaactcattaagtcaagcattaaatggagggattaaaagttataaaactattacaaattgtagagagtaaaggaaggcaaaggaaactgcctagaatgtagkggggggtcgaggcagggggaggtgggttggtggcttgaagttgaggagattcactctgcccatattaagcccccaaaggcctgaggctcaataatgytgaaaaaagtaaagaacagaaatgagagtctggggctaaaacaaaataatttatcaaacatgtatagatgaaatagccttgtattcacaactctattttctatgtaaacatctctatagtaagtttttctcactcactcacctaactatccactcttaacatgtactaactagcaagggacagcaagggcaactaaggatgggtcttagaaaaacaatgcctcttttattttggcacttacagtctttaagcctaatgatcagctttttgcttgccctaaagcaaagtcttttagtcaacaagacccactcaagttcacagagatttgcactttttattcctttatattctttacttttttttttttttcttgagccagggtctcttgcccaggctggaatacagtggcatgatcatagctcactacatgtaacctcaaactcctgggctaaagcaatcctcctgccttagcctcccaaggaagcagggctrcagaaatgtctcaccacacccagctaacttttataattttgtagaaatggggkatcttgctatgctacccaggctggtattccttcattcttaamtacataaaacagcaatcaaggatcacagacatttaagatataatgtaggaacaaaaattttagaacgtctgcaacatgaaaaataaagagaccaagttaaagaaaccagtaacaacaaaatgactttgcaagaaacacacagaggaccataaaagagacaaatatatgttatttttatatatatatctatatatacacacatatatatgtatattatatatatatatatatataattcttgaaaagatccaggaaaatattgcattcataaaacaagtggatgatatagaaaaggaacactaaatgagtaagaaaaactcttggaaattgaatattttcaaatattttaagggaaaatttgtgattttaaatggagaaaaatctatcaattctaataaaaatgaaacaagatggaaaatatgagtcacagtgaatctccacgaagcatgacttcctaattggacgtctagtaagaaaacaaaaaatacagttagagcaacattaatgaattgaggataattatcaaatttctgaggaaaggtgatttacaactcagcataccatacccagtcaaaatatcccgtgtyagggtagaattaagacattttaagacatatraagacaaacgttatcttctttaaatataacctttcttgaaaagttactccaggttgaacctcagcaaactatggttaagaaaaacagaaagacatggcatgatggctatgtgaagtagtccaggaaggtgaacaaattgtgttgtttcaacctggtataggattagtataaagaaatggagggtttggttggtgggaggatttgggacaaaaaggggacattatagaatatttaatgtttaaggagtatttaaaaagacaaaaaatgtacaaagaaaaaaagtagaaatgtcaggtaaaacaaaagaatatgcaaaaagggaaaataaccataggactttagttggctccaaaatgaataatatttttatattaaatatacatggtatttactgattttcatcttttgattgattttcagtcaatcttacttaaaatgtggaagataattgtggtgatagaacaaaatgcaaatattatcaagactgacaatgtcacgataaacatacaggtggctgaggttgggaattaggtatggggactggagagagttgaaggaaaggttagggattggaatagtagcatatcacaaaataggagtcaagagatagtgtctatagttaatataagaaatagcactgatatagtccttaaaattacaaagataaccaacaagaggaataatgactacattaggaggaaagatacagagaagttctgaatatgatgtgaagtgacttagataatggctaaactactttgagtttgcttggtcaaacttgctttaatttttttgaaaaaaaaaatgtgattatgcttcgatgagtgtgtacttcccagatttccacagattccaaccactctctgtggaggcatcataatccataaagatattgggatttaaagattccattgtagagctaataaacaattaaaagtgagttcctctggggagaggaactggttggggttgagggggtttactatataaagaaatataaattcttggcacttttgtcactgaacgtgatagcaataattccctatagtactacattatggggctaagaggggaacattggatttagtcctgataaagccattaataaactctataacatgtcatttaagttctctgaatgtcagtttcctcatctttaaagcaacaggtgctgggtttgtaatcccagcacttttggaggctgaggtgggcggatcatctgaggtcaggagttcragaccagcctggccaacatggtgaaacccagtctgtactaaaaatacgaatatatatatatatatatatgtgtgtgtatatatatatatrtgtgtgtgtgtgtatatatatgtgtgtgtgtgtgtgtrtatatgtatayacacayacacacacacacacacacacacattttttagccgagcgtcgtggcacgcacttctagtcccagctactcaggaggctgaaggaagagaatcattttaacccaggaggtaaaggttgcagtgagccgagattgcaccattgcactccagcctggcaacaagagcaaaactttgwctcaaaagataaaataaagtaaaataaataaaataaaataaaataaaaataaatcaactgatattaaaaagtccccagtaccactttgtagtctaatgtttattttgtgaagataggtctatcattttattgagaataaagtgaactagaatttttctaggtataaagcctaagactgatacagagctcttacttgctctgggtctttattagactaaaggtgttcattgccttcttaacaatgatcttcagtctctgtcctgtatcctttaagtttgattctttactttgtgtctaactgactttaccaatcaaatcagaatcatacatctttagttttatgaatgtgtgtaaccagatcctaaatagaattgttttaatagaacttttttcattcttcaaggccttattttcccacagcttaatgkttttttttgctgatgtaaaaatgcacattacaagatgattgtttaaaagatcgtatctccatttcacctgttttcctaaacactttcaaagcactgaggaataatttgaaacaacattttatagtggattccagatagaggcagtacattttatagttctctctgtttttaaacggtaccagttactgtgattacctgatgtgcttgcaaatttacagaagaattggtaaatgaaggatggccatttcagtgttcacagatgtgaagatattgccatcttagatcagcagctgctcttgaaatgttcactccttagtatccttgggctaacactaattttgtagctgatcaaaataattgctgtaaagatactagctattcctaattaacgtgagcatatgggtagttcccacaaaaaaatttactaacctgccggttgttgctgtgtatrtgttcatgctttagcattcttaactatgaacatgaatcagcaaactaaaaaataatcatagttagctttctatggatagaaatggagagagagacagagagagagaaagagagagaaatgaggaagtttccaaggttccccccatagtgtaggatacgtataccacaaaaatatattgtggaaaactgagaaaaaatactttatttaatttatgtggtaaaacctagtcttttatagtataaaaggataggggattctgaactgaaaaaaaaaaaacaaattaacaatgaggcactcttttttttttaaattatacttttaagttttaggatacatgtgcacaacgtgcaggtttgttatgtatgtatgcatgtgccatgttggtgtgctgcacccattaacttgtcatttaacattaggtatatctcctaatgctatccctccccactccccccaccccgcaacaggccccagtgtgtgatgttccccttcctgtgtctaagaaaatgtggcacatatacatcatggaatactatgcagccataaaaagcgatgagttcatgtcctttgtagggacatggatgaagctggaaaccatcattctcagcaaactatagcaaagacaaaaaaccaaacactgcatgttctcactcataggtgggaattgaacaatgagawcacatggacamaggaagaggcactttttaaagctgtgaatatctgttttctcttgatagtttgtgattaccgtctctcttggtcccctcattttaccattttctgggtgatcttgatttgaggacagtaacttgtgggcagttagagctcttttgtcctgttattttatgtggttggtgaatctaaggtccattaagttacatattaaagttgaagttcttggcaattaattaggaccttttagcatattaacttcctcttcattctaagataagataaatgtagagattcaagttaggagacagtaaaacacaattaagtgttaaagacacaagtttaattttgtggtgcctggaatcacataaatgtagtttaaaaattcttatatctaattactagaagtatgacagaagacagttacatagcctgcatggaacttagttacctcatctttaaaatggagataatagtcatagtagataacatgaatacaacccaggtctcttactgggcaagaaggtctcttttaagtgctttacataacattaactcatttarttcttacagcactatgagctagatattctcatccaccttataattgtaatgacatgagagttgaggtgacaatgcatgaaatgtactgattgttgtgcttggcacttagcaggtgctcaataaatgtgagctgttatttgtgtatctcctctccgatggtcctctcttggtatctagtgtgacaggtgcctagtaaatttggcctgcttaaccgattttcgaaataaaatctaagacctggaagagttattgtaaggagttactgcaaaattgggccccaagtgccaataaataaataggagttaaagatgggactgaagccaagtgaagtagaaacagtaaaactgtgttagtgaaatattgagaaatcttacttgagagaagggaagataaatgtgtgaaggcaaaggtgcattcatttcatgataaatattatgatattatacacattatacacaatgctaaacaatgacctaccactttgcaaaaaagtgcatctagctgagaacaaggttgatatcttctatttgggaatttccaacatcaccgctgatttttgttaggtgttctgtgttaagtgacagccatcttgcatttcccccttagttatttgatctgctttgactatgttgtttttcttgtggaagaggcttagagaaattgaaagatcaatgctttttgtgtgtgtaaaatagagaacattttaaaacattgccatcccacccttcatttctgaatgaaaaagatgaaacattgtatatttcttattctttaaagacacagattttattttcggtatgtgatatctagtttttaatgatttttatacatgcttatttggagactttctgcttttttaatgtggaagaaagcataatttgaaataacaaattgtaattgatttcccatttagaaatatttgaattccacttctcttttcttatcaagtgaggagaatatgttttgagcactggtattttgtcatttccttcataataacttgtgcaaatgataattatacataaattaataaactgctggtgggaatttaatgatgcatcatactgtttttgatttatttccaaatcatttgcagaatgttgaaatgtacaaggactaagttttaaatgtaacctacaacttcctcagctccaagaacatattcagtaaaataaaatagttatttttaaaaatggtggtacagaaataaattgcattatgttttgtgagcttattatatgaggacattataggttattaaatagtattgtatttatctgtgtttaaaaaatgtttcatattgcaagtaaataaattatttttaaaacctattagaacttttgccatgtgattcaagcaattttctagtgctgcctaaaataatgttgggtcctcatttgcatttccttagtgctcctgtttcattccatcttgaagttttgtgtgccacttgaaaatactttaaaagtaattaaaaataaaattttgttacaagcttcaataactttgtaaacaatttctacataaaatatatttaaaatcaagtactaactcctgccaattctggggaccatgcatgaggttaaccattttcaaccaaggttacatgtactcacagacagacaattgattcattttcttgtattattgcatctatctgccaacatattacaccaattataattattttatttatagagtgatagtcaattgataattaatcctgtaagttcactttcagaacagtcttcattttattcaacaccaagcaccttggaagttagtaagtcacaaaagatgttttccatagttataaaatatttagcaatatgattaattttacagtgtattcttcacgagcatgaaatcaaagatacactgtttcctagcacagggcagagttgatgcaaactacctgtgtgtgtgcttttctgcaaagcgctcctatggaaagttgatttttcatttttctaagtttcctggcagtttttaagtgtggtcctccacgatcttggccttggacaccactaaaactaagtataaattattgatcttatttcataattcagattcattcttgactttcagttccttcattaactctagagtttattttgacctgatattagatcaaattaaattttgccaggtggattaaaaaaaaatgctccttatcccaaaccttacgttcagtataactttcttgttaggttctaatcagttttaagtttttaaccaccctcaaagccttcctgacactcttttatccttcctcaccccacactaacacactctaaaactactacatgtagtgggagttactttctgtctgtttgctttttataaaatctcatatgtatttattacttaccattgaaaaattttattatgtgattttaatcatgttgtattatatgcacttgccattttactataattcactaaataccgatgcacttttatttggccagaggcctacatctcacagtaactgggtatataaaattgtgggccagtaaaatgctgctacattttaatatagaaatgactgtactttattgatgcatgaaatgattcctgcttaagcagtcagtatacataatcaattaataaatgtagctagtgattttgagatctacatagtttaaggcactatgtaaatgcaagatcaggcacttccaatttattgagatacatacttaccagtgggttttcagcagtgggttcatgctcatggcatgcaattattgaatgctttttgcaattataaaaccctgggggtccactggccaaaatttagttttgtgggtgtgtctgcacttctgcttgcttcctgtgaagtgtctgccctactgaagtctcatactatcaagataattgttctctcattcttgcttctgagaattattttctcaatcaggaaagagtaacacctgcgaaatagagctacatgttttcatgaggctattctatcaagaaaggatgtctttgtaacataaacaaacacaaaaatcatctgtctatatgaacagtgttccaaatgtatgaatcatgaattacaaatgtataaattacatgttgttattttgtagaatttttagttttccttttctgtgttttagtaaatgtgttcatattatgttatttatggttgtattttatgggaaaatatgtgcctcattcattcacttatcactgtgcaggggttcaaggacagggagttttgttagtatcgacagttgtgatctcatgatatacttggctgattgccatcaaaccagtcactcaggggacttaagaattctgatctcatacacaatgtacttggtctcagggataaaattcacactgcaccccaacttaaaactttttcccgtgttgctttctcaatccaggttcacaccttctatttattagaaatggtatgagttcctgccttttagctgacacttttatctgggtctccctctgtaaggctaaatgcccttgttagaatggcacaacaacaacagcaacaaaaacagaagagaaaacaaaaggaaaggaaaggagcttgtatccccagactcatgctgtgtggtggctggtttgtttcttctttcttcagcacatcactcctgtgacatgctgtgcctcagactgcttgactgaccttgccgtttagagctgttaaacctgaatagagcagagcttttcttttcccttccagtaggtctcaggagtgagatctggtcactggcatttattctctgacccttaactgtggttccccttgaaatggagytaatcaaggtgttgttccacttatttattgatgctcatgaagcattcattgttggtacatataattttgcctattcctatacttgaataaattctttcttctacctaaactatggatgtatgtctacatctmtttgctatttgtagattagaaaatccagaaaggcagtctaacagaattctttttgtgctgtacctagcaaaatgctctacacaattaagtccttactgcatgcatttagctacatgcatttaattagattgcatatgtacagataggtcccttgggccttccagagcagtagaggctactttgcaaaatgatgcaggccaaaaaggatttaggtcagtcaaatttttatctggctttcccagtaggatagttgaaactgcctttctacttgctataagaatgtcttccatgtgactttttttttcttctcaaattccactgttagctagtcagagattgtgcactttatatgcttcttgtcaaactcatttggtatttgaaatcacaacgcctttatgattttcacccaagtggcttcagagttctgccacttatgtcatttataagaatttgcctggaaattgtttcctttgcaggagacataagtcacagggtttaaaattgaaaaggatctcaagggctgattctgtcactcctgctagccctcagtcaaggttgtgcttaatctaaacccaagactaatatgtttctctaaaataaaactatgcctcatcattggtttgttaaatactctacattgtcaatagagggatctctgaatgagcatgtaactcctgggtgttaaaaaccttcaaaagctctacaggttaaatttcaaattctttagcatatcattcaaggtccttcttagagatctattccaaatgaccttttttggccttgcatctcactttttaccccctcttaatctactttcaggattcgctgaattgattctctgttacctggacttatcatagaagtccatgattgtttctttgctcacgttgctttgcagccttgaattacctagatgctcatttcaaagatcagctcacacgagcaaaaccttgaaggatttctccaaatccccaaggcaaaattattctattttctgtgttcccatagaaccttgttcctattgctgttgctaactttcaacctgttatcatagtggtgccctcacatgyctcccattttagatgagaagctttttcacaatggagacatcacatttctcattgttcctctgagacctaccaaagtccataatacaaccattcattctataaatgtcttgaaaaattgttaaatattgatgcagtaggataaagggctatgaatttaatgatgctctattgaatgaatctttgtgacatgccttgtatctttttctggaatataatgaggatataaaaatattaacataatctcttgcaatgataatctctacaagtttataaaaatcatgggtccaagattatgctaaaaataaaacccatttcttccatcccatgtttatarcacacttctagttggaccgttatttgaaaggccccagatttaaagttaggtttaaagatgttctaaaatgtcttcacttaaaaaacaaaaagacaaaattaatatctaagcaatctttaatttctagaaatttatttttacagtgtagtataagctctcctggtactgttaaagctatttctttacttataattttaaaaataacttttcacattactaaaaacaaactactaaacatttttyaatgaaatataaatttctttatttgggtcatttttaatgtatcctaattttccaactgttaattctttccatttctgtcctctgtcttcattttaaatatgattcgacatgtgaaccctaatgtatgctagccaaatactcattaaacccatgacaaaaacattctttaattttatctgcaaattcttagataatgtgtatcatttaggaattgtgctcagtgtgtatccagagtggcctaaagaaattggtactttatttttccctcataagatatgaagtcttgatgttggtagtctgctaagatgacctctgtaatgttaccagagatcttggattcttgcattcattctaggattcttgtactcaaaatagctgtcagggttccaatcattataactacattttgaacaggcgaaggtcaaagagcataaatgtgccaatagcagctaagaaaggagagattagacactggcgaggcacctttcaggttcaaccacattcgtcaaaaaatcatgttttcttaacttttggaaaattgattttgtttcttacttatgttgcaactttgtactattttccagctcttttaatgttkaagttctgcctaacttatagctgtgtaattagttcttacctatgcactttgttgcttttgttcactttcagcttttaagctagtatttttttggattataacatgatatgtattttttgtggaatatttggaaaattagaaaaaatgtaaaaaagaatatgaaaattacttacatttttacaccatttagacgtaacaatgttaacatttcactgtatagtgaattgttatactgaatttatatacatatataggcacatrtatttacatatatgtaaattatgtcattatttacaaaacaaytttattctccatattattttagaaattattgatattgttttgaagattagattttggaatataaataaatattatttgggacattatttttatgactacatggcatttcatcatatggacaagccataatttacttagttgatccctaattgttgcttttatggatttaaaattgtagcattataaatgacacggatgaagtactttgaacgtgaaattttgcctgtatatcttattatgtcttagaataacttgatggaagtggaatgggtcaaaaagtaaggatatgcaaaggaaaaggcagcatttcttcagaaactaggaaataatgaagcaaaaggtataaattatgccatgctttattgtgtgtttactgggaatggagtgcagtgaataaagcagaagtgttccagttttcatcccagaagacagaagagccaatattttctcctgtttcttcaggtagcgaggggccagtggtgaaggagctgtcattgaacactcttcacgttggctggtgactgcttggaacaatcattttgccacttctttaaacattcaatgaaaaaaaatgaaacaaagggaacaaagaattgacagacaacccacttgaatctctcgagaccccacttgagaacccacaggtctctggcctctcctcaactggttgaataaaaaggaggaatggatgatagagtattcagttaggaaatgcaacaacatggcacctaaccatgatgtagagactggatatggaattacgcagtgatataaattggctgatgaagtacagagaggttatgtttaaatattggttgtgtacaaatcaggggattctgatttgtcatgcctgtgatcgaaaatatcatgagatcattatgaagtagtatttacaataagaaaatatgcaagggagttagtggccttgaaggtcaaattaaaagagagagagagatgggggtgacasggagggaggaaaagagggaggacatactagggatgacttttgaagttatagattaatcagtttgctttgatatttatgaaaataataagacaaaatgatgattgatttccatacacttctaagagcagaaaaaatggggtaacagccaacatgtctgagagaagtaaataactcagagttaatgtaattttcttctctaacacaataacagaacttaaatatgagaggacaaaaagttcatatatctttacttcggtaaggtttagtttttgtctgacatgctgttctgatcaaccagcaaagaatatgtagtcttgtgtaaagggaggcatagcttgttacttgtccctgaatcagtgacctggtagagcaaacaaagtaagactaaaagtgtttattggggacttgtactgaataatatttgtaataatctccataatttaataatacaaaatgtggaatctacagactaggaaaattgctaaatctatgggaatttgcaggaatctaaagtgaatatgggaattaaaaaagagggactgaaataagttggctgtgtatgagaaccattgattaaaatggcattaaaaatggtaatatctagtgttgctgagacgttttgacacattgttgctataaattggtgatgagacctggaatagttgtttgtattgttcagggggatttgtagtgtttcctgccttaattacatcccttatcctgtaatgaccatttttttctatgttctgagtttcaagattgtaacacatcttcctctatttgtaagcatttttctttttttagctcaacaaaatgaataattattttactaaagttgctttgtttccatgcctttccgtataaacaatttttcatttcagtgttacctttttgtgtaatcttttagaagacattttraaaggtaattaaactcaacatgtagaatacctagagtgcatacaactgaaatgaaggcatgaccatatgcagaactagggtcaagttggggcatcagcaggcaacaaacactttgtcatgactataactggctgcagtaattgtaaaatataacctgatttggaagatggtcaaataggaaagttgggtacatcagtttcataaaatatggtttaacaagttttaacagtctcatgctacttgacccagaaatcccagttctgggcattttatcctaaggaaacaatcacgctgtggcagaagatatatgcacaaggaccttcacagtaacttctttttgccacaaatatttgatgataatttatattcagaaaataagtaaatgatggcatgccatagcaacaggatattaatcagtgatcttgcagtgtaatgataaaaaaagatattgtcacacaagaaattcacaattaagtaaaaagagaatataatcataaaatagtttgtatgatataattatttaaataatagtctgcgagtaagaacaggatagttgtttctggaattaaggatgattttatatatatatatatatwtwttttttttttttttttttttttttgagacggagtctcgctctgtcgcccaggctggagtgcagtggcgggatctcggctcactgcaagctccgcctcccgggttaatgccattctcctgcctcagcctcccaagtagctgggactacaggcgcccgccactacgcccggctaattttttgtatttttagtagagacggggtttcaccgttttagccgggatggtctcgatctcctgacctcgtgatccgcccgcctcggcctcccaaagtgctgggattacaggcgtgagccaccgcgcccggccggatgattttatatttttatgttttttcctaaattaaaaaaaacttgccactttcgatttagaaaactaattgtataaggaaaaaccacttatattgctaatctttaaagactgataaccttttgtcttttttctttaagtcctgactactttcacttattttttgattaccattttattatttaactttacattgcttaattttctgactataatataatgttgtttgtgtgatttattttaaaactctaaagttggttttacatttgttctcattctcctgtattttatatatttaataggtatatatcaatatgtaaattatgaataaatatatctttcatttaatctgaatatataaatattaaatatatatgaagatgtaaattgtatatacataaacactaaatgatatatagtatgtaagctatcactctggatttctcactatactaattattcaaaaacatttatgattttgaattattttttaacctttactttttttctgatttatttatttttaacttttagcttcaagggtatgtgtgcagatttgttatataggctaattgtgtgttacaggggtttggtgtacagattatattgtcacccaggtaataagcatagtacccgataggtagttttttgatcctcaccttcttcctacctttcagcttcaagtaggacccagtgtctgttgttctcttcttaaaaatactttctcgatatatgtttgaatattattctgtaattcctaaatataaatgtctagattaaaataaaaccttttatttttatttttaccttgttgcataattttaaattttgacatactttcaaatgtacagaaaatttataagaattgtgtttaagaataccttttgttcagattcaacagttgtttacaattttgcctcttttgcttcatttctgtctgtgctttctstctatrtgctcatgtgtgcatgcacacgtgtagacacaccacattttttttcctgaatcatttgagaatcagttgcagacatcatgcttccttaactgaagtgtttaagtgtacatttcctaagaaaaagaatattgccctctataaccggtgtgtaatttttaatgcaatattcacaatatattacttgtattgtgtaactcccagtatatttctaggatcccaggtgtattttgttgtcttatcattaaaagtccttttatctggaacatttcctcagtctaattacttggtcattataagagttcagatcagatatggagcgcaatattctcaatttggctttactgaatgtttcctaatggttaattctgttttgcatttttgacaggcataccacaaaagtgatgttgtgttcttctcaagtgcatcatacttggaggcatgtcgtatttgtctgattattgatgatgttgtctttgatcaatttgttaaggtggtctctgccaagtttctccactactagttactattttccccattgtaattaataagtaatttgtgggaagatacttttagactggaaataccatgtttgtcatcacactttcatgcgctggtgctgatccactaatgttttctttactgattcaggtacctaaaatattatggtggttttctaactccatcagtccatctatactttttagttgacattatactcgaagaaggagttttcccttcttaatttcatactttattatattttccttaatacagtttaatccattacaataattatttatttcccagttgtcccagattaaaccagtaaaagcctcttgaagctaggacctgtgtccttttgacatattcccatcattttataaatgccttacttgcttttcttccagaaaaaaatgccacctcaaatgtcatgtatttttaagtcttctctctgtgtccatgttctaatatgccagaatagtttttcagaattttcataggttgagtggattttttgtgagtgattttcatgtcactgttaggaattctggtatcctwtacctttttcacagtttttctggaccccatatatctctgtatatagtgggagcttgaaagatagctctgttagaaattggtgtctaattttctgtttacatacaatctgacatgtttattattctccagcttccagttgtgccgaaggacttggatttgtgtgttttaatttgtttttttaggtgtatatattttttaggatatgtgaacagtttcagatttaggtggctcctactacctgagttcctcagaatgccagtccatatttttatgcattctgcaaaatatattgatatttgaagacaattgcaatatgccattgtttaaccaaaatttatggattgtatagctttacctttagctgttagtgttatcttaatccagtttatccaattaaattgaagtgtttaatgtatcataattattttattacatagtatgcctatcaatccaggaaatagctctctgaaaggcatgtccatggtaaatgtaaaattattatatgaggtctcattctttcacttgatgatgtactaatcaattgtttgtaatatttttcccttagctatgaaaattatcaaatatatatttaaaaaataaaaaatattcaaacccacaaaattttaaaacatatatagattgaaataagataaccaatcaatagcatgtgattataggaatctagtgaaatgtagtattgtaagtggttatttcaattgacaaaatacagtttttgagaataataaaggtaaattcttcctccagttgcacagcaaaaaaaaaaaaaaaaaaatgatggcaattcttaataaaggagggcttggatctggtggaaaacactccagtatttaaaattgtcagagtaaaagatggtttgtaaaagtaggaagtagatgaggggcaaccatttttctgttccatacctgagtctagccttataaaaatcttcactttttcaaaaaacctacatataaggattttttatgagaaatcttctgcttttgaatattatgtaatattttaaaaaccatggtgtgggacaaacgaaatgtatcagtaagccagatgtggttttcatgcccccagttttcaatctctgctctggatgcaacctagaaactagcagatattgcrgtaagatgaaacccaggtcagaaaagctggttttgagcccaggcttgcctcctattggctgtgtcagattgagcaagtgatgtaattagtgttcacctcagtcttcttgtctatgaggatgaatatgctaaagtatgaagaaatatagagatttactaattgttataactttataattgtattgaattatatgtgaagaagaatatatatcttttattatgttttaagttttaaacttagaaaatacaaagtttcttgggcatttcttgatttttttccatttaactataaacttgctaactatatttagttttctctgtttgagaggttctgtgtgaaacattagcaaaatcatttattcatgggccaggtagagacctgtgcaatcccaatgtctttaacatactagaggaagataaattagattttatattcaaaatgcttggtctgaatattgaactgttgatttggttacagttggttttggtgaacacaaaagcacaacctctgtattatttaactgctatttctgcttagtaccatcaagacccagatctctcagcagaaattctgtttgttgctgagaacttaatattcctttaaagatgtttggtacttaaggggatttttatttatattgttcatagtctgtctgatctgtctgaaagaacacactgtatttttgaagggagatatatacatatatatatatatatatttttttttttttttttttttgagatggagtctcattctgtctcccaggctggagtgcagtggcacgatctcatctcactgcaacctccgcctcctgggttcaagtgatggtcctgcctcagcctcccgagtagctgggactacaggcactcactaccatgcctggctaatttttgtatttttagtaaagacagggtttcgccatgttggccagactgatattttcattaggttgtattttattatatgtctttgaacagttcttttataacaccgtatatactccgtagtgtaaaacccatttaatttgaaatattttgagattcaaaatcaatatgctctttcaaaaccctactctaaaacaaattaattaataatgcttgattaaatcactttctcctcataatcacattgatattctgaaacacagagaatggaactgtttgtgtatttttgtggggtatgcaggtcgtgtgcctgcatttttctcagtgcatggatttcaattagaatttaaatgcagttacaaagtgaattggtgcaactctctggataaatcaagccaaattcttttctaactcagtgatcctcatatgtcagataatagtaccttttaaaaacttgaaatatttgaataatcacctcaactctccacgtatatttacttatgaacatctcatatttttgaattacttttatgccattctgccaatattctggggggcactgtgtttcttgcatataatatgaagctagtatgcagamttctcttacctctttcttcaaagtgttctccttgactgatgttttggaatatttgcatatagttgggaatacttctgttcatcagcccattatactttggtagatatatrgtctacattttgtaaaacctatttaagcacgttaaagtatatagtgtttaagtgtgtgttggtctgtattagtttttctgtgatcttgacaaattgtttactcttttggattttttcttcctccacagatgcatttttgtagaagcattttgaggatgaatgtttgcaaatcattttgaaattgccaagtgccacatacagtaagtaatatttttatttttctactcaattgcagtcatgttcgattaatttggcagacagtcatgaaagaacccatttctatttacagtctttgatattgtcaacattgttaaagataagaaggttgtatgtgtgcagcattatttctggggtctttattctgttccattgttctgtgtgtctctttttgtatcagtgccttgcagttttggttactacagccctgtggtatagtttgaagtcgggtaatgtgatacctctagttttttctttatgcttaagattgccttggctattttggctctttttggtttatgaattataaaatagtttttcctaattatatgaacaatatcgtttgcagtttgataggaatagtattgaatctgtaaattgctttggacrtcatgaccattttatcaatcttgattcttcctgtccatgagcatgggatgtttttctatttgtgtcatgtctaatttctttgaccagtgttttgtagagaactttctcctccttggttagctgtattcctaggtattttattcttttgggggttactgtgagtgggattgtgttctcgttttgctgtcaggctagaaattgttgttgtagagaaatatacctctgccctgatgaagtgttctggccaacactacccatcagagtaaatgagtattttgtgactgaatttcaaatttaaaaaaataagaattgccttatattcagtgtcaatagaaccaatcagcaacccaaaatgagttgccttgaacaaaatgctatttgattagagaaaacttaaaaatatataacagctcctcccctaatggcagatataataccttactcttctattatacttttcagcatttgcagtggctgaccacagccttttcttgcactcctttttagttgctttttgcagtgaagaagagattgcaatgaagggttgagcttgacttaccattctcttccctctttattatcttcagatgtgtagtgttcatagtactatcctttacatcacactggccacattgatgctttcccttttggactctggtgatcttcaaattctttcacgttagccatccattggtcctaacccctgtacactttatttcttgaaacaaatcatcagcaacattttatctggggacattttcagaattactagtatttaaaagattattgctctaaaattgaatggattaaatcgttcatgctcccacactacttttggttttgagactgaaggatttacagagggatgagaatgaagagatgaagtctccatttctagatttgacctctggaagacaaagctagtgattttgtttagtaattttatttcctttggttcaattaatagtccatgctcctaaatgtgagaggtactgtgttagtaaggactagagtaagtgggagagaaagacaaaaagaactctcaaggaaactttgtcattagtttgaggaaactatttttcctcaaactaggaaaaaggtatttttaaatgttattctggtgatatcttcaaactggattgcagttggaagacttgttgcaaaaagatcaatttttaagcatttgtagagggataagaatgaagggatgagggcaagacctaaggtcatagcagtggggatggactggcaggggttggagcatgtgagatttatttggaagtaaacaggttcagggagtaatagtaataattaatgcttgtgcaggattcactgagtaccagggttgttttaaatgttaatgactaatgtcatccccattttgtgcaagaggaaactgagagaggcatcatttaagcmaattgtcccaggtcacaaaagtaaaacataccatgcctgacatttggggccatttagtcaagctccagagtcattgcagtttaccagtgtaccatcatttatctaaaaaaataactgaagcttccaggattactgagctggaaaatgatgttgccaataatcagagaaacatattttrtttacagagtttaccctttctttagataggtttttggatagccagaaaaatcttgacctttagggagaaatgtaccttatggttagtgataaatctcttgtatatattcacttgttgggcaatagcaacagtaatttattatattattcaattataagttacgatagtaaacatgtcatcttaatctgatttgtcttccttccttagcagaacttaaaaatgaaacaaggatagagtggtaaaaaaaaagattttgtatcttgggtccgtaaaagaacgcattttaaagttagtttaccgatcatgcaaaactaattttgacgagggaaaaacgtaacactcagcatatggagtatctctttttctattaggttaatgtaaaagtaattgcatttttgccattactttgcaaaaactgcaattacttttgcatcaacctaatatactggagaagtagaataatatactgcttaagaccatggtctccaggaccattctgcttcattgattcatgttccaagtaaggcccatttgctgtgtgactttgtgtcaattattgatgctctctgtgcgtcagcctctgtaccttcaaaatgtgttattaatagtactgtgtcttctggatattgtaaagcttaaatgagataaatcacctaaatggctcttggtagcagcgaattttaaataaaagttatgtttattaaaatttatctcaggtaacagttttctatttttcaatttcacctacataattattactcttttaagctttttgctttgaatttttacgcattaaggagacagagcaatgattttcacaagcaaagacccatgtaaccatcccacaggtcaagaaatagaacaattgctgcatctccaatcctactttttctgcctgccagccattacctcctttccatcagtttcccgtggatgacattattcctgatatttgtgggaattacttccttgcttttcattatagttttaactttaaataatgtatccttatatgcaaaatattggtttagcctgatttttaaattaatgtacataatattcatatgacacacattcttcagtgtatggtgtccttttctgaatgtatgtttgtttttaagtttctttaatgtttttgtgtggttcattaattttcattgctatatagtattccattgtatagaaatactacagaatatttattcattgtattgttgatggacatttgtgctctttctaggtttgggccattacccaaatgtaatgctgccataaacattcttttaaatgtgtttttgctaaatatgtacatatatttctcttgaatatatacttagcaatggaatttcttagtcatattgcatgcaatctttcaactttagtagatactaccagacagtattccaaagtaactatactaatttcacttcattcattagtgtgtaagagtttccattgtttcatctttaccaaagattagtataatcatttcttttaattttagccattctggtgagagtttggtttacattttcttgttgattaatatgattatgtcatgtagcttaatagccatgaacatattattgtctataaatttcctgttcatatgtgtatttttctattgtgttgatttttaaaattgttaatattcrcaagttagttacactagattaagagcctcccatcagttaaatatgctgcaaagttctccttttctatgatttggtttttcaatttcttaatgaggtttttttgatgttcctaattttaattttaatcattatatcacctcattatgtttatatctttccacttgccttcatttttgtgagtgatgtgaggtagaagtcaagttctagatatccagttgttatagaatcatactggacaattctctccttcgcccactgttctttaatgtcatatttactataaattaaatttctatatatgtctgggtcttttaggagccaacttctatttaattggattattagtctcttcttaccacttataacactattttaactatggctactttttaaatattcttaatatctattaaaacaagttcttctaccacatgttattcaaaggcatgttgactttgccttctttcatgtaaattttagaattactttgtcaagttaacaagaataattgtttagattttagttagaattgcattcaatctattgttaagtaaatttttaaagagctggtgtaattacaatattaactgatttcatttatgaacataatatayacagcatttcctccttattaactggggacacattccaagatccccagtggatgcctgaaactgcaaatagtactaaaccttatatatagactatggttttttctatatatacatacctctgataaagtttaatttataacttaggcacaggaagaaattaacaacaactaataataaaatagaacaattataacaatatactgtaataaaagttatgtgaatatagtctccttgtctctcaaagtatgttattgtactgtacttaacctgcttcttgtgatgatgtgagataatacaatgcctacatgatgagatgaagtcttgtgaatgattttggtcataactttcatagtttgaggtgcaacagcaaaactaacataaatctcttgttctttcttcacaatttcaaggacagaagaagcattcttaccatagagcttagcaacgtgagcaaacaactttttccctttattattttcttaaaggaaacactttatggcttctctttggcatattcaaattgccaacatcaccagtcttgtaatttgggtccattattaagtaatataacggtgacttgaatacaaacactgtgataactttagcaatcaatctgataaccgatatggctactaagtggctattgggtgggttgtgaatgtagcatgaggatgctggacaaaggaatgattaaagtcctaggaggaatagagcagagccatgggaaatttcatcaagctacacagaacagcacaccatttaaaattataaattgtttatttctggaattttccatttaatatttttggaccacagttgacgatgagtaactggaaccatggaaggcaaaaccataagtaaggggggacttatttattttgatcttttagtttctcttaatcccatgtctggttgtttttttttaatgttgagttcaagctaatttttctttttttctttttttttaaattttattattattatactttaagttttagggtacatgtgcacaatgtgcaggtttgttacatatgtatacatgtgccatgttggtgtgctgcacctattaactcatcatttagcattaggtatatctcctaatgctatccctcccccstccccccacyccacaacagtccccagagtgtgatgttccccttcctgtgtccatgtgttctcattattcaattcccacctatgagtgagaacatgcagtgtttggttttttgtccttgtgatagtttgctgagaattatggtttccagtttcatccatgtccctacaaaggacacgaactcatcattttttatggctgcatagtattccatggtgtatatgtgccacattttcttaatccagtctatcgttgttggacatttgggttggttccaagtctttgctattgtgaatagtgctgcaataaacatacgtgtgcatgtgtctttatagcagcatgatttataatcctttgggtatatacccagtaatgggatggctgggtcaaatggtatttctagttctagatccctgaggaatcgccacactgacttccacaatggctgaactagtttacagtcccaccaacagtgtaaaagtgttcctatttctccacatcctctccagcacctgttgtttcctgactttttaatgatcgccattctaactggtgtgagatggtatctcattgtggttttgatttgcatttctctgatggccagtgatgatgagcgttttttcatgtgttttttggctgcataaatgtcttcttttgagaagtgtctgttcatatccyttgcccagtttttgatggggttgtttgtttttttcttgtaaatttgtttgagttcattgtagattctggatattagccctttgtcagatgagtaggttgygaaaattttctcccattttgtaggttgccttttcactctgatggtagtttcttttgctgtgcagaagggttttttgtttagaggtcttatgtattttggttaatttgtgcctagaagtttaatgcagtttaatattaagattatatatatacacacacacatataattatatacatatgtatcatatacatataattacatacataakaatacatacatattatatacacttttttaacttttattttaggtttaggggtacatgagcaggtttgttatgtaggtaaacttgtgtcatgggggtttgttgtacagattattttgtcactsgaatactaagcctcgtacctaatggttatttttttctgttcctctacctcctgccaccctctatcctaaggtagagttcattgtctgtttttcccttctttgtgtccatgtgttctgatcacttagcctccacttacaaatgagaacatgtggtatttgttttctgttcctgccttggtttgctaaggatgatggcctccagctccatccatgttactgcaaaggatatgatctaatttttttgtgtgtgtggctgtatagttttccatagtgtatatgtgccacattttctttatccattctaccattgatgggcatttaggttgattccatatctttgtcattgtgaatagtgctgcaattaacatatgtgtgcatgtgtctttatggtaggataatttatattcctttatgtatatacccagtaatgggattgctgggttgaatggtaattttgtttttaactctttgaggaatcatgacattgctttccacaatagttgaactaatttacactcccaccagcaagcagtgtgtaagtgttccctttcgccacaaccttgtctgttctgttatttgactttttcataatagccattctgactggtgtaagatggtatctcatggtggttttggtttccatttctctaatgatcagtgatagtgagctttttcatgtgattgtttgccacatttatgaaaagtgttggttcatgtcctccgcccactgtttaatggggttgtttactttttcattgtaatttaagttccttatagatgctggatattagagctttgtcagatgcatagtttgcatatatatttcccattctataggttgtctgcttactctgttgatagtttcttttgctgcacagaagctcttcagttgagttagatcccatttgtcaatttttgcttttgttgcaattgcttttggtgtttttgtcgtgaaacctttaacaggttcttcatccagaatggtattttctaggttgtcttccagagtttttatagttttgggttttacatttaagtctttaatccatcttgagttgatttttctatgtggtataaagaaggagtccagtttcaatcttctgcatatggctagcctgttatccaagcacactcccattgaatagggagtccattcctcattgctttcttttgttgactttgtggaagaccagatggttgtaggtgtgcagccttaattctgggctctctattctattccattggcctatatgtctgcctttgtaccagtaccatgccatttttttattgtagctctgtagtatagtttgaagttggtaacataatgcgtccaactttgttctttttgctgagatatcttgccttggatatttgggctcttttttggttccatatgaattttaaaatatatttttctagttctgccaataatgttatttatagtttgatagggatagcattgaatctataaattgctttgggcagtatggccattttaatgatattgattcctcctatccatgagatccatgaacatggagtgtttttctatttgtttgtgtcatctctgattgctttgagcagtgttttgtgattctcattgtagagatctttcacctccctggttaactatattcctaggtattttgtcacagttgtgaatgggattgctttcctgacttggttctcagcttggctgtcattgccatataggatttttaatgtgatttttgtacattttttgctagtttgtacagattttgctagtaatttttgtamattgactttttatcctgaaactttgctgaggtttatcagtttaaggagctttcaagctgagattgtggggttttctagatacagaaacacatcatctgcaaacaggaatagtttgactccctttctttctgtatgtatatgctttatttctttctcttgatggatctctgtggccaggactttcaatactatgtttaataggagtggtgagagggggcatccttgtcttgtgtggcttttcaagggtaatgcttttgcccatttatgtgatgtttgctgtggttttgtcatagatggctcttactattttgaggtatgttccttcaatatgtagcttgttgagagtttttaacatgaagggatgttgaattttgtcaaacatcttttcagcttctattgcaataaacatgtggttttgacttttacctctgtttttgtaatgaattacatttattgatttgcatatgttgaatcaaccttgcattccagggataaagcctacttgatcatggtggattagctttttgatggcactgctggatttggtttgctggtattttgttgaggattttttaatctatcctcatcaagaattttggcctgaagttttctcttttggttgtgtcactgcaaggttttggtatcaggatgatgctggcctcatagaatgagttggggaggagtccctcttcctcatttttttggaataattgcagtaggaatggtaccagcccttctttgtatgtctggtagactttgtcggtgaatccttctggccctggctaggcttttttttttttggttggtagactatttattactgattcaatttcagaattcattattggtctgttcatggattcagtttcttcctggtttagtcgtgggagggtatatgtgctcaggtatctatccatttcatgttgatttttgagtttgtgtgaatagaggtattcgtagtagtctctgatggttatatatgtgtgtttctgtagggatagtggttattgcctttgtcatttctgattgtgtttatcttctatctttttctctttattagcctagctagtttctatccatctttttaattttctcaaaatgccaactcctggattcattgatcttttgaatggtttttttatgtgtcaatctctttcagttcagcattgattatgtttgtttctggtcttctgctagctttggagttgatttcttcttgcttctctacttcttttatttgtgatggtgggttgttaatttgagatctttctaagtttttgatgtgggcattttgtgcttcaaattttcatcttaacaccgccttatctgtgtcccagagatcctagtacgttgtagctttgttcttattagtttcaaagaccttcttgatttctgtcttaatttcattatttaccccaaatcattctgaagcaggttaatttccatgtaattgtatggttttgagtgattttcttgaattctctttttytgtgtgctgttgtctgagagagtagttgctatgatttcagttcttttgcatttgctgattgttttatgtcctattgtgtggttgattttagtgtatktgccatgtggcaatgagaataatgtatattctgttgtttttggatggagagtcctataggtatctatcaggtccatttggtccttttgagttcaagtcctaaatgtctttgctaactttccgccttgatgatctgtccagtactgtcagtggagtgttgaaatctcccactattattgcatggaagtcgaaatttccttgaaggtcactaagaacttcctttgtgaatctggatgcttctcagttgggtgtatatacgtttagaatagtcaggtcttgtcaacctgaatcctttaccattatgtaatgccctcttttgatctttgttgatttaaagtctgctttgcctaaaattaggattgtaaccctagtgtttttatgttttccatttgcttggtagacatttccccatcccttaattttgagcctgtgagtgtcattgtatgtgtgataggtctcttraagacagcataccactgagtcttgcttctttattcaccttgccactctgtgtcttttacttggagcatttagcttcttatattcaatgttagcattgatatgtgtggatttgaccctgtcgcagtgtttttagctagtttttatgcagatttgtttttatagttactttatagtgccacttgtctgtgtacttaaatgtgtttctgtagcggctggtaacagtctttcctttccatatttagtgcttttttcaggagctcttataagcgagtttggtggtaatgatttcccttagcatttgcctgtctgaaaagcatcttatttctccttcgcttatgaagcttagtttgtttgtatatgaaattcttggtcagaatttatctttttgtaagaatgttgaatatagacccccaatctcttcttgcttgtagtgctgtttctgagaagttggctgttagtctgatgggcttccttttgtgggtgacctgtcctttgtctcttggtgcctttatcattttttatttcagccttggagaatatgatgattatgtgtcttggggatggtcttcctgtgaagtattttgtgggggttctctgcatttcctgaatttgaatgttggcctccttggctagataggggaaattcttatggatgataacctgaatcatgcttcccaagttgcttccattctgcttatctctttcagggatgtcaatgtcatagatttggtctctttatataatcccatatttctctgaggtttggtttgttcctttttattcttttttctttattcttgtctgactgtattatttcagaaagtcagtattcaggctctgaaattctttactcagcttggtctaatctgttgcttttacttgctattgcgttatgaaattcttgtagtgtttttttcagctctataaggtcagcttcatgcttttctatactggctattttgtctatcagattctgtgtcattttattatgattcttagtttccttagattgggtttcagtgttttcatgaatcttgaaaatcttcattcttatccttattctgaattctatttctgtcatttcagccatctgacctcagttaacaactcttcttggagaactagggtggtcatttggagaaaagaagacactcttgctttttttgagctgtcagagttcttgtgctggttctttctcatctttgtgggtctgctgttccttcagtatttgaagttcctatcatttagatgtttttttttcttttatcctatttaatgaccttgggggtttaattgtggtataaggtgtattcagtcaattggattcatttctgcaagattttagggagtcaaggcttagctcaggactcccggactgtgttttctaattctgggtgactcttattgggcactggctttgttttctggcccctcatrgttaggaacctgttgcacaggataggctgaaatgttcctgaactgctggtcacaatacttgtatgcatggtgccagccaaagctctttgtagggcagtggcagtggaatctatcctcatttgcatgtgctagcaacagtggcagcagcagcatggccaagtgcacacttgtcagctgtggcagggtggtagtgggtgctgggtagccagcaggtgtttgcagcagtggtgatggcagtattactcagggagacaggggtcctccactggcaactgtgcatgtgtttatgccagtgttggtgttagcatggtggtgggggtgctggtgggcgcaggactgtgcatgccctctatgcatgttcacactggtggtggtggctgcctargttgtgggcaagctgtctgttttccctgcctagtttcactttggcagcagtgtcagtgcaagtggtgggtgctgctggcagcagggcaggcggctttcatgcctgccaatgctctgaggacaatggcaatgtgacaggtggggtggggggcagcatgcatccatgtcaacagcagtggtatagcagggtgcgtgcacacacatatggtggcagggaaaggaagggaaggtttgtctgtgcacacatgtcctgtctcatgggcaaaacagcccttcagagttcaggttggacagttcccctaaggctaaagtctcctatggaagcaagttgagcccaggggaatgggcagccctgaccatgctccgctacagacactccaacaccaaatcctctgggctctgcattggctggagttctggctctaacacttttctaagttactctttctgccaactgaagtgtccatggtggtagaggggtttcctactgctgggattccagagggctgtgatgagagcagcttgctccttgtgtgttcaactcctactttctgcaggagttcttcggggccaggaataagtcctggtgaacggcagtcccatgcagggtgcccagtcccctctcccttcagtccagcatctgtgtcttccctccatctgttctcaatgccttgcctctgaagatatgctcagaggactccagtctttctgatgttctggtcccttggagggagatgttcctcctagctgtgtctagttggccatcttggggtaggcaagatatatcttaaaaaattattttctctttgttccttgtataaaaatacatgtttaaatatcgcccttgcatatagtagattgtaaactcattaattctagtgtgtttttcagtgcattattttgaattttctatgtaaacatccatgttgtctgtgaagaaagatagtattacttaacactttcaaaatcttatagctttattgtattttctgtgtcttattgacttggctagaatgtccagaacaatgctgaatgaacacaggaagaatgaacattctgctcttgttcacaaatcaaagagaacactgtccatcattttactgttaagaatgatgtccttgaggtcaggagttcgagaccagtctggccaacacagtgaaaccccgtctctactaaaaatacaaaaaactagtcgagtgtggtggtgtgtgcctgtagtcccagctacctgggaggctgaagcaggagaatcatatgagcccaggaggcaaagttacagtgagctgagatcacgccattgcactccagcctgggcaaaagtgcgagtctccgtctcaaaaaaaaaaaaaaaaaaaagatgtttgctgtattattttgagaaaatagcatatatttgattgagagaatctagttttattctgattttgttaggattcttaattatagttaggtttttaatttttatcaaatgcttctgcctgtattgagattttcaaattatctcaaacctattgagattatcaaattatctcttttactttcttatccgatgatttatattgatattattccaccccccaacccccgacaggcttctttgcttagtatggtacctggggcacatgatagttttttcagtgttttttttccaaccctttccgtcttccttgcatgtttgcataggggaggaaacctcttattacattctggacaatcctccagtggtaaattgctgttgcatactaatatactactcctggtgggggacaggagggtgcctggatcctgttctccagtctttatcttagacatggcctgtgcacctgtgccttagatgtatggctcttacacaatacctacccattcctcccatggggcccaagctcctcctggagtctgtgggattcatgagtgggagaggtgtcctgctcttcccccagtgttagcagacctctgttttatgttagcttaagattctgggcacaagaaagttacctgcccattcagcaaggtttgatggatcattctaccccttcctgagaaactatagctcttttccagggtgttgggaatatgaggatttttttcaccctaaaaggctaaattttgctttgtattagagaaaattttggggaattggtaaggattttgtgactttatacctccaaagagttctcactggtctctactctggactgaatctttcctcataaagaagtttatgaatgaacacatgtttatttgtatataggggattcctgggtgtctacactgttctgttggccaattctgatccttaagtatttgttacacttttagctgttttcttcttacctactttcatggtgactacctcattctctcttattctgttaaaagtgaaatagttcatatgtcctgtcactcctcagagtggctgttaccctctgaaattttgttcatctctttgcctggtgacccctgccctctgcatagaggaagcctgatcattatcatcatgggctgaaattatagctcctagatcattaggaatctagtctycttttgtagttcttttcccagtcttagctacataacttcatccacaagagttttccagtagtttgagatgacttctgcagcctagccatcacatttgtgttctatgcagcaagaatgaaaaaaaaatgcaatgacaaatgaggcatgcagccaggtgatttacccctcatcaragagattacctggaaactctttcttatattttctacctacccatcattactcttagttgtaaaggagactgttgcacgtagtgttgtagctgcacacacaactgytttgttggttacctagtaaggatgaagggaaagatagatatttagtaagctcttagtggtcatagtcacaaggagaggataggaattacattgaggtratctgatcttttcttttctttttccttccttccttctgtccttccttcctcccttccttccttcgttccttccttccttccttycttccttttttctttttctttttttttttttataaggtcttgctctgtcacccaagctggagtgcagtggcacaatcatagctcactgcagccttgacctcttgtactcaagcaattcccttcctcggcctcctgagtatccgggatgattggtgtgtggcgttgtgcctggctaatttttaaatttttagtagcaatgaggtctcactatgttgcccaggctggtctcgaactcctggcttcaaacgatcctcctgcctcagcctcccaaactgctgggattacaggtacaagtcactgtgcccagcctaggtaatccgatttttgaggcaggatggagtgagttaaaatgcacaggttctaacatcatacagaactagattctgatctcagttcagcaaatactagctgtgataccttgagcaaggtttttatttggttatacctcctcagctgtaaaagggcatgatataactgtgtttaaatgtttcggtgtggatagaatatgataatatattcaaagggttcattgcataggaaatagtcaagaaatggtatatttagtttacctatcttatattagcataaattcagtttaagagaggacgrtgtctataaatgactaatacagattgatagagtacaaaggcaactaaccttgtttctcttgagtagagctttaccttttagatgggattgagtctcaatttctgttctttgatgtataatttctatactttgaattaaactgaaagattgctcaaagttaaggtctatgatagcagcactttatgtaatgtcaaaccaagaaatagataagaatttaaaggtttctctttaacctttgccattggtaagttatgaaactgaygaaagaaattatacacctctgggcctcagtttattcagctgacaartcacttagttgatgagatgacctctaccacctatttaacagctttaaaacaccgtaattctgtgcattttttttttgcctaacacagattcttttgccaaaagaaatatccttgtctctgtttgtgtctgtgtgtatgtatttattcatattgccatcatctttaaaatatcttgaatataccatatgtgtattaagatgtgtaaagtacactaatattaaatatatggattgatgggtttttacgtagttatatgcctgcattactgctacctatagcggtaatatagaatcaggaacacatagaatatttctaacccccaataacttccctttacatctcttccccatcaataaccttctggtttttattattttttattttgactttatgataatataatttgaaaaaggtatgcattattttgaggggtaattcaaacttaaaaatttttctagaagtattaacaattatgataaaaccaaaaacgtctaaataatgctgaaaagtgcaataaactataacaatgatgttataagtaataaacttaattgcacatccactgraatgaaacagaattgcagtgtgaaaaatctcttaaaattctatccaaatctcccacctgtaagccaaaaaatagagctaccacacaggctggtgagtattctatcagtcatgttgccaggcaaccttagtcagtatgagagacacccaattgagcagccttggagtcaaactaaaaggtatcttggaaacaagggttcaactgatagagagggaggatagaagcagagagagagagaaaaaagaggcagaatgtcaattaggcagttatctgtgttaatcatgaccacagtttttttttttttctagtaaaatgcagctagcttacagcaaaattacttggatttctacttccttctctctgttttctcctgcatgtacacatgtgtgagtgcagaggtttggcaagatgtatcatcattacttttttggagagaaggatgttcaaaagcatttttagcatactcaaaacatgttaactaggagttcattgagattttattaattcaggattatgtttgattcagccatgtttaaaataattaatctgatttttaaattgaaatactgtgtttgaaaaattgggaatacaaagtaaaaatatctgtctaccacttgaactgaaatccttggaaggtaaaagaaatggaaagggagatgctcctaattctctctgggtgaacttcggtagagataacatacaccaatcaaacagggtgagaatttgggatgacaaagtcaagtaagcccttgactctgcaaagcaactcttaatgtggttttctagagcggtatcttccatttcccacagtttcattttcatagccaacctttgctactcccctatgctctaacccaccaccactcttctcccttccttcttaacagatcatgtgcagagaaaatagcatctgtgagacaggaaattttgagattcctactaacttaccagtgtccctaaatccttttattctccccttctattgatgcctcttcctctataaaccaattctttcatcagtgctctggatcctacagctatctgtgcatgttctaagggtgatagttcaaatgaatattttcattttgcatgttcaaccttgtccctttctcctgattccttcctcttggcattaaacatgtaaaaatatctttccccttaaaaccaaaaatgcatttgtgcataaatcttcaccttatttcaagtccattattagctacactgtaactattacctctactcatagctaaatgtctccaagatttttcaatattttgtgtcacattcattcacacctcaacacactgaggctttccttgtctggttgtctgaagctgcttcaagctcaccaaagttagttgtgtgacttatattgcatatagaatatacttctttgctcccttagcacaattttgtactattgatcattcattctatttcagaatattattttttgatgaaatctatattattgtacttctgtctttctcctcccttgatagcattrcccaatctcatttgtgtgcttatctttcttaaaatacatattctacaagattctttatgrcaccctcattttctatcatacttagattctcactgaacaaattttatcaacttccatgtcttcaatttccattgacttgctgactccctcatctttacctcttctgatattcagtccctatactcacctgtcttctaggcagctctgcttgtatatcccatatgaaattcaaaaattattaaaatmtaccagcagatttgtgaataccactattttttctgttataaataattaaaatatatgtgatattgatatatataaacaacaaaatgaaaataataaaattaatgttcttaacaatgatgcagaccccagaaactttaatcttgagcaggcctttgattttatttagaacttctagattataaaccgtgaggcaaggtgtctcaagcacctaatgtgggctagggttgggagcatattatgtactcaaaaattatttgggaaataaataaaataaatagcttaatatttgaatgaatcttaaaggattttctttttccaagttgtgttaacaaattattttgctcatcctaatattgattacaataatagcaatggctaacatgtactgattaattacattgtgccagttcctctgattgtcatttcatatataatctttaccagaattctataagtagatataattcttattgctakgttataaacacgggaacaactggagttaactgggcaaattaacctcttcagtatcttcaaactgaatgtgtataggggttggacttgaatcaacattgtctaataccccattatatataatacagttatattatatatattataatatataacagttatatatattatatatagctaaatataattatatatatttatatatgaatttttagaaaaaataataccttctatattcctggttctttgatacagacattcatattctgatgtttttgctattagtaggcctcttcggattctcagtaggtgcacatgacttaggtgtcatcaattacgattatagtttggattgtcttgaaaaaataacttagaatatgcattcagaggctacagtaatcaaaacaggatggtactggtacaaagaccaacacatagaccaatggaacagaatagacaacccagaaataaggcacctcacctacaaccatctgatcttccacaaagctaacaaaaacaagcaatggggaaaggactctgtattcaataaatggtgctgggataactggctagctatattcagaagattaaaactgggccctttctttatactacataaaaatatcaactcaagatggatgaaagactttaatataagacccaaaactgtaaaaaccctggaagacaacctaggaaataccgtgctggacctagaaactggcaaagattttataacaaagatcccaaaaccactgcaacaaaaataaaaattgacaartgggacctaattaaactaaagaacttctgcaaaccaaaggaaactatcaacagaacaaacagacaatctacagaatatgagaaaatatttgcaagctatgcatcraacaaaggtcaaatatccagaatctttgaggaacttaagtgtataaacaaaaaaacaacccattaaaaagtgggcaaaygacatgaactgacagttttcaaaagaagacatgtatgtgaccaacaagcatgtgaaaacatgctcaacatcactgatcatttgagaaatgcagatcaaaacyaccatgagataccatcttacagcagtcagaatggctattattaaaaagtcaaaaaatagcagatgctggaaggttgtggagaaaagggaacgcttatacattgctgatgagcatgtaaattagttcagccattgtggaaaacagtgtaatgatttcttaaagaacttgaaacagaattagcattcaacccagcaatcccatgtttgagtatatatccaaaagaatataaatcactctaccataaagacacatggacgtgtatattcattgcagcaccattcacaatagcagacatgaaatcaacctaaattcccatcaatggtagactgaataaataaaatatggaacatatacaccatgaaatactatacggacacaaaaaagatcatatccttagcaataacatggatggagctggatactactatagtaagtaaaataacacaggaacaggaaaccaaatactgcattctctcatttgtaagtgggagctaaacaagaacacatggacacaaagaggggaacaacaggcaccaaggcctgcttgagggtggagtcttggaggagggagaggatcagaaaaatacccattgggtactatgtttattcttgggtgatgaaataatctgtacaccagtcccctgtgacaagcaatttacctgtataacaaaactgcacatgcacccctgaacctaacacagaagttataataataataaaaaagaatgcttaagagtttatgtaagagtaagggagatagaatgcaagtagaaattatgaggaaatattggaatggccgagagatacagtgttttctccatagtagaggaagaaaatacagtaaatttggaaaagatggcagaaacaattgacacatggacaaacaactaacaaatatatcctgcagagccaattaaaaactgaaatataaaatccaggtcagatggtttttataattgaaaaaagactatggatggcaaataagatgaataaaaaaaggatattagaaatataataaggataaacataatttaaatacgttaaaatacatctataattttaaaaatatgaggagtggaataaccaggaattaaaatgrcatatagaaaaaaatccatgtatcggttagtgggttttattaatttagattgctgtctttgtacatatctttcccagaaatgtgaagcaaaaaggaaaataaaatgttgattgctattctgctggagtagagctgaatggatgtgggaaatcagagaatttttgtactgattatggttttttgcaggaaggggagtcataccaatattttcttctcagtttgaacacagtttcatttcacagaaattaatagataagatactttgaactggagtacacctactgatttcttctgatgtcagtcagttgttagaatgtatttactatgcttttcaaaatcaaaagaaaatattataatcattcagccacataaacagtggaagattttccttggactaaacagatcttttgatcttgaagctttatacctttcccatttaagctatgaaaatatataatctttacagaaaatgtatggactgtttccttttagaattttatccttgtctcaaaaataaactataattagaaaagctgtctgttagtaactaattgcttctccctgctatcaaaccaattatagagactaattttaagaaaggaaactttatagttgaggcaaacttaggtaggtgataatccttcccccmacccttactctccaccttcccccagtccactatcatgtttcgcacagctaacttctggtggataatatggaaagaaaaattgttttcagaaattgctttaattagcaatgactggcatgaagtgataaatggaaatgaatattttagaaactcagagatatattatttaataattatattaaagtaataaggtcatttgaagtagcatttttatttttattttttattttaatttttaaattttttattttttgaaacagagtctccctctgtcacccaggctggagtgcagcggtgtgatctgggctcactgcaacctccgcctcccgggttcaagcaattctcctgcctcagcctcctgagtagctgggattacaggcgcctgccacagtgcttggctaatttttgtatttttgatagagactgggtttcactatgttcaccaggctggtctcaaactcctgacctcaggtgatcctcccacgtcggcctcccaaagtgctggaattacaggcatgagccactgtgcctggcctgaaatagcatttttagattagacatttaaaaacagaataaaatgtatgtattagttaatagctttattaattcaggttgctgcttttgtacatatctttgccagaaatgtgaagtgaaaaggaaaataaaatgttgattgctgttctgctggattaatagcaaattataatagaaccaattacattcgttatatactactactttattagttatgtacttttttggcttttgaataaaatcatactctaccttgcttacttttaacagggagagtattttcttcatgttgatttgattttggaatctgattttttttgttaaatctcaatcatggttgtttttatttttttttattatactttaagttctagggtacatgtgcacaacatgcaggtttgttacatatgtatacatgtgccatgttggtgtgctgcacccattaacttgtcatttacattaggtatatctcctaatgctatcccttccccctcccccgaccccacaacaggcccccatgtgtgatattccccttcctgtgtccaagtgttctcattgttcaattcctacctatgagtgagaacatgcggtgtttgtttttttgtccttgtgatagtttgctgagaatgatggtttccagcttcatccatgtccctacgaaggacatgaactcatcattttttatggctgcatagtattccatggtgtatatgtgccacattttcttaatccagcctatcattgatggacatttgggttggttccaagtctttgctattgtgaatagtgccacaataaacatacatgtgcatgtgtctttatagcagcatgtcaatcatgattttttaaaatttccaacttttatttttaaattcaggggtacatgtgcaggatgtacaggattgttacataggtaaatgtgttccattgtggtttgctgcacagatcatcccatcacctttgtattaagccgagcatccattagctattcttcctgatgcactccctcttcccacccccaccctcagatagtccctggtgtatcttgtttgcccccatgtgtctatgtgttctcatccttcagcttccacttataaatgagaacatgtgatatttggttttctgttctgcattagtttgctgaggatagtggcttccagctccatccatgttcctgcacaggacatgatctcattcctttttatggctgcataatattccatggtgtatatataccacattttctttatccagtctattgttgatrgacatttagattgattccatgtcgttgctattgtgaatagttctgcaatgaacatgtgcctttatgtatctttataaaagaacagtttatattcctttgggtatatacccagtaatgagattgctggatcaaatggcatttctgcctctaggtctttgaggaattgccatactgccttccacaatggttgaactaatttatactctcaccaacagtatataagcgttcctttttctccacgacctcgtcagcatctgttgtttttttactttttaataatagccattcttattggtgtgagatgatatctcactgtgtttttgatttgcatttctctaatgatccgtgacgttgagctttttttcatgtttgttggccacatgtatgttttcttttgaaaagtgtctgctcatgtcctttgtgcactttttgatgccattgtttttggcttgtaaatttgcttaagttccttatagatgttaggtattaggcctttgtcagatggatagattacaaaaattttgtcccattctgtaggttatctgtttattttgttgataatttctttgctgtgcagaagctctttaatttaattagattccatttgtcaatttttgctttygttgcaattgctttggcatctttgtcatgacatcttggcctgtgcctatgtcctgaatggtattgcctatgttttctcctaggggttttatagttttgggtatgtattcacatatttaatccatcttgagttgatttttgtatrtggtataaggaaggggtccagtttcaattttctgcatatggctagccagttgtcccagcactatttattaaatagggaatgctttccccattgcttgtttttttcaggtttgtcaaagatcagatagttgtaggtgcgcagtcttatttctgggttctgcattctgttccattggtctatgtgtctgttcttgtayctgtaccatgctrttttggttactttagctgtatagtatagtttggcatcaggtagcatgaagcctcgagcttttttttttttttttgcttargattgtcttggctatttgrgctcttttttggttccatatgaattttaaaattcttttttctgattctgtgaggaatgtcaatggtagtttaatgaaaatagcattgaatctgtaaattgctttaggcaggatgaccattttcacgatattgattcttcctatccgtgagcatggaatgtttttccatttgttttgtgtcatctctgatttcttttagcagtgctttgtagttccccttgaagaggtcctttatttcccttgtcagttgtatttctaagtattttattctttttgtggcagttgtgaatggaagttcatttgtgatttggttgtatgcctgttgttggtgtataggaatgctagcgatttttgcacattgattttgtatcctgaaactttgctgaagttgcttatcagattaagaagcttttgggctgagatgatggagttttctagatttaggatcatgttacctgcaaacaaagatagtttgacttcccctcttcccattctaataccctttatttctttctcttgcctgtcaatcatgatttttttcaaattgtggtacactattaataggagacaacgcttttctaaagcagaaatcactamgcatctcagatacctcaagttgcatgtgattttaatttaaataatataaaaaagaataatgttctagggtccaagtatatgttttcaatatattaaaatttatttacatgagatgaatatacaatttattggtgtttttttcttttctgaagatttaattggatttgagggaaatacaggctgcaatggtgggaatagttaaaagtgagtagtcttttccactttaaataatcacttttaaatatggtcctgatggatttaaggttgtatttgtttaaacaaaagccacatatacaactagaaagagatagttcctgaattttggttaagagtccaggtttgaaaagttagccattttcttcaaaagaatgtggagttttaaaataatttcacatttgaggcaaattcttatctttccagagactgtaatactagagactagtaaaagttagaattttggaaacagattacttaaatcaggcttcgttttaatggggaattctgtcttccttttctttctcatttattctgttttgtgaataacccttgacagtcctttgggtctgttggtctatatttgcacggttttcatgactgtatgcgtgccatgtactcaygtacacatcggcacaaatatcagatgagtcagaaatttagtccgtatcactattattggtgattttcttattactttaaaataaaacatatatcttcctcattattcagataataaatactatttctagttactatataaaatcacaaaacgcattagagaagcacaatgaaaattcccacatttacacgtttttccaatgcttgtatatgaataagttaaaaaacagttgcaatcatagtgcattcataagtagacattgcaatttttaaaaatagtgtcataatatctcttaacttaaagtcttttctcaatatggggtatttaaaacagtgttcagtggagaaattactagttcaaagtatatgataatttttaagaaaatgggtcaaaaatcttatttttaataaacgctatttctttccaaaaatgtttttaccaatttatgtttctatctgcaaagaaagaaaggacccgtttatcccatctttgctaaaatataattttgttacaaatagtatttaattttgatttatagtcctttaatatgcacaattattaattaaattaattagaagttttgcagaatgataggggaaatgtcrctttgtttacaggttggcttttcatgtgcttgtacacataatggtaatctctgcttacctgttatatctcgcattatatttttccttttctcctatatttatggcagattttcttgttttttaacatctgtgttttctattaatggattatacactccattatattagttgctttatattgattgacaaattatcatctttagcaatattatatgacaagttttctttgctaataagaatatgaattttaagtccatgaggacttgaaacttttactttactgttaattaattggagagtattcaatatttggaatatttagttctttatgtaattatttacttctttcctctaattgcctgtcttttaaggcacttaacttatgattaacaactttaccaggaagtttgcaggaaaaaaaccgaagctccaagtcaaattattaaatatgtttatataagctttaatgagttgttttgttttttcccctgtggaagaagactatttcacctattaatactttattaactagtttaagaaaagagtgcatttattccatggataagatgttgttaaaaatcaatcattaaaatatgggagcagacaaataaaactttgtttacatttgtgcaagtttagtatacctctagagtaccctgtaaaagccccttcttcatctcccctttatgctactgggggttcttttgtgtctagggttctgtgcttttgtttgactttatttcactttctatcccccattaattgtcaaccagactagtcagagtgactctgatacaattttacaagataatatattattcctcattatttttctacaaataaatgcccctgttttgaaatggaagcctagataagaaataaccacattattctacacatttcaaagaaagaacacttgtaatatatttcttacatattttgtcatgaagaattcagaagccttaaggccaactaggaagctgcagtttagattttctaatggttggatgtctcagtggaaacatttattttctttttaatcaggagatttatggcagaagatggccagctagctgatagatgtctactgggaactgtctaaatgctctagtgttgttttaaatctctagttttatatctacttgaacattctgaatttctcccttcccctcttgatgactattaatgaacaagcttgaatcattggtttgccgtgttataagatgaacactgagcagtcattaaatgctatatcaaatgaactatgataaatttttaggttgatgaataggatttttaaaatcactaaatttcattatgtttttgaggcccatatattcctttttaaaagctttctttatgaggacttcttaatttcattatattttaataataatctattccttttaaagtcccaatatcatatattttaggttttgacaaccatagcatcttcatagaatgaatatccctaaattcaagcatggctgaagagagctatgggtaacaaattgccttgacacaggacatctgccttataaaatgttactgctttctaaacattctctgtaaatttatctccacccttatttcactcactctatggccaagtattgtttgtcacttcattctctcaacatttgtagttatgtataaaaactatctgttaggagttttacatattggaattactccatatgtttcatacatcattttcttatccctaatccactgcttttgtatatctcccctcctggatcctaagacaaaaggcaggaattgtgtcttgttgtctgttttgttttcttctcatatttctttttatttaattcaagagaaaagttgaaaatacctcacagtacctgcctatcagacaatgtgaggtcgagtgggccacagcactggcatcaccccaggttgttagacatgtgctatccccggccttatcccagccctactgtacagaaatctgcattttattttatttttctttccaacatttattttaggtttacgggggcaggtggaggttygttacatgggtaaattacatgttgtggaggtttggtgtgcagattatttcgtcacccaggtaatgagaatagtacacaaaaggtagtttttcagtacttaacttcctcataccctccaccttcaagtaggccattgtgtctgttttttcttctttatgtctatgtgtactcaatgtttagcttacacttataagtgacaacatgctgtatttggtttttctgttcctgtgttaattcttttaggacaatggcctccagctccatccatgttgctgcaaaagacacggtttcattctttttatggctgtatagtattccatggtgtgtatttagcacattttctttatttagtctaccagtgatgggcatctaggttgattccatgtcattgctattgtgagtagtgctgcaatgaacatacacatatatatgtcttaataataaaatgatttatattcctttgggtatatacctactgatgaaatggctatgtcaaatggtagttcggttttaagctccttgagaaatcttcaaaacgttttccccattggcagaactaatttacagtcttattagcagtgtataaacattcccttttctccacaattttgccagcctctgttatttttgaattgttaatagccattctgactggtgtaaggtggtatctcattgtggttttgatttgcatttctctaattattagtgacgtttatcgtttttccttatgtttgttggtcacatgcatgccttcttttgagaagtgtctgttcatgtcttttgtccactttttaatggggtttgttttttgcttgtttatttaagttccttatagattctgaatattagacctctgatggatgcatagtttgcasatacgttcttcctttctgaggtgagggttgtctgtttgttgtctgcttggcagaggctctttaatttaattaagtcccacttgggaatttttgtttttgttgcaattgcttttgrcatcttcatcatgaaatctttgctgggacctatgtccagagtggtatttcctaggttatctcctagagtttttatrgttttaggttttgcatttaagtctatagtccatcttgagttgacttttacatatggtgaaaggaatttcaattttctgcctatgactagccagttatctcagcatcatttattgaataggaagtccgttcctcattgctagttttttttactttgttgaagatcagatggctgtaagtgtatggctttattcctgggttctttcttctgttccactggtctatgtctgtttttgtaccagtaagtaccatgctgtgttggttactgtagtcttgtggtatagtttgaagtcaggtagtgtgattcctctggctttgtttttcttgcttagtattgctttggctatctgggctcttatttggtgccatatgaactttagaatagtttttttctaattctgtgatgaatgtccttggtagtttgataggaatggtattgaatctgtaaatggctttgggcagtatagccattttatcagtattgattcttccttctcatgagcatagactgtttaaccatctatgttatctctgatttctttcagcaatgttttgtaattctcaatgtagagatatttcattgtcctgggtagctgtattgctgtattcctaagtgtgtgtgtgtgtgtgtgtgtgtgtgtgtgtgtgtgtctrttgtgaatgggattgcctctttgatttagatctcagctctgacattattggtgcataaaaatgctactgatttttgtacattgattttgtatgctgaagctttgctgaaattgttcatctgatctagtagccttttagcagagactgtagggttttctagtataaaatcctattgtccacaaacagagatagttttatttactctctttctatttggatagcttttatttctctctctcgcttgattactctcactatgactcccagtatgttgctgaataggagtagtgagagtgggcttccttgtctttttctagatcttaaggagaacgtttccagcttttgcctattcagtatggtgtttgtcattggctgcggttttgtcataggtggctcttattttaagatatactcatttcatgcctagtttgttgaaggtttttaacatgatgccatgttgaattttattgaaaactttttctgtgtctatcaagatgatcatgtggtttttatttttagttctgtttatgtgctgaagcacatttattgattcacgtatgttgaaccaaccttgcatcctagggataaagcctacttgatcatggtggattagcttttcaatgtgctgctggattcagtttgctagtatgttgcttttacctctatgaggatttttacatctatggtcatcagggatattggcctgatattttctcttttcwttgtgtttgtttttaggttttggtatgataatgatactggcctcacagaataagtgagggaggatttcttcctcctcaatttttgggaagagattcagtaagattggcaccagttctttatatgtctggtagaatttggctgttaatccctcwcatccagggctttatttggttggtgggttttttattacttattcagttttggaactcacccgggaatttatccatttcttctgttttctagtctgtgttaatagaggtgtttataatagtctgaggttttttgtatttctgtggagtcagtgataatgtctcctttgtcacttatgattgtgtttaattttctccccctttttattattctaactagtggtttattaatcttatttattttttcaaagaaccaacttttggcttcattgatctcttctatggtttttcatatctaaatttaatttagtttagctctgtttctggttatttcttttcttctgcttgctttgagatcaatttgcccttgttttactcgttcctttaggagtgatgttatgttgttaatttgagatcttttaaactttttcatgtgtgctatagactttcttcttaatactgctttagctatgtcccagagattctggcatgttacttctttgtttttcttagtttcaaagaatttmttgatttctaccttaatttcattgtttgcccaaaagtcattcaggagcaggttaatttccatgtaattgtatgtttttgayagatcttctttttcttttttttctttttttctgtctttcttttttttttttttttttgagatggagtctcgctcttgttgcccagcctcgaatgcaatggtgcaatcttggctcgctgtaacctccgcctcctgggttcaagcgattctcctgccttagccttcccagtagctgggattacaggggcctgccaccacgcctggctaatttttgtatttttagtagagatggggtttcactatattggtcaggctggtctcaaactcctgacctcaggtggtcctcctgcgttgccttcccaaaatgctgggattacaggcatgagccactgtgcctggcccgacagatcttcttagttttgatttctatttttattgctctgtgttttgagagtatggttggtatgatttcagcttttttaaaaatttgtttataattgctttatgggtgaacatgtgattgattttagagtatttgccatgtacagatgaaaattatacatcttctgtttttaagggatgaagagttctgtatatgtctgttaggtacatttggtcaaatgttgagttcaggtcctgaatttctttgttagttttctgcctcaatgatctgtctaatactgttggttgggtgttgaagtcccccattactattgtgtggttatctaagtctctttgtaggttcctaaaaagagaatttctgtgccccagtgttggttgcaaatataatattcttcttttgtcttttttgatctttgttgctttaaagtctgttttgtctgaaattagaatagcaactcaatatttttttggctttctatttgcttggtagattattgtccatacctttactttgagcctatgggtatcattgcatgtgagatggttctcctgaagtcagcatatgcttgagtctttcttctttatccaaatcttcactttgtgccttttaagtggggtgtttatcctgttaagtggggatgtttagcctctttatgtttaaggttaatactgatatgtgtagatttgatcctgtcatcatgttgttagagtagcttgttatgtaaacttgatcatgtaggtgttttatagcgtcagtgggctatttatttaagtytgtttgtttgtttgtttttttggtggccagtaatggtctttcattttcatgtttagcactcccttaaagacctcttgtaaagtgggtctgtgataacaaattccattagcttgtctgaaaaggattttatttctccttctcttacgaagcttcatttggctggataggaaattcttagttggactttcttttctttaagaatactgaatataggccccacagtctcttttggcttataaggtttctactgaaaagtccattattaaccagatggggttccatttgtaggtcacctgcctctcctctctaggggcctttaacatttttctttcatgttgaccttggagaatctgatgactgcatgtcttggggatggtcatcttttacagtatctcagaggatttttctgaatgtatctttaatgccttagcacagtgttggcatttatgtgggcactaaattatatctgttggataaatgaaaggaatattttagctttataattaaggtggtaattttattcttaaagtaatacatgattgtagcaaaaattcaagcttgcagaagactgtaaattctgttgttcggagattaccaagtttagtgagtgtatctgtaaattttctgggaatgtgaaaatttacacagacagacacacatacatatttcctgcttttttgtgtgtgtgatgatctcaggtctgtgaaggttctggaatttgattttacctcacataaaagctaaaagttagcttgttattatgtcatggatttgggcagaatggacttctgtattagagcaaaggacattttttactcatggcacaggaagtacatgarccatcaaatgtcacgtgtcaatgcagtttgtcacatattggtcttttaacacatgcttgcatatacggatatccattctatgaagatgctatgactataaaagtacaatatatgtttgtgtgtgttccacttgcttcctgtgtcctattgagggtatgtggatagccccagtggattcctacttacatggtgggttgcattacagaaaaagaccaataaccttagataagctactattttataataaacatttttcaatattccttactgcaaacacagttatgaaaagtggcctggctgtttggggccttgcattcttggcatccccagcaagaagtattaggagtttatgagagtggaggagtgtctctcaatgatatccacttttgatctttgatcatgttggcttctggtgaaatttcatgtgattatggcactccattgaacaccctaaataatatgacagtggctggggtcagatgtatttagtttttctcatacagcatttatataaggctattatgagcagaacttctaacaacaggattaggccaacttggagttttgactttactcatgtttccctgtggtccgggactcagtcactgtaaataagtctaagaggatatcaataggttttattctataaagccaaactgtggtagtctaagaacagtgtattatccagcacaactgacacaagggagtttacatagaactgcttatctttggttatcattgcaatagatgatttaatagaatctgaatttccatggagagatagtccatggctcactcagcccatatrcaaacatatagcccaaagggacataaatctgtccaatcaggattttttatttaactttatttggatcatcattacattggtctgattaagcatgtgtcatgtcactgaagagttgtagcctggattgtttacatggcataagccaaagtgctcagatatcaggagaagcaagtgaatttctatcagccagatagaaacaatgttatgcaagttcctgtgtttgtttaggtgggaggaagggtatctttttgggagcagccatttatggcatcaggcacagcagagcagttcaggactggccatgcccacatgagtttttctgtttcatagcacttggaagagatgacaaatggaacagcaggctggattgtcagccacagatgctacttcactcaggcaggccatatgattattttgccaggctctgattctggatctaggtgacaaacagagcattaattaacccatcctcttccccacaactcttggtgtacaagccatttcttccccagatgtcagttattgctttctccacagccatgaaattttgtgtgccctatttcagtataactttgctttacttctctccagtcctctattaatctaacccagagctttgatatgaaagtattaaatgcaagtggaacagagacatttttacaaaatatacagagactcattatacctcccatgtttgcccacataggccattgtagagggattcagttagcagtagagttagctgtctgtgtctgcagtttctgcattcgcagattcaagtaaccttggattgaaaatatttgtgaaagaacacaataaaaatagaaatacaacaataaaatcacagataaaaacaatttagcattaacaactatttgcataacactcacattgtattaggtgttatgaataatctagaaatgacttaaggactacaggaatatgtgcataggttatatacaaatactatgccattttatataatggacttgagctttgagtttggaaaatctaataccttgactatcattttattattaggtggcctttgcaacaaatggcacaacattgccagactgtagatggtctggaaaccagcaaatatgacccagtttagtttcatgggccacagtggtatggctggaggtgactgattggcctgaaacagcagccctgtagcctgaaaccaggtaggatggtgatgtaggcacctttatcacagagagccataaatattcttattcccgccatcccttcttagcgatgaaccatacttgtgtttcaggccaaggataggatttacaatttattttaaatgtgatagaagctgttgatcaataatgagcagaacagggaagatatctaattaaattwaattttttttttttttgagacagtctcactctgtcvcccaggctggagtgcagtggcatgatcttggctcactgccatctccacctcccgggttcaagtgattytyctgcctcagcctcctgagtagctgggactacaggcgtgtgccaccatgcccggctagttttttgtatttgtagagacggggtttcactgtgttagccaggatggtctcaatctcctgaccttgtgttccgcccaccttggcctcccaaagtgctgggattacaggcktgagcaaccgtgcctggccattaaatttaaattttaacaggaaccacctgccttttgtgagaagactagattataatgggggtgcatttaagatgctaagacatagcatatgatcaagcaattctacacctaggtatatacccacgaacaatgaaaacatatgtctacagaaaatttgtacctaaatgttaacagcttaaatttttcataatagtcaaaaggtagaaacaacacaaatgtgcatcaagtgatgaatggataaataaaatgtgtatagctatacaatggaatattatttggcaataaaaagaaatgaagtacttgtatatgctacaatgtgaatgaacattgaaaacattgtgctaaatgagagaagacagtcatgaaggcaacatattgtatgattcaatttgtatgaaacattcaaaataggaaaattcatagccaataaatcagattagtagttacttatgtctatggatgatggtaggattgagggttctagcaaaggggagtggtttactttttgaggaaaggaaatgccctaaaattgattgtggtgatagacacacaatgtgtgactatattgcattgtatactttaaatgagtgaattatcagatatatgaattatatctcaataaaacttttttaaaacaatctaaggcagcatttcaaaatcctggtggctgcttggtctatagttgtagtggtggaattggtgaaaagtggcacagaatttgctgcacaatcaaatatggaatgtgaaagaaacaagttgctagaaaggagtacacggtttatggccaacctataccaaatgctgctgagtatttatgtaagatgatgattaagaattgatcattggatttgaccgtgaccttatcacatgaggtttccacgtagtggcaggacctaaagcctgtgaagtttaagagagaatgggaagatagggatgtatagacatatgtaattattgtcaaaagttttacattaagggtgagtagatggatgtagggatacctgaagagaggtgtatggtgaaattactttattcaaagattattattaatataacatctttgcatattggtaataatgacttgttagagaagataaactaatgcagaagagaaaagtgcattagtcaaatccttgaatatgtgagggtagagggtattgcattctttaaagggacagttcaccagggtaacagttggacttgtagaatttggtatggtagtaatggaaacaagcaagcaatacatttaacatggcagtatgcaaaattctcttctgattgtttatatgttctctgttaaatgtagatgcatagtgatcagccatgagaaaaagaaagtgtggagatgacagtatgaggaagtcaaataagctgcaaaattgttgtctgaaagatggagattgatttggactccactgcagtgtgggctcatagatttaaaatgagaagtggtggaataatttgggagtttcatgacagccatgttcacctgtttgcatgtagaagtggagtataggaaagtgaatttaactagccagtgttttagtttgctggggctgccctaatgaataccacagactgggtgccttaaacaacagaaatatattttctctcacatttctggaggctagaagtccaaaatcaagatgtcagcagtgttgattttattctgagtcctctttttgtggttggtaaatggacgccttctctctgtgtcttcacatggttttcctgtgtcctaatctccttgaagggtaccagtcatattagattagggtccacccatcacacttcattttgtctaattacctttttaaatcccctatttccaaatatggttccattctaagatactaggggttaggacttgcacccatggatttttggaatgtggcaggcaagggcaattcagcccataacaacaaatgctggagttttaaaatttaaatatattggagtgagagagggcgtatgtaagagaagcgtaatcctgttctcatatagcttaccatttaagaaagggggacaaataagaaacaaaaaaaaccccacaatttttcaataaattgggggtgataattgctaagaaggaaaattaagtggggtgagaagacagtgagtaaggtgtgtgtgctgttttatataggctgataggaaagctcgtggtgatgtgacatttgagcaggaaggaaggaagatctgaaggaaacaagagcagggagccatgaacctatgactgggcagagaaagcacaatcgcacatgccctgaggcaagctagtaattcrtatatttaaggaacagccaggagacctaagtcactgatgtgaacatggtaggaaatgagatcagaaaggcatgaagtagaagctctcttatctggtgaacttgtgactacaatttatttaatcaaaagttgatgatrtcagggaatcatatgatacctatttacctttaaaagggaggtacaatttacattgagtgaaatgcactgatcttaagtgcayagttcaatgagttttcactattgtaaaaccttgtgtgactcataccacattagaaactacatctaaaatagttctgctttgtggtacttttgttatccaatcccctgaacacctatacactgagcatgcaatgtttctgcaagggtgggtagggagaatcctcattgttttttcttgctcttagaatgatgtttctgatgataacaatatgtgttactactagtaataataactaatctatattgagttcttatgtgccaggcactgttataagaggttacgtgttacatccctgtactcatcctagccttacaaggtaactactattcgcattttgtgagtaggaaaaccaaggcattaaacatttaaggaacttgaatcaagttgcacaattagtgagtgttgaaacccagactcaaatcatgacaatgtaactctgaaacgttttcttttacaggctatgttaggttccctcctgagaattgaattttagcgtatcatcaatattctccctttccttagtgtatatgcaaatgagggcattttttgttgttgtttttttcagttttgtttattgcttctcttctaccatctttcagtaaaaggcatttatttagcattatatttgttggcttctttgtctcttagtttaacctttagtgtgatgtggttattacagtggacactttggtttaggctgtgagtggatttcctgggtttaacttaagtttttgtctttttttttttttttttgacagagtcttgctctgttgcccaggctggggtgcaatggtacaatctcagctcactgcaacctcygccccccaggttcaagtgattttcctgcctctgcctcctgagtagttgggattacaggagtccgccaccacgcccagctaattttacatttttaatagagaccgggttttgccatgttgaccaggctggtttcgaactccttacttcaggtgatctacctgcctcagcctcccaaattgctgggattacaggtgtgagccaccgtgcccggccaatttcttatctttattcatacaaagatctgttttcctatcagtyagacctgaagctaatttatggtattttttcagggcttactcactacgtttatcagcccataaaccaaactgcaaaattatttggtcattagttcacagaagctcctgcctaactatttaaaacatttaaagtatgctgagtgcctgaaacttctggaagcattaccagcagccttacactagtttccaggatcccttggcagcctcaaggatagcctcagaaaatagactgaaaacatttgctcccattacacaattttctacaaaagaaagtttatgactatagataaaaatatgtctaatagcaagtaaaatagattccctaagtaataacttcctaattaaaaaagaacaacaaataaaaaaccaaagcaaaaacaaaagcttttttcttcttaatttaacaacatagttacmaaaccctaaactttatctagattttatttcttatatttaacatcaaaattttttttgagatggagtttctctcttgttgcccatgctggagtacagtggcactatctccgttccattacaggcacacgccaccttgcctggctaatttttgtatttttagtagttacaaggtttcagtatgttggccaggctggtcttgaacttctgacctcagatgatccgcccgcctcagcctcccagagttctgggattacaggcatgagccactgtgcctagccttaaaatcaatttttaataaagataggaaatatggtacacattttcaagtaaaaatcctataacatagacaatcttgctgataccattacttaatgtttttgaaacaattaggaaaagggtaatagtattggatagaaaagtctgtagttcatgcaagttgctcatgcaytacactggtttggcaagccagggatattgaagaacttggattttytgactgagaaacagaacagtatttgcaaataagtaggggtttcctggaatagaaacataatacagatgctgattctcttaaataaacctgggccaccaactgtgcttacgttggttagtattctgtgtttaaagtaccatttttctgctcagttttcttcttttaagaggaatattgaaatacaatatataagattattattttataagtgccaggggattagatttctgtgaatgataaagtttagcctgttttcaaggtgtaggtgttttcaaaatataggtaaatttccaaattaaaaaatacaagcagagtctgtttcataattacataagaagtttaaacagcaacttagtttttcacatgatatagttagaattctttcagtgctaatgtcttaatatatagcactagcaggctatgaaattaggataatttgaatactgcttgaagtggcaataatatgtaattttgactttttatcataaataaagtttaagttaaattctcaataacctcaactgttaggcttttattaggaaatgacttatcttagacatttcaatatttaattaatactgagtgatttcagattttctattataataatattcttcatcttttcttgaacgatttttwaaattctttatcttgattaagcctcacaatattttgtgagattgatggggcaggaaatatgttataaacaaatgaagcactgagaagcaagatacctacctaaggtcatccctttatttgatgacagagccagggatggtgctgtttacatcttccaggatcatttatgtatatggcactccttataaacttgggaatggccgtgtagtgaccgtcaatgttataggtacttctccatggaattattttctacaataaagtgaaaggatctaccctatcttaagactgaagacagaacatttgatagcttgaattgtttcatatctcaaatttagaaaagaatgtacacggtaacaggaaataaatatgggataatcattcctttattatcaggtttagaggctgatttccaatatttagctatcatttttatagaaaattaaagtggaaatgaaacaaagtagataataacatgttacttttttctaagaaaaaaaaccccaaatgtcatgtattctttggatttacatatatctctccattatatatatatatacacattctgaataaatgtaaatgtaatttttttgtaattactaaaataaaatctgttacaataattattttgtaactggcgctttatgtgaattttgaatttgttgctagtttaggttggttataacaggcaacagaatttctgttgctttatggtgctgtcagctgctgttaatttaaagagcttgtgctcatcaaattatactttgatgtttttgagacaaacgtttatgaaatatttcaagtgtctttgtatttaatactgtkcaccccaattagctctgtcaaaacttcatcacttatcttattcacatcaataagcttacattttactcratattatttaaaatgtaacaaatgatatcagaatatgttttgtctgatttacttactttatagataaaagttggttaaccaggtagttaaacaaatgtagtagtataaataaaatgctcaatgtagtataaataaaacaaataagtgtraggtattcattctacacttaccttgaaaaatgtctcttaataattatgtacatatctttgttatagcctttaaattcttgctctgattattttaaatcatttatgttaatatatttttcccctgataaattggatgcgtgctatctattctaaacacacatttattgtagatactttctctgcagatcagctgggattttagaggctgtgtaattattgatcgtgtcttgcaattgctctacttaagaatatgagaacaattttttctgttttatgtatttattttattttatttttaygtatgtatgtattttttttttttgagacagagttttgctcttgtcacccagactggagtgcaattgtgtgatctcagcttactgcaacctccacctaccaggttcaagtgattctcctgcctcagcctcctgagtagctgggaytacaggcaygtrccaccatgcctggctaatttttgtatttttagtagagacgtggttttaccatgttggccagactggtctcaaactcctgacctcaggtgatccgcctgcctcgatctctcaaagtgttgggattacaggcgtgagccgccgtgcccagctctgttttatgttttattaattatctgttctgcaagatgctttataaatatgattctacataatcctcataacaaatgaggtttagctttggcatttctatccacattatacagatgagaaaactgtggcttagaaagtcttctattcttaggaggtgtacagacccagacgtgtctgtctatgaaggccagattttagccactataatatattgtatcccaggatratttctatttcagaattattggctagtcagaagtactgaattagagtaaagtcagaattgcactatttgacaacctggagctataaagaatatcatgatatgactttaagttcattacaatacaacttaaaggaatcaagtagtttgtcaagggcctggcagagtagtggcagatctagtattaggtattaaaatgttagccaactagcttgctagcaactttcatttatttaggcttttaattttggattcgaaggcttgagtactgatatatttgagaacattaaataagtcatacatttcatgttatatgttctttatccaaaaatctatgtgtacarttaatgaaattttcttctttgttttaatgcagtggaatgtatcctgctttcatcttggagttcacctgtgtggcttggatttatcacagtagcatttgtcttcaatctgtgtgttaactagaaaycaaggaaagacatgaggagatttgtctactgcaaggtggttctagccacttcgctgatgtgggttcttgttgatgtcttcttactgctgtacttcagtgaatgtaacaaatgtgatgacaagaaggagagatctctgctgcctgcattgaggggtaagtgcttatgaagcaaatactgtctttatagagatgagaaragtggtgccttgacaaaatgagaaacttcagaatcagaagagttttgccttagtgagttagaagagcattttggcagcactattaatgcatgtttaaccatggggaagttactttacctttcttggtcttaggcgtcttcttggaagaaataagaagagttagctaacctctaagataccgttcaacctaataaattctggtgttctgtgactgtatgaaaagaacagttgagtgaacgttcaaactgggcagaattttaaatctaggctgctagaagccaaaagcctttaaagaccaagcacataacataaaacggaaaaaccactaaagtgagacaggtggcgattttagcaaacgaactgtgcatgaatgacaccgctaaagacttccaaaacagttgaaataaaacaaccaatttttaaaacaaaacacatggcggtatgcagatttaccagattgctggctgtatgttaagtgaaaaagataatttcaagtatactktaaaattactttatttcagtattttcctcttgagggaccagtttcaaagactaaatatgaatgtaaacataataatttgtatgaatggttatttatcaagtaaagccatagagatttgttttctgtgaagttattccagttttctctatgctttcttttttgttaacttcaagatctataaatatatttctaatgtattcctagaaaattcaatacttctaaaatatgtaagagtactcaaaattagttttattctcattgaactaacatattctctgtttggcaaaagttttctgcataaatatgacaaaaagcaagcttcaattgaagtatcatgacatgtttgtaccttttggaaaagtgaatctaaattatcaagttgagatttacatttatttaatgaatatgatctgcttttaatgttatacatatttttgagatatttattgaacaaaatatttaataaacagaatctcattaacactatcaggttacatgaaatttagggaaacagaagagcatttccaaaatttaatttttgttcaaagagtactttagacatgttgagtttgctttagattgcaaatcaaagattactttagacatgttgagtttgctttagattacagaaatactcttgttcatttagagaarttctgaatcttctgaatcgcttccttgtcttttaaaatggaacttgcattttagattttgactaatacaaataatttaaaaaaatttgcaagtgactgatgctagacccatttaggtagtttacatgcattttttatgcctttatacttcagttattctgagaggggaacattataagtccatgtttttgacaaatgaacatggggaatgatttgctgatctttagttaaaaccccagaattaatcagccttctgagcttctttgtcagaatcagttgagttgctgcttggctgaatgtagaaaagtgtttttgatggattacatcagtttggaatgatcactctgtcatttgttgaaggaaaccatctaggttggtcacatacaaaaaatgtaataatctgattcagcaaaactttgatagccttttctgccagtaacacaaaggtacagttttgctgatttatgtccttaatgctccttaagtcttaaatctcaaaatgtgaaatttaacaatgcaaggcaaaaataacttttccttgtacttaaattgtaaaattaaactattgttctctttgttgataagacttgytattttacttcattcaggttgttaaaaaaatatagacttggtggctaacaaggaacagacatttatttcttacaattttggaggctggggattccaagatgaaggtgctagcagatgcaacgtctgataaggggctgttccttgtaaacagctgtcttctcactaacctcactaggcagaatagttgagaaatctctctggggcatattttataagggcactaattgcattcatgaaggttccaccttcatgacttaatcaccccccaaaggccctatctcctaatatcactttgaaggttaggatttcagtatatgaattttgcagagacacaaacattcagtacattgtactactttaaagttttatattaatactatttgtctggaataaatggaaaatagacttgagggttttaatttcattttcagttgtcacttgttatttcagaatttttactttaggagtttgcaccttgttttcaaaatattttatttgtaagcagatgatgctgtgcaaagtgtacctaactgaaattttcacattttaggtctgctaaaaacaggcttttttacttaaaaaaagatccttctggacctgtgcatctccattattaaagcaaaggttttggagtaggcagtttctaagttcccttatatgtctaaattttaaacaattcctaaggacccaatattaacatacactgttaatgaatttttgacatattttcattcattcactcattcattatttattaagttcttactctatgcaaatcctggggatataactgaggtccctgatgtttgggacataagggaacaaggctcccacctgccatggagcttaaagtcaaatatatagtaaacatttttgtctttctgtatgtatttatgtgactgtgtgtgtgtgtgcgtgtaatcatgtgccatataatgattttttgctcaacaactgactgcatatatgatggtgatcccataatattttaaagtaatgatcactgatgttgagttttttttttttcatatgattgttggctgcacatatgccttcttttgaggagtgtctgttcatgtcttttgcccactttttggtggtttttttttcttgwaaatttgttttaagtcccttatagatgcaggatattaracctttgtcagatgcatagattgcaaaaattttctcccattctgtaggttgtctgtttactctgttgttagtttcttttgctgtgcaraagcttttttgtttaattagatcccatttgtcaatttttgcttttgttgaaattgcttttggtgtcttcatcatgaaatctttttctgtgcccatgtcctggatggtattgcctaggttgtcttccagggttattatagttttgggttttacattcaagtctttaatccatcttgagttaattttccatatagtataaggaaggggtccagtttcaattttctgcatatgcctagccagttctcctagcaccatttattgaatagggaatcctttccccattgcttattttggtcaggtttgtcaaagatcagatagttgtaggtgtgtgaacttatttctgggttctgtattctgttccattggtctatatgtctgtttttgtaccagtgccatgctgttttggttactgtagccctgtagtatagtttggtgtcaagtagaawgatgcctctagctttgttctttttgcttaggattgctttgacttttgggctttttttggtttcatatgaattttaaaatagtcttttctatttctgtgaagaatgttaatggcaatttaatgggactaaaaaaaaaaagctcaacatgactgattattagctaattgcaaatcaaagccgcaatgagattccatctcacgccaatcagaatggctattactaaaaagtcaaaaaatarcatatgctggcaaggttgtggagaaaaaggaacacttctttcctgttggtgggagtgtaaattagttcaactattgtggaagacaatgtggtgattgattcatcagagacctaaagacagaaatactattcaacccagcaatcccattattgtatataccctaaggaacataaattgttctattataaagagacatccatgcatatgttcattgmaacactattcacattagcaaagacatggagtcaacctaaatgcccatcaatcataggctggataaagaaaatatggtacatatacactatggaatactatgcgccataaaaaagaatgagatcatgtcctttgcagggacgtggatggagctggaggcagttagccttagcaaactaatgcaggaacagaaaaccaaatagctcatgttctcacttataagtgggagctaaacagtgaggacacatggacacgtagacaggaacaaaacactctaaggtggagggcaggagaagagagaagatcaggaaaaataattaatgagtactaggcctaatacctcggtgatgaataagtgtgtacaacaaacccaagtgacacatgtttactgatggaacaaacctgcacatgtgcccctgaacttaaaataaaagttaaacaaattataacattttactgtaccttttctatgtttggatctgtttagatacacaaatacaattgtgttataatttcctatagtattgagcatagtaacatgttatacaagtttgtagcctaggagcaataggctataccatacagcctaagtgtgcagtaggctatactatttagtcttgtgtaagtacattctatgatgtttgcacaatgatgacatcgcctagtgatgcacttctcagaacacttccccatccttatgcaacgaatgactgaatatatattcaactgaaaaggaaaagtaagttagaaatgattataaaacataattgatattaggatcaggaagaagaggacactggatctagagtattagataaaatttctcaagccaggcatggtggtgtgtgcctgtaatcccaggtactcagaaaactgaggtgggaggattgcttgagttcaggagtttgagtccaggctgggcaatatagtgagacttcatctcaaaaaagaaaaaaaaaaaccttcacaaaggctgtaacattaaaattgaggtttacagcataagagtaggaaataactagtaaaaagcaaaaaaatactaaaattctaatagaatgataaagattccagaaagcccaggatacttgtaaaggagaaaaatacagagtggggatgtggcaagtaacagctcttaaaatttagtgtaattaaggctatataattggaacagagaagcacagggggagacaaattgtccaaaggaagagaattagccctctgatggcgaaccacatgtgtacatatgtttggaacattctttatatgacaggagaggcactgcagatcagtggggaaaagagaggctgttcaataaatggaaccgagaataaagtggcaatccatgtggaaagagatgaaattggatgcctaactcatgtcatgaagtttggatttaggacttaaatgtcaaaaacaaaatttaaactttagcagaaaaatatttagacatctataagaccttggaataaaaaaattcttaaaacataaaaaaattacygcaaaaawattgataaatttgactatgttaaacttgagaaagttagttcattcaaatgtaccttaaagaagataaaaagagaagttaaaaatcgtagaatatatataaagcaaaygcaactgaccaattattaagtacgtataagtaacttgattgttatatatatcaagtatatataaaattttttctataattaataaaaaagcccaaataacccaatagaaaaaaatgggcaacagaactgaagtgacacttcatagaaaatgaaacacatatagcaaataaatttgtgaagaaataattaacatgaactttacttggaaaaatgcagatcaaggctacagtgatatatcacttatatttagtcagttggcaaaaactataaatggctgataataccaattgctaaaggtgatgtgtctctacatttttataataacttcagataacagttggacattatctctgaaatctgaacattcatatataactcagcacttatagtcatatacccaagaaaatttttcacataaacaaaatatccatagcactataattcataaaaataaagcctgaaaataatccatagatctattaatggaaaagttgattaataaatgttggtatatcaatacaaggagatcttatatagtagtttaatagttactatgaatgcacttcagagacttccatcaacatgattgaatcttgaacatataatagtaaattatgtacaaaaactacctattgagtactatgttcacagcctgtgtgacacgataatttgtaccccaaacctgagcatcgcacaatatatccatgtaacaaacttgcacatgtaccccgaatctaaaataaaattataagaaagaaaaaagttgtatccttcaaagattatatacagtataatactgcttaaaacactaaaagtaactaaaatttaaaaaatgtagtatttaaaaatatagaaaaatacaacaaaactttacaaaagccaaaaaagactaattatgaatatgggaattaggatgttgtctgtcatgtgtacgggaaattggggtgtgagatgggggtgaaaattttgactgamtgtagggtattattacagtcctagatttgatttggatatgggtttgatgtgtctttttctctatgtggataactaaataagtgaataagatacactgaatggattttaaaagtgggaagccactgaatggacttaaaaatcaaagcaaacaggataagagttgtgtcacagaaagattgctgtggatacaatgtagagaatggattagagaagagctattctttccaggaggtctgggtaggagtctgtggcagtattccatgtattctgtgtaggaaatgatrtctgcttagagcaaaatagtgcaaaatgaggtgtaagaggagtaggtaaaaccaagaggcatttaagatatgatattaagagagctggattgcttgcttgattctggcaggtgtaggagaggggagtgtcaaggtcaagtctctggatttttgcagaagtttgtttgatccaatttcctgagagaaggaaggatgtaggagatgatttgagggtggactttgagtttgttttggacacgttgagtttgatatgcctgttagggctctgaaaggaactgttcagtaggaagttggctatatccttaaactctaaatatcaaacttgaaaaaacagtcactttaatggacatttttctaaaatggattacattctgaccttttattaaagtgaagtttatggactgtaatggaatctttgttacagagtcagtattatcattttacacatcaattattgaatgatgttgtaaaaaagaaatgatttcagtgactttatgggagcatgtagttctattccaatattagatacagacccatgaatgctatttgtttttctgttttttaaaggactgctcttgggcaacataagtacttgttaggggatgatattaaccctttcgtgccactctgatgccacctggaattaaagtgcactaaagatatttctgactcctaaatggtatggaatactaagtgctgctactcctaatttggcagagttagaataggtatttgagagaataggyatttaaaaagcccaatgatgccacagtgcacctgcaaacactttgtggaaatttgagggcatgtggtaggtttgcatgggcgttatgacatagtggatccttgtcctggctcccccactcatattctcaggcaagtagattaatctctctgggcctcagttgtaatatgtaatatgaaatgaatatgaatcatgatttttaaaatcatgccagtctgaagtgaatgattatatgtttctagctttaagaaaataagcctatagtaaaccagctattttattatctagcctttggttagtctacagataatatttggtttgagatgagaaatggtcatgcagagaagacacaatgggaaaggatctgcttagaaactccggaggtttcttatcatcacagagggcaaaagggatatgatgttatgatatgtattactcacagagttatctagagggacagaactaatrggatagatgtatatataaaggggagtttattaaggagtattgactgacacaatcacaagatgaagtcccacaataggctatctgcaagctgaggagcaagaaagccagtccgagtcccaaaacctcaaaaggaaagctgacagtgcagccttcaatctgtggttgaagttacaacagcccctggcaaaccactggtgtaagtccaaaagtccaaaagctgaagaacttggagttcaatgttcgagggcagggagcatccatcacggaagaaagatgaaggccagaagacttagccagtatagtccttccacgttcctctgcctgcttttatcctaaccatgctggcagcggattagatggtgcccactcagattgagggtgggtctgcgtctctcagtccactgactcaaatgttagtctcttttggcaayacacacacacatacacccaggatcaataccttgcttccttcaatccaatcaagttgacactcaatattaactgtcacatgatattctagaagggaaggaaacctacctttctttgtcttattctgaaccttaaacatatgacatatgcataggaaatgaaatgaaagttacttgaaaaaagggaaatagcaaagcaagaatttctgattctatagaaaaaagatacatacattagtcaatagtaataacacaataataattttaagtattaactattctaaattatttacaagtgctacaactaacactacaagtgttagtaaattctcacaaaaaaatctgtaaagttggcattattattattattattttacatgtgaggaactgagacaaagagagggtaaagagatctgccagaacttttacaaccaatggaatgagctttggttattatagtgtaagttcacaaaatgattctgtcatcagtaaataccggtttgcattggaattcaagtactgtgttttcatttggataccagtgtggagatacacattctgaaaactccgtgttttgtctttactctcagagacattctacaccctccaggtctccctagcctgtaggatgtgtaaatctcagccaggaaaatatttactagtgatctttctgcttgcagataattagtaagacagttatcaccttctctggcattttaagttgctcttattcacttttgtccctcagacctccccaatgctgctctgaattgggggaaatcaaaatgagtggaattgctgaccaatgacttcagttcaaaacatttacatttttcttggtgctgccagggaggctaaggtttcttctcataaatccagggagacagatggccttgctctcttacatgtttggcaaaaggctgttgtgtcagccttttctatttttgttttttaaaattatctcctccttatagccatgcactcatttattaaacagcaaatgtttgttgattttgtctgattaatctttggtgctttggggaagaattcctatgtttacataagggagaactaaagaattaaagcaataaattaaattaaagcaataaaactaacagcaaatttttaaaatatatggcttcatcttttgcaagataggtagagggtatgattgattaaaatgcattgtcagtattggaattgcccttaataagttataatgaccactggaatgttgagattataatatttataattgtaaaacagtggaatataccaacacaattgatttggattaagggcatatatgtcccggataattttcaatcagttctatatacagtttcccaaaattaataggccttataaaattttgaccgctgatatttgctttgctctttcatactcttatccacaattcactctgacccttctgctcttctacatgggcatagtaatgtcaggaataacaattaattataatcaagatcacaatttatttattttaataaataattatagttactataataataatttattataataaataaataatgaaaaattattaggtttactgtgctaggtgctttacaagcaatattttgagtaactttaaaagcatcattaaaaggaggtactattattatacccatttacaaatgagaaactgggctatggaaagattatttaaattccccaaggttacaaacctctgcaaggactcacagctggtttgtcagacttttgagcccatatgttgaaacrgtagactgtgttgtgcccctgacccaggcatgcctagactcctttttgccaaagtaatcataacatttatatactatgtatgaactatttatacaaacacgagtatttctggaggatgtagaaagaggtggccactgacttcgggtaaaaaaaaaaaagtcttatttaatagaaaagtgaaaagtacctttgccaggctcacctagccttattttagactagcaattttgcatttattgagtctctagagcacactgattaatttagattgcagtttttctcagcagtgagttttggggtcaacctaacaagtcttagaaaaaatagttaaaaattgaaagcaatagtgaaacaccwgtttttccccaaagcttaataaaaatatttgataccattcattcattcagtagaggtactggagatttgatgtgctcataaataataaattacaaaacagaaagtggtacctgctgtaagagaagcaccaaataaacttgaataakagttaagaggccttgaaatatgggagttttatggacatgtgaaaattggaagggaagagatagcagaagaaagtgaagtaccasgagaarcatcttgcctttcccaaaatatggatatgagaaatcagtgaattagttgataggagcasaatcastcataaaagggtttctagattttaagttgaacatcaggagaaagattttaaagggctgagtgctggggaaaggaattttaaccttgttctttacgaaaagggatcactgatggtttctctaaaaaaagtgtggatttgatgcaggactggcaagccccagagtggatcttagcctgtaaaggttctcagttttgcccaggaaagaattcaagggcaagccagaggtggaagaaaacagttttattgaacagtgttacagctctggtggggttacagctctgtgactggcaaggagtgcttgccaacctccactctyatctggccgagaacatccagctgactacaattcccctgacttgaagtcctctggctctgggggccctaccaagggacacgatggacccaaagcaggcagcacactaccgtagcattggtacaggacaaaataagagcttggccattgacactgycttcagcacaccctggcaaaaaaggtgggctacaaaacaaaacccaaaatccatakgccaaagggaatggagttgggcaagcacctgccagcctcaaaacccttctaagcaaaaaccaaaagccaaaatgaggttacacattgaggaacaccaatagcatakaactaagttatgttgggagaaaacactgttcccacagacctctaagacaaaatactttagcattaggcacaacagcagtcataatcagaggagaaaaactcaaaggagctgacaaaaaaactaatggagagagctacatgaatctcagaagctttcaaaagaagtagatcacaggattgaaaataaaaatttctggtaatttagcaaatcaataccttaagaaaatttggttcagatatagagaccrttttctaaaaagcctgttatagacagtttccttttaatacttccatacattctcctttactaacttttcaagacttatgcagatcatctataacatgctagaatgttctgacttgtcctatgctgcctatttcttaaataaccagtcattttactctagggcaagaatttactatacgagatcccttctcttataaaattactctttctttatatcattccttgcaaaataataataaatcttctattcatgatgttctctacatctctcttttttactcactggttccctcatattttgaacctcccttttaataactaccaaattagacaaaattatttttcccaataaagaatacatttctttggcacattttatgtaaacctagggaggaagaaatcctagcccaccagacactggcattctatagataagaatcattctatcactttaagacgttaaaccacataatacgctcactatttaagcatctattccattctttcacttttaacagttttatgtagactatctccgagaaccaagttgctatgcaaatctagtcaccatttaaagccattttaaccattttaaagcctatatcagtgatttaccaaagtaaaaatcttaatgtcaaatttcagaagatgtaacattatcttcaaactaatcaactttgactagtcatttaatttatgaagattatttataaaccaatttgatagcatgctagacaaaacatatatcacaatacttgtatatatgcctaaacaaacacattaaataaagttacctacacaagacaactggattcaagttatttacaaaattgggaccatctacttggccaaattttgtttgcctcaataggtttgaaaacaggaagaggcagggaaagggatccaatagcatcaaattagaaagggaggtagcaaacagcattgctcaaggggagaccctggagacccygaactaccaaagagcgcaaccagcagtggagtcactgaagaaaaatgttcaggcagctgcttgtctgccactgtgggaagccatctgcagggacaatggtccaagacttccagtaaacttacttgagtaagacagtttgtgggggctagtagaagaaggttagctctagaattgatggagagccttttttctctctcttaccagggacagttaggacatgcttattgccaagggccctcttgcttaaagcaggtgcactgattctggcccaggggcaggcaagttgggggctcttgtctaggcatcccatcccagatgccaatttcataacattttctcatgatagataactcttagggggcaggggacttaggcaactgctaacaattgtactttttggctatttctttttcttttttttcctattgccctgagatagttctctaactgtgtcgtaattgactggcttacccatatactttttcctttgcttttttcccacagcagagcaagtagattatttgtaagtcatgatgagttaaatcaaagaacatggtcaacttaacaaactcctctatacactttactggattttctgaaaactttctatgtttttccttgtgtaaagccaaattagacatagaaaatggcacatgtactctaagtattccctcacttccgttaggtatctcctgcaatggacacaggtttgactttagatgctggtatggggctgactcctggtggtactggttgggcttactttctggggcagcaaggggtataggctgaggctagttggataaggatgaggtgtgcctgatgtccttggggtacagtccttcattagagaactggtgggacccctccccaacccactgagagttgggagactgaggagaccctggagggggagtaggcctccaaggggaagcagctgggaggggatcctttaggcatgaatttctgttgcctggaagtaacatgagccagtaaaggtctataaaagcctgtacataagggacctcttcccgttttctttcagttttagaaaagaagtctaattgtaaagtatcattataacatatagaaccatgtttaggccaaatgtgttggtttgccactttgtgtcgaacgcaaatattattgccatactaaatgagtttcttcttcttttagccaaatttgaatttgctccattggcctaaaacataccccagtggtgggtcctctgggatgcttgctgttgcacccatgtctagtaaggatctctacagagggttttggttagcctaagtttagtaaatgccaagttgctttttcccttttacattcccacttttcataggtagcaaggtgttacaaattagatcccaagctacaaaaaggcagtgggatgttgaacttaaattccacagagagagggttacacagaaagggaggataaacaaatggctgtggaagagagaaaggaaagggtaaacagcattgcccaaggggagacctcagaggccctgaattgcaggagaatttacccagtagtggagacaccaaaaacaaaaatatytggatggccacttgtctactgctgtaagtggctgtccatcaggccaggggcctaggaactcccagttcctttggccaagaggggcttaagcaaggcacttgttagaaagcasacaggaagggacttgcagctggctgttgggaaaataatacttctaactctaagggcagaaaaaggcaagaccaatattcccctagggggaggggctataacccaccatacttagaaagaatgtcagtgctgaaaatcccagagcatattggggggtggccaaaaatactaatgctgaaaacccagagttactgagtgtcaaccaatgagggtcccctcaccaaatgctgaaaaccttgggggcaatcagggggcagccaacagtgaacccaagaccaagttgggggtcacagaacagtgtgactctggcatcccagagtcaacacaacaggggacctctaacaaccaagtgtactgccttaattgtccactcacaattaacagaacgtttaaagcaaatgtaagagtgcacatcaaacacattttaaggcataaatcatttaagaaaataaaacaaatggtggagcaataaaatggagttagaagacaaaggacttggagaaggggtgacaaggacgtgtttcaaggcaccgaaactgtgaggaactgacaacttagccaaaggcttttattccctagctttaccaaatattatgaaaggaagggcagaggggataccacccattcagcagaaatggcacagactgtgggacctggtgaagatctctccaggatacctcagcttgggtgagtttggcagggctgcctcagagggagaggcctgcaccaatttggtaatccacccattactagtcagagaggcgggccccacacaaaccagatggcactatggctgccccccaccaatggactttactgctggggtgggagaggcctgtacaggcaggtaactgacagggctgcctgtcagagagttgggccccacacaaagcagacagcctcacagccgtctcaccgatgggctcagctgccacagtgggaggggcctgcatggccagtaacccactgggctgctggtcagagaggcaggtgtcacatgaggcagcacactatggctgcttgttcatctgatcagctccactgcctgccagggaaaatagtggctctggaaagagctttggtagtgacagacctcaagtgttacaactctgttttgctgcctctmcgatcctcagtctgctaatcactttttgccaccattggctctgctgatcagtgtcccatgaatcctgccaattgctgcttcactgattgctgactgctgcctcattaatcacccactgccatcttctgtcttygccccatgttgggtgccaagctgatgcagggcaggagagccccagagttgagcttaatccatgaggattcttggctttgcccaggaaacaattcaagggcaagccagaggtagaaggaaacagctttattgaacagacagtgttacagctctggtggtgttgcagctctgtgactgctcctgcagagcaggcccatcccatagacagagagtagcagccagggcagttttgcagtcacatttatacccatttttaattgcatacagattaagagatgaaggggtggtttattcagggaaggggtggtaatcgttgggtcattgccatggaaagggtcagcaactctggggtatcgccatggcaatggtaaattgacattggcagtggtgggaatgtctgagtgaaagcttctttttacctggcctttttaagctggtcttcagtctggtccggtgtccgaggcctgcctctgtagttgagtcttgcctcctatctcagattgattatttgctgatgtttataatacaatagcactaaaatattttagtatttatttaaataaagattcatactgaagttttattcattaattaaaaccactcaaattaataactaaatggaatactgtcatttaaaatttttacgttacaaattaattggtaggagaaagaaagatttttgtcctgtaaaattgagtttagatattatttttaaaggtaactactcaagtccaaattcatcaaaatgtatacatcaaatatgtatatttttgtatatcagttatacctcaataaagtataaaaaagtaactactcaaaaatctttactcatgtagtataagttgagacaacttatccaagaaacattacttgaatactgattgtgacaaagcctggagatagaaagaggaagaatacatatttttgttttcatgtttagcagggaagaaaggaatttggaattaagtgaatgaaatgtcagcacatcaatgctgtactattaggaggagagagactctatgaaattaagaccaaaaaatcaatagatgctatctgtcctttgaaggcaaggtctaatattctttgtaatattgaacagcatattctatgcaaatacttaataagttattacagcaatgtaaatatcaggcagatattttcattcacgtttatataaggcaaatgcattagttagtgtaaagggaggtaatacataataataaaggtaacagtctatcaagaagacagaacaattttagacatgtatatacaacaccctttatataaaattaggaaaaattagaattrcaatgaaaaaattagcagacccaacttcatagttgagtatttagcaaaatgctttcaaaaattaataatctttaaaaaatggaaataaaagctatagaaaacaaaatttacaagcttgaagatcaaattttcaattccacaaatacttgattgattagagagtgggtaacaaaactgtttaccaaattgtccaccaataaaatgggaatggacarattttatctctactcagtagaaattattgtaattaaagggccatgttgtacagagacaactggctataatagaattttgtccacttctatcttcatcacctaaaacagtgcctggcttatagtgggtgctcacttaacaattgctgattgaataacgaatgcatgataagtttggtaccgttttcatgatcatagagtagccagtttatatatatgattaagaaacttgatgtaacttcattatcatggcccaaataggcttaaaaaattgtttaccttacacacaacccaagtgtaaaatattttcttgtgtctcttcttggcccatataatttgatttatagcccaaattgggcacatttatagcctggagatgatattttttccttcagaacctgccttatgttacattgtatatactttcactttctccacgatatacagaggttttcataagatcattgcatatttacattgtagtagtcaataagtcaagagagtaaagcgagttctagatggaatagacgtatcatgtggagtatgtggaatgaatcagtacatggaggactcagcaggagcactcatgaaaataagattgaggaactttgaaaaagatggagataggtggtatgtttgacttatgtgtaaaaagcagctaataaatggagacaatagcaaatgaaaataataaagtaataatggaaagttttaagagtgagaaattcaatcaraaaggaaaacaactgagagtaaggtgattacattgtagaacagaactcatggtttagccaataagtaaaactccatgtaagtatagctttgggaataattaaggaacttatttccaaaatcatctttattaaggtatattataaaaagctccattttaattttacagtttcatgagtttggacaaatggatctcagatttaatctcacaatcatgactccctctgcacaatgtccctcatacctctaggcagcccattcctccacttgaggcctgataaccactgatctggtttttgtgattattgattacttttgtctcttctagcaaatcttaaaagttgaattgtactactcagcataagtgttttgagattaataatgttattgggtgtatcagcggttctgttgcataaaaatattctgtggtatggtttctttgtttcatgctgctataacagaacacatgggactgggtaattattaaagaacagaaatttatttcttacacgtttggaggcttagaaagccaagaccaaggtgcaagcaggattgttttctggttccaagttggtgctttgttggtttgttctccaaagaggaggagcattgttgtctttaygtgccactataaatcctattagtagtggcattaattctattaattaggacagaggtctcactatctaaacacctaaaagtcttcacctccctatacctccatactgggaaacatttagaccatagcatatggatggagtacaattatctttattcttgcactggctggtggacatttaggtcgtttccatcttttcattattatgaataaagctgctacattcatacacaagtctttgtgtggacatatgttttcacaactcttgggaaaataccaaaggatggaagtgctgagtcatatgccaagtgtatgtttaattttgtgagatactgccagtctgttttcccaagttgttagactattttctattcccatcagcaatgtaggaaatatctagttacttcacatccttgccaacacatcatagccagaattttaaattttagccattttactgagttaattgtggtatctcattgtgattttgacttggatttcgtgataactattgatactgagcatcaatttctctctctctctgtctctccgtctctctctctctctctctststgtgtgtgtgtgtgtgtgtgtgtgtgtgtgtgtgtgtgtgtgtgtgtgtggccagacttgttttatgaactatctgttcaatcttttgttcatttttaaaattggattgcctgtggcttgcctttttacttttctaaatgaggtctatgaaagagcagaaatttttaactctgatgaaatctaacgtatttttttatgcttcttttattgttctagctaagaaatattttccaatgccaaggccatgaaaattctttctggaagatttatggttttagattttaagatttgatttaattttggtgtagagggtgaggagggttaaagttccttttttttcccccccaaaagaaaccctccattcattcaaaaatatatgccccttgaagataagaaaggcatgagttttagaaataagaacagcatttttggccgggtcctagtgactcatgcctgtaatcccagcactttgggaggccaaggcaagggaattgattgagctcaggagtttgagaccaacctgggcaacatggcgaaaagccatctctacaaaaaatacaaaaattagctagccatggtggtgcgtgcctgtaatcccagatacttgggagcctgaggcacaagaatcacttgaacccaggaaatggaggttgcagtgagccaagatcatgcaactgcactcctgcctaggctacagagcaagactctgtctcaaagyaaaaaaaagaacagcattttcatatatttctcagtactctcttgtacatttctctgttactaatatgaataatttagttatgaatattgaggtttatttttaaaattcattatatattatatgtaatgatataaaattcattagataacttgaaaagtatgtaattgttacagactgaatcttctctagatatttcattgaaggataatgaaaaatatattttgttaaatttctttcaaaaaagtactatttatttttcctaataaaattaatattcattgtagaaaaaaataaaattaaaataaagaagaaaattaaatttgaattccacctakatrttgccctcayggtaaaatgaaatttactttttaaattaatatattatgggcattttgtctttcataagatatcctttaaaaatatggttttaatggccacacaatattttatcatatgtctatatggtagtattcataactatttgtcatgaattttcatgtagattgcacccaacattttaccactgaataatgttattataaatatttttatgaagttatctttgaaaatgtgatgaattttttatgtaatggaaaggatgtttcaatatttttaaggatacataacagttttacatatttatgaggtacatgtgatattttgatacaagcatacaatgtttaatgatgaaatcagggtaatggagatatgtgtcacctcaagcatttacgatttttttgtgttaggaccatcccaattcctctcttctagttatttttaaatayacaataaattattgctaactatacttgtcctattgtactaccaaacactattcctttgatcaaaagtgtatttktgtactcattaactaatttttcttttctacccctaccacattacccttcccagyttctgataaccatcattctactctctatcttcatgggatcaattttttttaactcccaaatgtgagtgagaaaatttaatacttgtttttctgtgcgtggcttgttttatttcagagaatctcctcctgtcagaggagaatctgcgaagggacaaatgacatattctgccatttgtgattacatatatagaacaggacggtcttgttttttggttgtttcataartcctttcttttcttcttcttaatgtttttctttatggatacataattttatttggtagaaagttttaatttcttggtatttgttttttgtgtatctattttaggttatgctttgtagttaccataagacttgtagatattatcttataatcaatgattttaaagcaatgacaacttttctctggtcacaatgaaaaggaaaaaataagcaaaaaaaaaamccaaaaactaaaaaactctacattttcattccatccccctaactttaagacttctgttgtctctacttatatattttatattatcgatctcataacaaattgttttagttactatttttgataggttggtttttagttttcctactacatatatgagtgacagtctgaagttacagtttcagggtattctgtatttttttgtgaacttacttttgccagtgagttttatactttcatatcatgttgtattgcccattagtattcttttgtttcrgattgaagaacctattttaacatgtcttctaagaagggttgatgttgaaattctccctcttttctttgtctgggaaagtcttcatttctcctaactgttctggaaacaatactcaatattctaggttggatttcttttttttttttttttttttactttagcatgttgaatatgtcatcccattccctcctgacttacaaggtttatactgagaagcctggtcctagatgtataaaagtttcttaatatgctatttgcttctttttttgttgctgttgttgggattctttttttttttgagatggagtcttgcactgtcgcctaggctggagtgcagtggcgggatctcggctcactgcaagctccgcctgccgggttcacgccattctcctgcctcagcctcccaagtagctgggactacaggcgcccgccaaaacgcctggctaatttttttttgtatttttagtagacacggggtctcaccgtgttacccaggatggtctcgatctcatgacctcgtgatccgcccgcctcggccttccaaagcgctgggattacaggcgtgagccaccgcgaccggccccgggattttttttttatccttgacctttgggaatttgaatattatatgctttaaggtaatcttatttgttttgaatcttcttggtgttctttgttgttctacctggttattcgtgttttttccaggtttaggaaggtttatgttgtcatttctaccttgatccctgtctctatatcctctttaataaaataactcttagattatcccttttgaggctattgtctagattttgtgggattasttcattctttttttattttttcacccctgactgtatattttcatacagtctatcttcaagtttactaattctttgttctgcttgatcarttctgcttttgagagactgcggcatttttcagttcgtcacttgaattcttcatctctagaatttttgcttgatttaaaaaaattatttcaatcactttgttaaatttctctgagaggattctgaattccttctctgtgttatcttgaaatttgctgaacttcctaagacaggtattttgaattttctgtctaacaggtcacatgtctttgccaatcaaggattggtcactggtgccttatttagttaatgtggtgaggctatgttttcctaatgtccttgatgcttgtagatgtttgttgatatctgggcattgaagagttaggtatttatcacgatctttgcagtctgagcatacttgtactcatccttctttagagagctttccaggaattcaaaggggattgagtgttgttacctaagcttgtcgtcactgcagctctttcagcagtaggtggcccccataagcccaggaacactgtggctcttcacttaattaaatacacagtcttggtggatttggggaagacagagtattccctgtgttcctaggcaaagcctcttgttttctgccctgtcttttccccaggcaaaaggagtttttctccatgtggcactgcctggagttgagggaggggtgatgtgggtactcccatggctctcacagctggtatcatgaggagtcacacctgaaaccactgccttccagagcagcacaatagtggtgctcacccatggaccacatctactactgtctgtctgccccggatatttttgtcaaggcccaaggctactttagtcagcagatggtgattcctgctgagacttggtccaacctgtcagtgcagtggattcccttctggcccctgatgggtctagaaatgcccttcaggagcaaaggtcgggaattaggcacttcagaaatcttcctgataatttactttgctgtgagtgagctggtacccacgttgcaagacaaagtcctctgtactatcttctctcctgacccaagcagaaagagtctctcccagtgctgcacagcctactcttaggagggatatgacacgggcactcacttggccaccacagctggtgttgctctggtccgtaccccaagtccactgcctctgagaccagcctagcaccagagctggaccaaggactgcagtcactgtggcctggttgccactcaaagttatttggagccccaggccattttaatcagtcactggtagagctgactagaattcagtttcctcccactggggcaaaggatacctctcagacccagtggtgttctaagtactccgtctgtgagcaccagcagaatttttccctgtgttgtgctttactgtgacagaatggccctggcttcaatgcaaagtcccacacttcctttgctgtcccttcttcaagcacccagattctttctccaggctgtgcctcttggggttagagtaggggtgttgtaggcaatgcaaaactcttcttcctatccccttcaatgcctttttctttgttgctatgttgaacctaggtatgtggtccttacctgcttatctggtttttatgaatgtgcttccttgcatggatagttgttgaatttgatgttcctgtgggcaacaatctctagagggttattttggtcagttcgttctaccttcctctgaaaagtagtttctgattatattcttagactggattattggtattggattaaatttttaaagacatgaatattcttttaattctcttgagagaaactttcactgctttaaatatccttgtttgtaatagtttaaaacaatagtttaatagttttaatagtttaaaaacaaggctattgatcttcttatctcatcatcagtatgtgtatacatatctcaccacagtatttatcatttcatttaaacacatttgtgagctaaattactttaaaatcagaaattctttgagtttttctttttttagtttttttcacattgaataatttgatctgtatatatttttatttagagtaataatgaggatgaattttaattttttgataatgattcacttgtagcatatattgaattgtctttgctctcattactttttgtaatgttaaaattaacgtgtagaaaatctttatgtataccagggtctgtatacttcaaagtctgatccagatatgatctcacttcctccattttttgaggattaaagaggtaaactaaaaaaatgcattaggcatcacaaaggcctctagagaaaaatattaatatacacaccccataatttacctgaagttaatagtttaaaaacaaatctaattccttyaattagaaaaacttaaaaatttttttaaattaaaaattacctaaaaaaatatgtgatttactttttagaagacttattctccttttaggttgcaataacacatgatctctatttaaacattttgttcaatatagaaaaatagaagaagaatataaaagmacttataagtccaatacatatagattgttacaattataatcttggtttattttttatatttataatagagatcttgctttatttcatttttacatcctgcttttattgtctgaatttatatttaggacattttcttacagtattaaattttccttaaaccacagttttactgactgtacactattccgcctattacagtttgcttaaacattttcctctggattttcaaagggatgataaaagtttaaaaatctttctttactagttcctcattcataactatcattattttctgccacatagtatagttctatgtgttttcgttttcttctttaatctgtgtgttataatttatttcattattattttacttatttggggcatgcctaatcctacttactatttattattcaagatgtgagctggacctgaaaagatggattgctgaaggtgagagattgttcttaaggaaactggcactcttgttgaatttgaaggtttatgtgcattattataaacatattcaccattrttagagctaccacttattaggtgtttactacgtagcatgccatgaattcaaagcacaagtgctgtatcacttagttttcaaacatcgctatggagaagttcagacagaatcatcttgacaaaattttctgtactcatggtctctgaattcagttcacagtttcttttgtaaagatactccaagcagcttcttttcaccatgacttcatcagaaatgcttttattaataccacttattgtttccatattgctaagtccaatgattctcaacctttattttacttgactgtcaataacatctgaaacagttcatcatccctgcctccttgtattgcttttgttacttgtcttagaggctgtcacaccctcctggktttctacctcactgacgacttcttcacaatatcctttgcaggttccctgtcttcaccttacctcctaaagttgaggtaggccaggaagcasaattagatwtatctgtkctttttctgtacttattcctttagtgatctctttgaatatattgttcatttatatgccttatcataaatttatcacttcaaactttacatagccatgttatactcctctcctaatttttagacatttgtgaccaaggcttacttgatatatctttttggattctaagaaacatctcaaacttaccatatccaaaactgaatttctcatctttcatcaaaagcttttctctttgccatcttttctgtgtcgatttttggcagtttcatcactccggctgcttaaaccccaaaatttcagatattctcaacttttccttttctctcccatttcacattagcacatcctgtttgcattattatatgcaaactttctttaaagtatatttagaattcagacttaagtcagatcatgccattcctctgctccaacatctttgctagctccccaatactcagagtagaaacaaaagttattatgatggcttactcaagttctgtgccttgagcactggagtcacattgactttaggtcttggtattctccccttattcattctgttccagtcacattggctttcttgctattcttgcaatgtggcaggtatatttctacctcagtacctttgtcttgctaactsttctgtatgtaatgttctttctccagtttacttcatgtcttaattttctacctcaccttattcaggcattatctcaaatgtcagtgactcagtatagcccacatggccacactatttgaaaaggtaaattgttccccatctctacactcgctgtccttcttctctgccttgtttttttaccactgtatttttcactgcatgacatattatgttttacttatttacattctttcttttctagtctccctctctgcccaataacaatcctgtaagtctattttactgctgtatctccagtgtctagaagcgcttgacacatcagatatgtgaatgagggaaggaatactgagtgaatatttgcttaatgctgtcatgatagaagaatctgcagagcaagaattcagcttttgttccaataataatttaccactagagagacttatttcaagaatttaactagaaatctatatacaacataaacagaatataagcatgcaaaatttatagagaaagcatgaagttttccaatataggttttccaacaactgaaagcttcacaaaatttgcttttatgatgtaattttatagtgctgataaaaakgcatgcattcttataacctgtaaatcttttcatattttatgcaaattgataaaatatatcataaccattataataggttgaatagtgtcccagaaaaaaaatcatgtcaacctggaccctcagaatgtaacattatttggaaataatgtcttctcagatgtaattagtcaaggattgagatgagatcatacacaattagagtaggctctaaatccaatgaccagtgtcctcataagaggagagaatgcaaagaagtacatagaagggagaaatttatgtgaaaatgaaggcagagagtatagttatgttgtcacataccaaggaatgcttggggtcatcaaagaagatgaacgagacaaggaaggagtttctcctactgcctctggagggagtgcagccctgctgacatcctgattttgcacttctagcctccagaactgtgtgagagaatatgtttctgttgtttttttgccaccaagtttgtggtaatttgttttggcagccctaggaaacaaatatagcaactaataacaatttttcaaatgttccacagtcatagaaatacaggaagagtcaaaacatggcttgtcccaaatcgcaaagtgattcagtccggatattgatgtgacactaagaactctttactcctggttcaagatgctaccacaaatatccttctccatctttttaactttaatattaggataaacaatttatagttctataaaaatataatacttttttatggaagtccccttattagaaaaacaataactacatattgagaatgtataacatttaccaacttatataagtaggctgctgcttatatttcataatttgcagtcattacttctaatgacaaaaatgctacagatgaattggggatgatgtcataatatgtgcatgtaactctatattaggtacttgctgtacctaatataaaatagtgtattcatattaatataaggaratttattgcttcagcttgtgatgcagatacttccctcacctaacatagagttatatgcccatattatgacatatatgtcaaggtatttcttcctttaatgaagtggaacttactaatttaggtaattcaggataacctatgaagtggcctcactgatagaatttgtgttatgtaacactttagagttagtaatcctgtgacaaagaataaatgaaaagaatgatataaaggtagtcattgagttttagaactggtcacaatcttagaattcatgtaagctattttcaaacttctgaaaattctcaatgacatagaatacattttcaaataaaatctcatgtaaatacaatttattaattggtaaaatatttaattcttctatgtaaagaggggttagtcgttcatagccccttttttttcctaacaaggaaatagagatatgaggaaagtacatcaattatcaaagttagacaagtagtagaggccaagataaaactactgagagctttgaggattctgacctagagctctatttaaaaattacagtgatcgtgaaaagacctctataatttacaaccttgcttttgatctcattaattttatatctttttctgaaatgtgtcaacatcatcctatctgctgtgccaaatatcattaagagttactgatgtttacaaagaattaccacaaatcctttaatacactatttttgatgtactggtggaatatattttataactcagttactagcaactcactgaagatttctgcaatgccaaatttacagtaacccatttctcttctcaactcatatagtaccttatctaaacttctcccattataatctttttataaaaattataaaatttttagctatttatgtgcttttctttttttcttttttttgtgccttactgacagcagtttgagttcagaacctatgattgatctgtgatttaaggaaagcatctaacaaagtatctttcatatagcaggtacagaaccaacgtgaatgactaaactttgatgtagtttggacatcctttcctccttttactttttagacgttctttgaagatatttaagtaagttttttaggttattcacatgcgcacctagtggaattagatgaacatgaccatatacagatgatcttgtcttaccaagtgaaatacagtgtctggtagagtctgttgatgatggctatgaacattgcatgccctcaataaatatttcctgaatgatcatttgtaataggtccacatctcaagctgaagaacaatttgatgttaccaatgatttatagacttttactttgaactagttcctgaaattatcttgacattgtgctttttcctttgaaccttcttgctgccttgatgttcttcccctaccaatcttttctccacactgatggcagataaatcttcctgaaacactattttgtggctgttacttgcctgctcagtgtccttcaataatttccaactaacggcagctctaagtcataactccttactttggcaccagaaactgtctrtggtctggctagacatagtcttagcttcaaatactttcctaaatatttgctgtatagtggttaacaatcgtacttttgtatgagacagatttgtattttaatcaatctgtcattacctgaaggtgtgaccttgttaaattcatttgctattgtgagcctcagttttttcatcttgaaaataagaataatgaccacatggatttttattccttccttcagtaaatatctattgagtgttttttatgtgctagtcacttctctaggtattgggatgagtcaataaagaaagtaggcaaaattattttggagcttgcatgctagtggaggagataataaatataacaaataacctatagagtaggctaataagcaataaatgctatgtaaaaaaataagtggatatggggctattaggaatggaggaagagttctggagaagaggaaggatggaaatcagtctaagcataaatgagatattcttcctgccttgatttccagaagtcatggttaccagaagaattaagatttttagagatagactaattcaagcttcctattatttgttctgtcactaggtcctaggaaattggagtcatgtgtaaggaaaagaaagttggttttgacagtctccctatgtctttgtgatgtaaaatagtctagaggaaggaaatctgaatgttttttcttaagtgataagtgggaaactttcacaatcttgattagtgtattatatgggtagcatcattagaaagaatggaaattattttatacccattcctttatttgcatatgactgtctttgttgttttctttgtgtttgggtataaataagcaaattaggtaggaaatattaaaaagaatttcagcaaagcttttattcttaattcaaggaaatgtattttgacattaatgttttttaaccctcattattaaccctgtgatggcatctcttggccttcttatcatgccttcaaatgtgtgattattcattcctaacaatgrttacatgtcacatttacctggaggatttgaaaacatgctttttcttagataccattcacccctgctccttttttactggtgctttaccaaatttctcagttgattctaatatgcatcctgacctgagaactactgacttacatggtctggcacatgcctctctctctaaccttatcacctcccattctctttatcacttgcctttctctgcactcaggccttcttttcatttgcccaaattgcaagttatgttcatatcagtccctttgcattttctactcttaactactcaaaatgcttttccacagagtcattcatttaacacttcaacacatatttgttaattaatcacctattcactctaccgtggatgaaactgaaaaaaaataacaattcttcttaatttggctgctttcttctcatcattaaatgattcaatagagagttgttggccaaaagaaccaaagtttcagttacacaggataagtggggagatgatgtatagcttggtggctacagttcagaaaactgtgttgcatacttgaaatttgctaagagagtaggtcttaaatcttctcacagcactacacacacaaaaaaacggtaactgtaaagtgatggatatgttaattagtttaattgtcataatgatttcacaacgtatacctataaaaacatcacattgcacgtcctaaatatatgcaatttttctttgtcatttatacttcaataaagctgggggaaaaagaaaaataaataaatatcacatcccaacatacctcacctgaccattccagctgacattgccacttcaaaattattttgtcttccttattttatgacagctcttatcttgttatatattttgattttgtcttacgtatgtatgtgttattgtgtttacaacctgtagaggatatgttctataaaagtgaaaatttgtatatcttattagccattttatcctcagtgcttagattagcattggctggaacataatgggtactcaataatcaatcaattaattaattaatcaatctgctttacaatgtaactaaatgtggtttctgtagttcctaaactgagtcttatctaccatgaagatactgaagtttaaggtttagcacccattttaatcatgaatcattttcaatcaattttatctttgtaaagcagtccttcaaaattcacaaatttcaagccttataataaaatctggatgtcttctgttcctaaattttcttccaagccaattaggtattagtttatcagaataacatttgttttatttcagttaaartagtaaaataattttgctctaaagaacaagctatattggaatcatgggttgagtgaataaaacatttggaaccaataataaatggttgaggtaatagctcattttggaaaacaaaagccattcatttagcttttctcgtagaaatagatttttttgtcaatcgattatgttgggttacttataataagtaacatagtaaatacatttaattccatattactaagtgattaattcccacagcacatttgatatttttagaaaatttgcatatttttgtaacaattggcaaaaaattaatatggaaacatgaaaaattattgatatgggtatgcatttaaaataaacttgagcttagttaggaaataataaytgaaataattccatctacacattttttaagcacttgcactatacctcctctaataatagagggcatactagtcataattgaactgataaatcattttatctttaagttatttttaatattgcttttgtcaataagggaatatttttctttgagaaagcaatgaaagcaagctttgtgcttgacataaaatctaggtgtagtaagctgtcattcaaaatcctttataatttgacttaaataaacctttccatcaactgcctctcaaggaaagggtactactgacttattcaaagcataaatgattcttttatgcctgtatacttgctcatattattttatgtctagcattaccatgctacttgtattagtatgttctcatgcagctaataaagacatacctgagactggacaatttataaaggaaagaggtttaattgactcacagttcctcaaggctggagaaacctcaggaaactttaaagcagaaagggaagcaaacacatcyttcttcacatggcagcaggaaggggtggtgctcagcaaagggggaagccccttataaaaccatcagatcccgtgaaatcactaactcactatcagaagaacaggatgggggaaaccaccaccatgattcaattacctccacctggtccctcccacgacatgtggggattatgggaactacaattcaagaagagatttgggtggagacacagccaaaccatatcactatttgaagtgtagttctcaaaccagcatcatcatcattatctcagagcattttagagaaatgcaaaatctcaagtcccactcaaacccacttaattagaatctgtatattaacaatatatctgagttattcatatgaccattcaaattttagaattaaggtccaaaatgcccttttcattaactttttaatttttgaaattctaacttcttctcaagactatactcatatccactacctattgaagtcttccttgaatattctagagaaatacgatctttcaatcctgggaattattgcattaaaaaaaacagtgccttcaattacagctgtttgtagataatcttcctctttgaggatgctattcatgcctcagctatcacctagaaaaatagatttaatagcttttccaaaaatgtkgtttcattaattatagtcatgctttccaaaacattacaaatgaggtactgaatttaatgcaaggtaaatttctcagagataagaagatagaatattgtctgtttattccctaaactgctgctttcatgctaggattgcaggtcctcagggtcagaaactttctttctacttcctgaaagactaagatagtagcataaggacagaaaattgaagaggtttcctacattttcattatgactgaaaccttgaatcatcatctctacttgcattcagcstgggtatgaatttttgctttcctctttgttttgcgtgacctttgtcaagtatcatagttttctatgtctgatatggtttggctgtgtccccacccaaatctcaacttgaattgtatctccttgaattcccatgtgttgtgggagggaccctggggaggtaattgaatcatgggggctgrtctttcccatgctattctcgtgawagtgaataagcctcatgagatctgatgggtttatcaggggtttctgcttttgcttctctctcatttttctcttgccaccaccatgtaagaagtgccttttacctcctgccatgattctgtggcttccccagtcatgtggaacttgaagtccaattaaacctctttttcttcccagttttgggtatgtctttatcagcagcatgaagatggactaataaaatatcttgtttctttatctattaaattgagctgggcatggtggctcacacaggcagtcccagctacttgggaggctggggtgggaggatcctttgcgcccaggagtttgaggctgcagtgagctctcattgcaccactgcactccagcctgggtgacagggcagctgagctagactctgtttcttaaaaaaataaacaataaggaaagataataacaatacagtaatatgctccttacgtcataggtttattactaggattaaattatgttacatctacagaaaattttgcatagttcttaatatataagaaacactctgaaaggttaataacaatagttattattattatttgattattttaaatctaggttacttttattgtagctatccaagaaaagctcacacacaatttcttaaaataaactatttaatttacatttacttataatgaattaccccaaatcaatagtgttgtactttgaggatggttgtttttcataaatcttagtgattcagctagccacacttatttaaataatatgctgggttgctgaggggcacaggatcaaaaattaatgtggcaataaaggcttccttgcttttgaacagatcaatatctgtaagtgaactagaggcacttacaactaaatatccaggaatgaattaaaaatagattctctgatgcttgatggagttaaggatctgagattatggtctttgagaaacttagtgacctgaatacatattcctcttctaccatcctccttttctgcaatactcatcaatttcaataggtattgatatgcctggttgcataaaaggacattgaagagttgagctctttattctaatagcttttaaaatacaaatgcgcatcataattattctctagtagaatctttgtatataacatcatatgcacaaataaaacatttataagtatgattataaacattcttcaacctcattacagatctaaggaagctgacaaagagtaaagaagggcagattcagcatctacgtgaggctgatatgtatgctttttgccgagacaaaaaagattaaaatgtttaagcctcgtcaaaagtctgtgagaaccaaatgaaaggtagattatattcttcctcatattccagattattatttactaattcaatggatagagactgatggaacactattcagtgcaagacattaagttatgtgctgtgatatgagagtaatccagagagttcagctaatattaaacttaaaagttaaagacagaattgcatgttgaattacaattgtgatatatatgatagcatgtaaatggataatatgatctcctttgtgccaaggccctaggcaaggaggaattaacagtattttggagacagggagaatgctaatactgctggagcataggtggaccaaggaggctagtgacatggtcaaatcattgtagacaatattaagagtttgtttttaattctaaaagcagtggagcaccactgaaggattataaacagggaaccttaaacactagggtcagatatgcrctaaaaaggattactaattgctatgtgaaaaaatacgttagagagcatgaaaagtgggtgggaaggaagacccgttaggagatattagagtagcttggaaatgtacataatggtagcctaaataaagttagtgaaaaagagagggaataggaagagtagactgaatcaagaaagaaaggtttaggaggagtaataggcatagtttgggatgtttgtaaattgtttatgaggtgtcgcgtgggtgatcatgatctttgctaagaaaatgagtttagtcttggataggttgcacttgatgttccctttagagattcatgtaagagttttgagtcggcaattggatacatatttctgaatcttagagaactaaggggcaactttaaaaattgaaaattcttattttaagacagatgaatggaaaaacttctctactcatataaaccttttaaatttgtcttctcatgtttattgacatgtgagtatgaaatagaggtaggcttccaaataatttagtcatgcagtggtttgcaagctttgtttcttaaagccgtaaggtatcgtgaaggtggctcagaatacctcgtatattgaggagatacctgtgtataggaagccaggctcttccttttcaactaaaggagctttacttttatgtaagttgcaatctcaaatgatattttattcatttaaaaaattttaaaatatctttattcacgaatggaaactgtctgctacattattaaatagtgaggtatctcagttcacaccctaatatttgagaatgaagccatgaaaggcaactatcataattatctccaaaattatttctttaaagactaaatactagattggagctactgcttatttggtctcatgcaaaattgtgttcatccttgtgatattttagaaatatagtttttttattatactttaagttctagggtatatatatatgcacaatgtgcaggtttgttacatatgtatacatgtgccatgttggtgtgctgcacccattaactcgtcatttacgttaggtatatctcctgatgctatccctccccactctgcccaccccataacaggccctggtgtgtgatgttccccttcctgtgtccagatgttctcattgttcaattcccacctatgagtgagaacatgcggtgtttggtttttttgttcttgcgatagtttactgagaatgatggtttccagcttcatccatgtccctacaaaggacatgaactcatccttttttatggctgcatagtattccctgatgtatatatgccacattttctkaatccagtctatcattgatggacattcgggttgtttccaagtctttgctattgtgaatagtgctgcgatatagtttctagaaactataggcaaaagttgcttaaattcacagtttaacactttgaattttgctttgtcacctgagaccagcaattcattgagccaggttatctcctttggctttcagaattttttctagctcatggtatacagatctgttgtctatatccaacagtcctctctcagacatagaatagcctgatatgtatatttttcttgctagttatttttttctccattattattattaatttactatatatattatcatgtctattactataatgtcagttgtggcattagtgagtagtcttgtcmtttttcttgctatgaagggcaaataattaccacacaaagaatgcccctctgctagaaactgaaaggtaatttcagctttctgatgctctttcaaactgacactcaactgtaacaaatgtgtgctaggagaaattaacattttttctctcatatttcactataatccacaagaacaaacacagtaccaacatttatcattttagttaagtgaaatgctaggaatcaaagtgacaggctctgagagaagttatactgtggaataaaactttatgatccatttgcaaggacggaaatgtacttggctcatcttagtaagtaaataatgctaaatgtatttaaatattgatctgttttcagtggaagggtgaaatgaatttcaaaatatagaggctataaatgtatacaaagcattttctactgtactaccaatattgtgctatgtcactttacgaatctgtgagtaagttgctgaaaactgcaaattttgttataagttgtagtagtcatctatcaccaagtttgtatgttgaagtcaatgtacctaagggaaaatagtgacagagacagattagtttctgcatagcatctgtcagtgtagatagctctcaccattttataggtgagaagcttaactatctttaacaggtaatataggktctattctaagatccactgtctgtttcctttaacaagcaccgtgatgaggctrtaacttctaccttgatgtttggagacatgttcaataatcttgagcaaacataatacttcatttttatttttcaaaagatttacaaattatcaaataaatttaattttatacaaaaataatcccaaatgacagacatatttaatctgtctggggaaaaaaaagaatatgcaataggaagttttggtattttctctgccgtggtgctgaggatatttaagttaccgggtatatttaaggtgctgagaatttttgttagaatttgaagagaaaarcacagaaggactaaattttcttaatgtattgaaacaagaactatttttatctggagataaattagacaataataacaattttataaagttaatttatcagaaaactaaaaagcgatattgaaataagtctattctgtttataaactaattctgtcttgcatagagtgaaatttgatgtgaacagcaagtagcaaaatttgctgtagtttcttcaatgtttgctgaatttttgagtaaatatgaatgttattttaatctttatgaattctaggctgagatagaattttcaaagaaatctgatgcagggtcttatagtagcttagaaaatataattacttacggtatgaaaatattatcaattcattcaatttttttattttaaaaaacgtatctcaatagtttctacctaaaagttgtgataaatggtaattaatattgatatttatttataaactctttaagtattagaaaccacaacttagattttgcatttaaaataatgtaatttaattctcttccacctcttctcttcctttaatttttgggttggttggagttatctggtaaagtgaatctatgacatacactgaaacgttaaatggatggttttatgtttgcagtaatgaaagatttaagctttaagtattctctcaaactctgatttccaaaaatgaaaaattaaaatgagattccatttgcataataaagtagtgacaaagaatttgagtgtaatttatttcattgcaaccctttatgtccttggcattctatctcattacataaacatgctgtttaacatgtggcagtgtgtattggtctaaatggtatgaacatatttcattctgtgccctttgtattgtgccatactggcattttcaataaaggtatcacttaccttcttccttctggagaaaatactgtgcttcttcctaaaggaaagcaaagataatgtgagaacaagacaggtaaatgtttaatggtatcacagaactgcaataaattttgctcgttagcttaaggaaagatctatcatattttattatacctgtcatctttaattttaaagtctctttctataataaaattcttcttaagtgaaatccattcagtgctttttttttatttatagaagctacaactttagaagtttaatgaaatacccaattcttaaactacattgtcatcatggaggttgtacaataatataatctgtttttgagttcttgtgtcttaacatttatttggaatttgaaatgaaaaaatcataggttgggtttattgcaggcttaaattatttttataattgactagattattggcaatagttaacatcttcaacacagtcattatgtgtgcaatcttgtacttgtatttgaaagtgtatttaggggctatatagtaaaggatactagctccagaagactgtagtatactaaaggtatccagagaagttaacattcaaatacatcctaacagtgaaatttggagagaccaggtttctatcacttttaatattatttaaatattattggaattatataaattattttttatttttatgttagatcaaccatcttttaagccagattgtgagttatccatttggttattttttcctttaatcaattttattgaagtgtaatttacaaacaatcatattcaccaattttaagtgtgcattatgatgtgttttgacaaatgtatacagttatataagcaacatgatgccctcctctcaccccaagtccaggaatttactgatctatttttaataattatagcttattgttctacatattcctgatgcttctctttactatttgktttatatttcctctcttttttttcattttggatagttttcaacactatcaggttcactgatcttatcttctgcagtattaaatctgctgtgaattgtatccagttctttacttctattgtatttttcatctctacaaggagttctgtgataaaatatgcataatttttcgaatgactagggggtcaaatcctgttgctgatgttttcatttgaggaagttccttaattattcagtgccttgcaatcttttatctgaaaaatgggaaaacagttccatctgtgttgtaagatcaactacaactatctatatgtaacacttaaaagtaaaaagtaaactttctgtaagtaccaactattatttttattatcagttagtatttatgacttattaaatgcccattcttagaaaaactaaatatgcctattatttgtaattctcagctaagcgcatcacgttcctaagaaaaagacccttacatcctacttaactcstcttccctccaaaatgtaaatgtccatttctcctgaagtccatttggctgcatcctgcccagactcttatcttcactgtaatacatagaacataccttttctattgttattgagttgtgtcaagaatttccttcctgttcagttgtattcctcttgtatatcaagctttccattctactttgataatttacatatggattccttttcataggactgtgagtgactggagagaatggattttcatatcatttgttctattttcagcaccaaactcagtacccggcataatagttacctcattctgaaagacaaaataaataaataaataattataggaaaacaaacacattatgacagttttagtggactccatcagcttaatacattaatgggcttgcttcttacctgtcttggccagctgtgaaaatgaagagctgaccccaaccactgcttgacatcacatgaaaacatgtcctgactgaaggtctcccagaagagttccaggcctatttgcctgatgaattttcctgtttcattatttattaaaatgctattcagtaggaagctgaatttgatgatagtttgcaatgttgcatttttattggaaatctttggctgtatttagtttccttggtgtaagttgttacgtgatctcagcataattgttcaggtcagagcacttttgtccttttgtggtagttctgaaactggcccttggccagatttataagtgtatctacaagaagtatgaaattgctagatagtattatcagtgatgaggtacggaaatatcgggcatgagactatctgactctggcagtaaaaagactgtaactctgtgactttgcctccttttcaaatcagtacctcrtatttactttatatgctaaagagctggcttcaaaccgtcaaatggtacatgcattaacatggagaaggtttattttggaagaatctcatgtagaaaaggcaacactttcttttaaaattttgacttctaaatcagaggaaaaatgtgtcatactcaaaaatatatatccctcatttaaaacaaaagagaaagacaggtattgttctaaatgagatattcctgggtaagtcagatatcacacagtaatcaataagtgctaggattacaacagtatacttggtcatataatacacatccgcaatattgatactgggatttgatagttatgcttttgaaaatcactacctggagtcatgattttggcagcagtttctcaattcgaatttatggacttcacaattgtaaagttgctttgagtagttattttttaatcccctgccctcaaatccttttagcccaagtttatcccratcaccgtgacaagattttcatgtcacaatagaagactcttttctgtactagtgctttaactagcaaaacagcctttgtttgttgaaagcctctgaaagggctcagaatgcctacggaaatgagtcatattgggtgtaacaaagtggatgaaggggagaattataagagagaactatgaaaagctgggcaaaaggctgctygtgcaggatcttctatgtcctggtaaaacttgtatttcatctgaagtacagtgggaagccactaaaaaatattaacgatagaggaagggaatgagaagaaataatataatcagatacacattttaaaatttttccttctggatgttgtttggcagttagtttggagggaaataagagaagcgtaagagccagtaaacagggtatcacagtagtccaaagagaagagaggaaggtggtttgaacttaggagcaagggattcgaatgcctagagttgatatccatttatacacacaataatatgtcttggtattagattggatctaaaggataaaggagtaggaagaatcaggatgagagccggatctctggcctaagcaaatgtttaaatgctgatttcatttaaataaaatcgggcaagtctgtgggwagaagaattggctgggagtaaaaagagatagggttcttgtgaaactcaagttcgttgttgtctgttggatttgagagcctcataattcatctaggtggttaaattctagtctgggcttaagggagaggggcctttactgcctctatcttggaaacaagacaactgttaagcaagaaggtacctctttagatacaaagtagataaatattattagactcaatcattgtattgaatgatctcacgcttcaatgggagagattaaatatgtatacacatgttaaatgttcccatagtaaagcctagtcttatgtttattgtaatgaatttgggcatattaacttatgaaagagcaagaagctagggattatattagtctaaggcgtctttggaggaatcatactacaaaattaggtgctgacaattgacctcaaagacttgaccacatagacaaaaaaaggaagatagtttgccctttaacttcctgggcatggcactagataggatgataactcaccctgagttgggagataattgacttcaagcatctttgcagagaaggatgctatgaaatcatttatttagttttctgaccaaaactattgcattatttgcaacagtactaaattaatagtattgatcaaataaaaatagttgcaatattaaaaggtctgaaactattcctacagttaggattaatcccataagtattcgggggagaagagcaccatagaacagaatgttttaaaaactatttttaaattaatattgttttgacaaataattgtatacatttgagggtaggaggtgacatatatatatatatayayacayacacacacacacacacacacatatacaatttagaatgattaaatcaagttaattaacatattcattgcctcttttacctatcatgttttatggtaaaacatttgtaatttactcacctggttatcttgcaatatactgtacgttgtcattgactatagtcatcctgctgtacaataratctaaaacttaytcytcttgtcagaaactttgtatcctttgctcaacaacttttcattccctctcacctgctgccacctgcccagccgctagtaaccaccattctactttctacttccatgagttcaccttttttggattctccatgtaagtgaaacaatgcagtctttgtctttttgtgcctcgcttatgtcacttaacataatgtcctccaggttaatccacattataaaaaatggtaaaatatcctttttttgaggctgaatagtattccattgtgtatatacactgcactttccttatccatttatcttttgatgggcacataggttgatcatggaccataagttttaaaatatgggcaacattggaataaagcattgacggtgattataagtagctgatgttatacagttgtcagaagcaagggcattggtagccctcttgagtaatatgcatctatctaaacccttggtgaaaatttaagaggatgatgaggatctaaatacgtaataaaagtgacatatttttaagtctttggagtatttatttatattaagttcaggtgactaaagtatgatttttttgcataactcaggaaataaattgagccaagtaaacagtaaatgccagagatggtagtaaaaatggagaattccttctctttttgaggttcatcatgttgaatttaaattgaaccttaaaagtgggataatttatgtcaaattttgttaatctcagccatgccacatgcttgtaataatagatagaggtgcaattaaggagtaaagttacatattactgttacatttttccagtgccttaagaatgcctgtatcctctcctagtcaaacatttcaaggacatttctaaagaattaatacaaaatgatataaaattgagtaaagcaatactttatgcagctagatttaatcttgttaaacatgcattaacttattttttggcctatataatctagaatcaacatacggtcatagatctgcattgtatatgtttcaaactcttaagtataaacctaaatctaaaatcatatccctctactgcttgaaaaggccacatcctttaaggccaaaaattaagagagagtggaaagttcttagtttgcctgattaattatctatattccctcctttaaggcaccaatcatgatatatatgtggtctaaatacgttgataaaagccaaccaatataattttcctcttttgggtttgtgtgcaaggaatcctggagattaaatgaagagtacttcgtctttgaagctaacttaaaggcagaatttagatatctgcaaaaatgtggaagagtactcttggcaaggtggattacgtaaggaaaggtatatgggtgtagcaaggcacagggcaattccagggagaaagtgaatatcacagataactgttgagcatttgccatatttatgcacactacaaaatactacagcagtcaaatatgcacgttccttttcctgctctcatatgtcagggatttagttggaaatgctaggaagtgaaagatattgattgaaatgatgttttaaggcatgttgatatgatctcagaatgcatggtgttttgggtatagaaaagtccagaggtaaataaatttgtcagaagacaatagaattaactccagtatgaaatggatgctatttaccttcagagataaaacaaaacaaaaaaggatcaacaacatatgacaatatgttggttgaaatagaacaacatatcgaagtaatttttcttatcccagaggagtcatagagtaacataagtagcatttattggaggcagcttatgaaaaatagttctatatagtattagtattctttcatttaatctttctgtagactggtgctttttttcatttctgttcatcagatgtgaaaaattaaggcctgaaaaaattaaataacttgctcaaaatcagacaattagtagatggtagtgttggcattctgagtcaggcagctatcattttaaaaatgatgaggaagagaaaaagatgtaagaaaggtgacaagttgtcgcagaagaccaacagagaagatatatttgccaatggtgtgttctttgtgttataatttgtatttagaagactttcccacacttaattatgtggattgccaatgttagcatcctgtgtctgtggtataaggtctacttgtaaaaaataagtgagtaactaatatgcactttcagttttttagaataaagtctttacacatttaatgcagaaatgaaaataagtcattggagaatgataaagtttagaaatccttgttacaagggaattacgctctttgagtcgtattttgagaatgtgtttcagagtctggcataacattcattacattgagtggggctctgtgactttgaaaataaaacaaaagagtaggtttgagaatatggaatgataaatatcccaaagcagtgttagcaacaagtctaaatgaatagtttaatgtgcactttcctagccatacagcttacaaagcaaaactaaaaactttcttctgcaaatgtgaactagttcagatgaatattttagaaaattggtgtacaaatggtgatagctgttgtttcaacatttgagaagcagattgaaacacaaaattagctattagcctacagcttaagtactctctaggaagaagaaaacaactgaagctagcaaattgactttcatttgggatgggtgcccatggttctgatgaaactctcatgcagtaacttccaaatctctggggacatatgttcaactgacctttgggaagtagagcaaagagaagctgggcagctttatacaaaatcacccttagcatttcactcagcaaaaccttctccaccagaacacagcattgcatagatttcaaagaaattgaagcctaactgggagaagaacataataattcactcataatgtttggaatactgtttaacacattccaataaagcactggctgggcagggctagattgtgatggagcaaaaaacgtgagaatgagctgacacctggtcaaatcgaaggattgaggattcagggacctgaagataagcctgaatagacagctggagtgagggacaaggaatctggaaattcagtccgagtcagatatattatgagatgtgaggctgcgctggagggtggaagcaagatttggaagagaaaagagtaaacactgtccagaggttccagtgaaggaggagtgtatgggcaggaggatatacaacatgtcttctttagggattaggccttgattcttaaaaatatataatgaaccatcattagaacactctttggccactttacaagaaaagaatgaacttagtgtaggtatggtagtgaggggcttattaactagtggtaaatatagacatccaagcaaataattacactgtattttgttaaacagggacaatagtatgaaatggttaaaggggataggcttgactatatttaattctcatttctgccattactggttgtgtcaccatcaagaaattgtttaatttttttaacatctatttatacttacttaaaagggggaaataatattatcagtgttactgggctgttgttttggatcagggtgttgaaggtcatcatcatctgatgatcactcctattttactaaggacaagcttgtacttaatgccaaagagagaaataaataatgtgaaaaggctgctgctggtgtcaacaatgtgtttgaaatcatgggagagtggatcatgaaaatgaaacattaatctgataattgttacccttttaaaggggaaataaacctttcagggaaataataatatctgataattttgtcctagggctttataatatagtgacttaccattgttatgtttttatgttatgttttcaatccgtaagttcttcaaataactagaaaaacagcaaccactatgttgatttaaatatttcagtattgtgaagtaaaagaattagaaatgcaatggtaattaatagttgtgtgttttaatgtatcatatgcatgtttataattagtgtgctaagattatatatgcttgttcatttaactaatttctaagggagaagttcagatacaaactgtgctttgatgaaaataaaataaaagtgaatgttaggaatctttaatgctatttataatgcatgttggcactttactgtataggaaacatatctggacctaaaatggaacaggaccgagtaatttaatgctaaatttttcattttacatataattcattgaaaaatacatgtatgaacaaagttcaacctgaacactgaatgatctgattgtataacttgcttctgggcatctagattcatgaagctgattccctaataaaggtaagtcattctggaataagtgtatccccttctagtaatttctaaacaacaaattgcatttgcaatatattgtcatgggttataactttagtctgtgaaaacaataccatgatactttttaaaaaaaaatttagaaaataaagtggaacaaaaaagcagaaaaccaatggcagcactaacagtgaaaaagtcgatctgctctaagtgctgcctcatcacccttgcctattaggcaaattatttttattgatgcttatagaagtaaactaatattcattttatttggacatcttatatctaatacccaattttctttcatcattaaaactttaaaatcctacaratatttactttaatagaaaatatactgtgaaattagacatgatagactctggggaagcatttatttgattaggaaaggttagttcaagctgttctttatgaaggaatattaataaattcagaagatgatatatttacgactaatatattttatatttttaccaagtatgtgaagtcaatttataaatcacagaaaattatcaagattaacaccatttacaactattgtatatattaagtttttatgtgctatatttgacaactttagatatttactataaattaaatatcaagttcattctgaatagatgtgtacaaataaagtgattgtaaatttattgaataaagtggaataaagtagtagtagtatttagaataatatactgaattaaaaaatgatttcttccaacattcatagtagaaagcattattaatatgataaatttggccggrcacagtggctcacacctgtaatcccagcactttgggaagccgaggcgggcagatcacgaggtcaggagatcgagaccatcctrgctaacatggtgaaacsctgtctgtactaaaaatacaaaaaaaattagccgggcatagtggcgggcgcctgtagtctcagctactcgggaggctgaggcaggagaatgtgtgaacttgggaggcgaagcttgcattgagccgagatcgygccactgyacttcakcctgggmgacagagcaagactccatctcaaaaaaaaaaaaaaaaaaagataaattaagctaaattcttcttgacatattagatgatttgcaaaaggatgccaaattttggtggtaatgacttttattcttttacttttcaaaaaatgtaggtaaaccccctgtgcaaccatgatcatgcttcaagtacttagatcgtttttcttttgaattaactcttgtatattcaacagaacacttaattgttttcttttttttgttattattatactttaagttctagagtacatgtgtacaacatgcaggtttgttacatatgtatacatatgccatgttggtgtgctgcacccattaactcatcatttccattaggtataactcctaatgctatctctccccactcaccccaccccatgacaggccccagtgtgtgatgttccccttcctgtgtccaagtgttctcattgttcaattctcacytatgagtgagaacatgcagtgtttggtttttttgtccttgcgatagtttgctgagaatgatggtttccagcttcatctaagtccctatgaaggatatgaactcatccttttttatgcctgcatagtattccatggcatatatgtgccacattttcttaatccagcctatcattgatggacatttgggttggttccaagtctttgctattgtgaatagtgctgcaataaacatacgtgtgcacatcttcttatagcagcacgatttataatcctttgggtgtatacccagtaatgggatggctgggtgaaatggtatttcttgttctagatccttgaggaatcgccacactgtcttccacaatggttgaactagtttacagtcccaccaaaagtgtaaaagtgttcctattcttccacatcctctccagcacctgttgtttcctgactttttaatgatcgccattctaactggtgtaagatggtatctcattgtggttttgatttgcatttctctgatggccagtgatgatgagcattttttgatgtgtctgttggctgcataaatgtcttcttttgagaagcgtctgttcatatccttcgcccacttgttgatggggttgttttgtttttttcttgtaaatttgtttgagttcttcatagattctggatactagctttttttcagatgagtagattgcaaaaattttctcccattctgtaggttgcctgttcactccgatggtagtttcttttgcygtgcagaagctttttagtttagttagatcctataactaaactattttagagttgatcaacaatttctgtatatgcaaataatttaagtgtctatactaatgtaagaatatccatgacaatattttttatcttattgagaaatatatatcaccattttattaaagatttaagctttcttagatgatttcatctaagaaataatacaactaagaaacaattaattagattagatctcatctaatatmgtttagttataaacatttgcatatctatattaaatactttccrtgttttcagcttttttgtatttaatgtaaaacccacatattgataacttgtttaaaatgcataaaatcaacgcctttgatttgcctatttaataaataaaattgaactctcagttcattttaattaaaacatttattttatgtttaattttctacactcagtgctgtgttatacataaaaataaataccactgcctgttcattttggaaccaaagaagggttgtatgtaaattaataagaattagacattgtcatttctctcaggagctcaggggcaacttaaagatattctcagttatttcataactatcatttaaattttctttttaaaagtttttgtttatatttggcacataattttacatgtwtatagggtacagtgtgttgtttcaatacatgtatacattgcatgatgatcaaatcagtgtagttttgatctatccctcaatgtctatccctcaatccttgatcatttctccgtggtggtaactttcaagattttttgtctagctaccttgaaatatgcaatacattgctattagctaaagttaccctattatgtgatagaacatcagaacttattcttcctctctaactgtaactttgataaaccaacctctaccctaccactcccaccttctcccttacctcttcagcctctacctaaacactattcaactctccacttctatgagatcaacttttagaaatttcatctattagtgaaatcttgcagtatttgcctttccgtacstggcttatttcacttgacattttatcctmtagatttatstgtgttgccacaaatgacaggatttccttctggttttaatagycgaatagcattccagtgtgtaaataccacattttctttatccattcattggttgatggatgcttaaattgcttccatctcttgactgttgtgaccagtgctgcaatamacatgagaatgcagttatctcttcagcakactgatttcattttctttggataaatacccagtartgaaattgctgaatcatatagtagttccatgtttaattttttgaggaacttctatactatttttctataatggatgtactattttatattctaactmacagtgtataagagttcttctttctccacacccttgccmacatktgttatyttktgtatttttgataatagctattctaactgggataaggtgatatcttattatggtttttatkygcatttcttttgatgatgagtgttgttaagcgtttttatcctatatctactggtcatttgcatgtcttcttttgataaatgtctattcatgccctttgcccatttttggatgggatttcttttttgctattgaattgtgtgagttcttcatatattctggatgttaaccccytgtcagatgcatagtttgcaaatattgtctctcattatgtaggctgtaacttcagtatgttgactgtttgctttgcagaagtttcttagttttacataatttcatctgcccatttttcttttattgcctgtgcttttcaggatctatctgaaaaattcttcttgaatcaattttgtgaagtgtttcccctatgcttttttgtaatagttttgtagttacaggtcttatatttgagtctttaatccattttgagttcatttttgtatatgtgagatagggtccaatttcattcttctacgtgtggatatctagttttcctgggaccaattttctttaattgaatggactgtcctttctccaatgtgtgttctcagcacctttgtaaaaagacagtttactgagatgcatggatttgtttctggcttctctattctgttctgttggtctttgtgtctgtttttatgtcagtaccatgctgttttggttactgtgggtttgtggtatattttgaaatcaggtaattggatacctccatccttgtttttttgctcaagattcctttgactattctgggtcttttgtggttccatacaactttaggatwgctttttctattttttgaatgaatgccattggtgttttgataaagattgcattgaaattatatatcaccttggataatatggacattttaataatattaagtcttccaatctataaatatgtaatatctttttatttgtgtctgcttcattttttcattagcattttttcattactgtkttatagwttttgttgtagtgatcctttacccccttgattgactttattcttagggggatatttttggctattataaatggggtaactttcttgatttcttttttacatagtttgctattgccttagraaaaatgcttctagattttctgtgtttattttgtaccctgcaactttactgatttcacttactagttctaacagttttgtggtggtatttttagtattttctacacatataattatgtcatctgcaaacagggacaatttaagttcctttttaaaatttttttaaactatactttaagttctgggatacatatgcagaacgtgcagatttgtaacataggtatacatgtaccatggtgggttgctgcacccatcaacctgtcatctacattaggtgcttctcctaatgctatcccttccctagcccccgagcccccgacagaccctggtgtgtggtgttcccctccctgtgtccatgtgttctcattgttcaactcccacttatttgtgagaacatgtggtgtttggttttcttttcttgtgttagtttgctgagaatgatggtttccagcttcatccatgtccctgcaaagggcatgaactcatccttttttatgtctgcatrgtattccatggtgtatatgtgccacattttctttatcaggtctatcattgatgggcatttgggttggttctaagtctttgctattgtgaacagtgtctcaataaacatatgtgtgcatrtgtctttatagtagaatgatttataatcttttgggtatatatctagtaatgggattgctgggtcaaatggtatttttggttccagatccttgaggaatcgccacactgtcttccacaatggttgaagtaatttacagtcccaccaayagtrtaaaagtgttcctatttctccacatcctttctagcatctgttgtttcctgacctttaatgatcaccattctaactggcatgagatggtatcttaytgtggttttgatttgcatttctctgatgaccagtgataatgagctttttttcatatgtttgttgacagcataaaggtcttcttttgagaagtgtctgttcatatccttcrcccacttttttgatagaattgtttgttttattcttgtaaatttgtttaagatctttatagattatggagattagccctttgccagatggatagattgcaaaaatgtttacccattctgtaggttgcctgttcactctgttgatagtttcttttgctgtgtagaagctctttaattagatcccatttgtcaattttggcttttgttgccattgcttttggtgttttagtcatgaaatctttgcccatgcctatgtcctgaatggtattgcctagggtttcttctagggtttttatggttttaggtcttatgtttaagtctgtactccatcttgagttaattttttataaggtgtgaggraagggtccagtttcagttttctgcatatggttagccagttttcccaacaccatttattaaatagggaacccttaacacagacaaatggaaaatcattccatgctcatggataggaagaatcaatattgtgaaaatggccaaactgcccaaagtaatttatagaatcatgctatccccatcaagctaccattgactttcttcacggaattagaaaaaactactttaaatttcatgtggcaccaaaaaagagcccgcatagccaagacaatcctaagcaaaaagaacaaagctggaggcatcatgccacttgacttcaaactatactacaagtttacagtaagtaaaacagcatggcactggtaccaaaacagatatatagaccaatggaacagaacagaggcctcagaaataacatgacacatctacaaccatatgaacttcctttttttttttttttccaatttgaatgtcatttatttctttctctggccaaattgctgtggctaaractcccaatagtatgttaaccaaaagtggtgaaagtgggcacctttgtcttgttccagatcttaraggaaaaactataaacttttccctattcagtatgttattagctgtgggtttatcatataaggcccttatgttttgaagtatggtatttctatgcctaattcattgaraatttttattatgaggggatgttgaattttgatgtttgatttttctgaatgtattgtaacacatgtatgattcttctgtccttgattttgttaatgtgatttataaagtttatttctttgtgtatgatgaaccatcctttcatccctgggatgaatcccacttaatcgtggagtatattctttataatatattgtcgattctggtttgccagtattttgttgaggatttttgcatttatgtttattagtgatactggcctgtagtttgttttgttgttgtgttcttgtctggttttggtatcagggtagtgatgaccttgtagaatgagtttgaaaatattccctccttttaaagtttttgcgtgagtttgagaagaattggtattagttcttttttttaaatgtttgttagaattcaaacctgaagccattaggtcctgggcttgtctttgataggagagtctttcagactgccccaatcttgttatttgttattaattggctcagatcttccattacttcatgatttgatcttggtagcagttaggcaagagaaaggttgtatttgtccaggaatttacccatttcttctaaattttccaattcgttggtatatagttgttcataagtatctattataattatgtgtgttggttatagtaccttctttttcatctctgattttatttagttgagtttttactctttgtttttagtctagctaaaattgtatctgttcrtattttcaaaaaataacactgttcatyggtctcttatacgtttttatttctatctcatttatttctgctctgatatttgttatttcttcccttctactaattttgggcgtactttgttctttttcctttgtcttgagctataacattaggttgtttatttgaaacctttcttcttttttgatgtagaattatgttgctctaaaattttctcatagaactatttttgctgtatctcataggttttggtatgttgtgtttccattttcattggtctcaaagaatttttacactaaaaataattcttcattgattcattcatgttgtcaaatgtctacgtattagagtttctaacattccttttgtcatttattcctggttttattctactgtcgtgagaaaatataatggatatgattttagctttttaaaaaaattgttaagacttgttctgtgacctaaagtatggtctatactggagaatgttccatgtgctgttaagaagaatgtatgttttatagctgatggattgaatattctgtaaatgtctgttaagtcaatttggaaaacagcacagtttaactgcagtgtttctttgttgattttctacctgaatgatctttacattgctgaaaatggggagttgacatctcctactattattatattgcaaccaatctctccctttaggtctatgtgtatttgctgtatatatttgggtgctctggtgtaggatgcatacatgtttacaattgctatattttcttgctgtatggatgcctttattattatataatggcttaagtttgatattgttgtcattcctctcttaaattttatctgaaacacatatagctacttacactctttttttagtttcagtttgtgtggaatatctttttgtgtcacttcagtttctatctttgtgcatctttaaaggtgaagtagatttcttgcaggcatcatttatttgcacctttttaaaaaatgttatatagtcactctrtcttttaattggacaatttaattcatttatattcaaagttattgttgataggtaagggtttattactgatatatttttactcattttctgttgttctttttttgatccttactatctttgtggttaaatgattatctttattagcacatcttgattctgtattatttttaatgcatctattataagtttttgctctgtggttatcatgaagcttacaaaaaaattatatagttataacaggtcattttaagctgataccatcttaactttaattgcaaagagaagaaactgaaacgcaatctacagttcaaacaccatccctccacacttttactttttgatgtttcaatttacataattttatattatatatctcttaaacaattatggtagctattataattaataatttttgttttagtcttcatactaatgatagtagtggtttacaggccacaattacagtattggtgtattcttaatttgtatgcttttaccacagagttttatactttcagatgttgttttgatacatgttagaatgttttcctttcaaatggaaggactccttttagcatttattcaaagacttgtctgttagttatgtatttccttagcttttgtttttctggtaaaatcattccccttcatgtttgaaggatagcttttctgggtataatattctttgttgaaaggtttttttgtgtgtgtgttttgttctagcacttctaaaatattatcccagtctttcttggaaggtagggtttctgctgaaaaatctgctggaagctctattggggctctgttgtatttggtatacttcttttctcttgctgctttcagtattctttgtcttcaatttttaataatttaattatgatgtgccttggtgaattcctctttggattgaatttaattgttgacttctgagctttctatacctggatgttgttgttattctccatatttggaaagttttcagccattattgtcttaaataatctttctaggctgtttttttcttttgtctccttcagtaatagaaaggtttattccctttatggtgtttcataatgcttgtaggcctttttcmctctttcttggtctttcttttcctcttctcattggataaatttgtgtgttctgtcttcaagctcactgattctcttctcttttggtcaagtctgctgttgaagatttctggtgaggtttttaattcatttattgtatctataatataaaatttctattttttattgcttttgtcaaatttctgcttttattcctaggttgtttttcttaattttctatamatattttcttgtgattctctgcatttctttgagtattattctgaattctttgttagatatgttatagatctttaattcttctggctccattactggagctttgttaattcttttggtgaagtcatgttttcctgattttcccttgtgtcttcatattcattcctgtgcatttgctgaaatagccacctcttccatctattgcagttgttctttggtggttttagacttttaccaattgttaccagagtttaatcatgggcccgtttgttgcttcgaattctagggagaccttatagtgagcatcagaactaaaatatggcaccagaacttactcactgcccttctgctgtttcccatgctgaggatgacttattgcagtctgaagaaaacttaagcacacatcagaatttaattggtaaccttttaggttttgcaagttaggggattcttgacacaaatacttaggctttgtgaggaacccagccagggttttgggccttcacatatactaggctccctttagcaccaagataccaggcagcattctcagcatggcttcccaactgataggaaaacagagcagataccaagattttcatgcttgtcactgcaatcagtgtccccagtcttctttccaatttaccccacatcattgagccctgttggccctcccattgcttcctgtggaatgaaatcagtttggccccccatgaagattcccagactggtgaggagattaaacatccacctttatttcttcccaagaaactgtgagtctaaggaaattctctgagagtggtgttatgcctgcttgggagacgtgggcgtttaccagctgtggcttctgtcatttttgtggctcagggtatttttgtgcttcttttccaagttcttgtgaactcaaggtggcattcttgcctttgaatactttctaggtgtacttttgttgaggggagtaatgctgagggatcttctatcctgctctcttgctgatgtcactcctcttaattttcttttaagtattgttgaatacaaagtcttgttgcctactgatgtggtttgtctctgtgtccttacccaaatctcatgttcttgtaatccccaatgttggagattgggcctggtggcaggtgattggatcataggggaggtttctcatgaatggtttagcaatatctctcgatgctgttttcatgatagtgagtgggcgaattgtgagatctggttgtttaaaagtgtgtagcaccttccccctcctcttcctccttctgtgaccatgtaagatgtgcctgcttcctcttcaccttccaccattattgtaagtttcctgaggcctccccagaagcagaaaccactatacttyctgtacagcctgtagaaccctgagccaattaaacttttctttataaattacccagtctcagataattttttatagcaatgaaaaaacasactaatacatacctttaatttttctaattaaaggactaatactaatacctttcattagacctttaatgaattatagactaattctaattatagactaattctaatacatttaatttttctccatagaattattactaattgttattactttgctatagaatatccagataaagtgtttaatttcctttaatttttttttgtkttttttgagacrgagtcttgctctgtctccaggctgkagtgcagtggtgtgatctcagctcactgcaacctccacctcccaggttcaagcgatyctcctgcctaaacctcccaagtagctgggactacaggcatgcatcgccacgcccagctaatttttgtatttttagtagagagggggtttcaccatgttagccaggatggtcttgttctcttgacctcatgatctgcctgcttcggcctcccaaagtgctgggattacagatgtgagccaccgcacccagccagtgctaaatttaatacattgaaggagagattcatttctgacagaacatggaacttaaaatgaatatgagtcagcctttcttactacatattgtagattgatctcttagtgttttgatcgacagctagtatctcagtcgtaccatagatcagttctcatytctgatgccactagtgtcacaaaaattgatttgccattactctgttacctctgatctttgaagtggtagggtattaaacttttctattggtgagaaacataattttggcacagttatgtttcaaatatatgttattgattgcaaagagaatgaatctttacacaatgctaarcaaacaaatacacataccaggtagatagtgactcagtgatatcagcattttacatactaaattattgcttgtagtctcagaaaatagtatttaatccctaaagtatacctttaaaattagaaaagatagtatggcaaatttagtaacttttaataagggctcaatataatctgttgctttagaattccatcactgtgcagaaaattgaccttattttgtgcatgtttcatttttcaaattgattttctgtattttacctctgtaattactacatatgtttcgaattttgtcttcagtcatttcagctaattgaatgtaaaatttatatgatggttatattgaaaatgatttaaaattattggttggtgaaattgctgttatattggtattgatatacaagcaataattaccttactttgtagagtaattacaaggatgatactcctctacttatagttgtgggagtttgattcatattatattttttatttgttgcgaattttattttcaggtttatgcatttattctgtgtgatttttggcatcctggaaacctgtgcccactatgatattttttaaataccttaaaaaattcttcactacataatctgcaagactgaagttctagtgtctttgatttattcttcagttgtttgcaatgtggttggaatttatggccccaaaccataatgtggaaatgagaaacaacactggaatctacattcaagcttgggccctttgctcttttctcagaggcttatccaagcacacagcgagtttattatcccttttcatcttgatgggacagcttaaattgactaattcccagatgcgtacaaatataagtaaggggaaaatgttacttaaatacttcgatttattttttttttgtsgttaaaataaaaacaactgctgctatcaagagaagctaggtatatgtttctttaacttttgtgtgcataagaatcacctggagagatggttcgacacagatttctaagtataacagtcagagattttgattccgtacattgagcagttgggtgctttagaattttccttttggattagctacaagttgctgatgctacctgtacaaggaccatataatgagtagccctgtgatggatgataagcaatcagaggtatcttcctaatgtttaaaactttgaggaaaatgggtacattcattaagtaggcacacaaaatatcttccacatatttggatgttaatgataaagagaacttctagggtgcaaatctggtggtaactatgctgaacatatattttttcacagacattttacattagaataatcctgtgagattcttaattaccaaaactcattggacttcaaatggaagttgcatttattaatgattagttatcaagaaaattatgtgaattactgattgttttatagagaagattgttttaaaaagcatgtttgatgtatacattaaattttttgctaaatgtccttggggttgtggggtattgtaaatcaaatttacattaagtggatgattaaaattaaaagctgatttttaatctgttttctaataattcatcacaaatttaactaattaaaagaaaacttgctttcaatttgtaccagttgataactttttattgatgtactaaatcttgtaaattggttataactatttgtgaataaaatctcataacatatcagaaaaatggactgtgggttccaataacagtggattatccagttgcaaattagcgttttaatgagaactaccagaaaaactggttaatattttttaaataaaaataaattttacaacacaatgaccatggtagggagcacaggagaggcccagatgctggatttatcttgcaggtaattgtcaatttgcacgtgaaaattaccaggctaagaagccggaagaagttttagcagtcttcaaatactatgatgttcagagtataccaagtaggagcttaactacccaagctttcaattgataccactaaagtgttacatcttggaattgagattgtaatgggaagacttgtaagatggctcccagtgacccacattttttgtcattccctccctttgagtatgagaggacctatggatgtgatgggatattataactgtgactagattcaattttgtgaccaagatgaagagattctgcagatgtattaaggtcccaaatcagctggattttgagttaattagaaaggagattatcttaggtgcacctgatttaataaactcttcaaggagtgactgagacattgcttgtgagagagacgctcttactggccttgaagtagtaagctgccatatcataatagggccctgtggcgaggcactgtgagtggcctttagactttgtgagcagctgtcaactgacagccaacaagaaaacagggacttcattcctacacctgaaaggattgaatttgtcaccaatcrtgtgagctcaaaagataattctaaactccagaaaggagcaaggcctggccaacaccttgattttggttttgtgagcccctgagctgatggcattgataaactgcccaaatgccttacccatagaaactgtgggaaccttaaatgggaaaatgaaaggttgcgattattctgtatagttcctttcatttctaaacattatgttttcaagttgtgttagtattatattctgaattgagtttgttagaattgattccatatgaggaatatgttgtttattcatcaagaaggaatttatatacttaggaaaaggcctagaaatatgttcaccaaactctcaaaaattgatattatagttacattacatacctatgttagagtataggataaagaggcgatggttgggagatagagaagggaatgctaacattttgtttatgcacttctatactttagattttttgtatagaaggagcattgtttactctttactgtttttacacctgaatatcaactttaagacagcaatacaacacatcagggacaaaattgtttccatatatagtcttaggttgtctattaccaactatggcctaatctagacttgatgacacattaggaaatctatcttgtattcaacgcaaagatagaacccttcatatttccactcctattccatccctacccctccgtcagtgccccccaactattctcatggttatcaaattttagtatctggatgttcatcctcaacttgttatttgcttcattatgcttaattagaatctcattacagttggttgggtcaactaaaatttttctctcataagagacaggatcaactcccaaattccagtactattttgaataggagtggtgggagtgggcatccttttctggctctggttctcaaagggaatgcttccagcttttgcccattcaatatgatgttgactatggttttgccataggtggttcttattatttcrattcatatcttttcactcagttctcccttaggartatttgggttatccattatcttggaatataattctatatcattttcctatctgaccttcgtatattaccacttgtgctaacaatttctctctggggttactttttattatattttattttttaaaatctttcattttaggtttaggggtatatgtacatgtttgttatataggtaaattgtgtgttatggagggttggtaatacagattatttaatcacccaggtaataagcayagtaccccatttgtagttttttgatccccaccttcctyccaccctccctgctcaactaggccctagtgtctatctttcccttctttgagtccatatgtacttaatgtttatctcccatttataagtgagaacctgtggtatttggttttctcttctgtgttagtttgcttaggataatggcctctagttccatccatgttgctgcaaaggacttgatctccttcttttttatggctacatagaattccatggtatatatatgtatctatatamctcattttatttatccagtctaccgtttatgggcatttaggttgattacatgtatttactattgtgaatagtgctgagatgaatatacgagtgtatgtgtttttatggtagaacaattattttgggggagtatatactcaacaatgggatygctaggttaaatggttgttctattttaagttctttgataaattgccaaactgatttcaagaatggctgaactaatttatattatgaccaactgtgtatatagtatagtgtaaggaaggggcccagtttcactcttctgcctgtggctagccagttatcccagcatcatttattgaatagaaagtcctttctccattgcttctttttttttcttttcaatttgtaaagaagagatggttataggtgtgcagctttatttctgggttctctatcctgttgcattggtctgtgtgtctgttttgttccagtaccatgctgttttggttactgtagccttgtagtatagtttgaagttgggttatgtgttgcctgctgcttttttctttttgcttaggatagctttggcaatttgatgtcttttttggttccatatgacttttaaaatactttttaaaaaaaattctgtgaagattgtccactggtagtttgctaggaatagcattgaatctataaattgctataaggtgttatggctttttttttttttgaggcggagtctcactctgttgcccaagtgcagtggcatgatctcggctgactgcaacccctgcctcctgggttcaaccagttatcytatctcaccctcccaagtagctgggactacatgtgccaccaccatgactgcctaatttttatagttttagtagagarggggtttcaccatattcatcaggctggtctcgaactcctgacctcaggtgatccacccgcctcggcctcccaaggtatgaccattttaacaatattgattctccctatctatgagcatggaatgcttttccttttgcttgcatcatctctgatttctttgagcagggttttgtaacgcttgtagaaatctttcacctccctggttagctgtattcctgtgtttttgtggttgttttgtggttattgtgaatgggattatgttcttgatttggcactcagtttggacattgctggtgtatagaaatgttactgagttttatacattgattttgtgtcctgaaattttgctaaagtgttttttaatcaaatttaggagctattgagcaggaattatggatttctcaaggtatgaaatcatatagttgtgaagagagatggctttacctcctcttttcttgtttggatgcctttatttctttctcttgcctgagtgcccttgctaagacgcttccatcttttgcccattcaatatgatgttgactatggttttctcatagatggctcttattattttgatgtatgttgcttcaatgcccagtttgttgagggtttttaacatgaaggaattttgaattttcttgaaaaccgtttccgtgtctattgagatgaacatgtgttttttgttttagttttgtttatgtgatgaatcacatttattaatttgcctatgttgaaccaaccttgcattcaagggtaaagcccacttgatcagggtggattagctttttgatgtgctgttatttggtttgctagtattttattgaggacttttgtgtctatgttcatcaaggttattggcctgaagtcttctctttttgttgtgtctcttccagcatttcatgttaagatgatgctagcctcttggaatgaattaggttagaattccttctcctcagttttttggaacaatttctgtaggaatggtaccagctgtggttcatatatctggtagaattcagttgtgagtcaatctggtccaggactttttctgcttgttaggctttttactactcatttatttttgatatttattattgatctcttcagggtttcagtttcttcctggttcaatcttgagaatatatttttcaatggaatattatatatttcttatatcttttttagtttgcatctatagaagtattcataatagtctctgagggtttttttgtgtgtgtgtgtgtatttctatggggtcagtgataatgtcccctatgtcatttctgattgtgtttatttggatcttctctgtttttttctttattcatatagctagtagtctagcaatcttatttattccacaaaaacaaacttttcgttatgtgaccttttgtattttttttctcaatttcattcaattcagatctgattttttaaaatttcttttcttttgctagtttttgggttggtttgctgttgtttttccagttcctcaagctgttaggttaggttgtcaatttgaggtctttctaactttgtgatgtagctgtgctgtaactttcctcttaatgctgctttagctgtggccctgagattctggtatgttttgtctttgttctcactgttttcaaagaaattcttgatttctgccttaatttcattgtttacccaaatgtcatttaggaacaggttgtttaattttcatgtaattgtatggttttgagtgatcttcatggctatttttatagcgctgtggtctgagagtgtggttggtatgatttcagcttttttgaatttgctgagaattgtttcatggctgattgtgtgtttgattttacagtacatttcatgtgcagatgagaagaatgtatattctgttgtttttggggtgaagagttctgtagattatctgttaggtccatttggtcaagtgttgtrttcagttcctggatatttttgttagttttctcccttgatgatctaatattggcagtggggtgttgaagtctctgactgttattgtgtggttatctaagtcttttgtaggtctctaaaaacttgttttatgaatccgtatactcctgtgttgggtgcatatatatttaggatagttaggtcttcttgttgaattgaattatatgcaattatgtaatgtgcttgtctttttgatcattcttggtctaatgtttgttttgtcttaaattagaatagcaacttctgatatttttaattttacatttacttggtagatttttcttcatttctttactttgagcctctaggtctccttgcctgtgagataggtctctttaagacagtactgtatagttgggtgtttattttttatccaacttgctgccactttatgccttttaattggggcatttacccagtttgcattcaagattaatgttgataagtgggtatttgattctgtcatcatgttgttagcttagtattatgcagactggattgtgtaagtgctttatggtgtgagtggactatgtacttagttgtgtttttgtggtagccagtaacagtgttttatttccctatttaggactttcttaaagacctcatgtaaggcaggtctagtgctactgaattctcttagtacttgcttgtctgaaaagaattttatttctccttcatttatgaggcttagtgtggctggatctgaaatttttggttggaatttcttttctttaagaatgctgaatatgagtcccccatcttttctggtttgaagggtttctgctgaaagtttcattgttagcctgacggggtttcctttgtaggtgacctgccccttctctctagctgcctttattttttctttcattatgaccctggaaaatctgataagtatgtaccttggggatggttgtcttgcatagtatcgtgcaggggttctctgtattttttgaacatgaatattggcctctctggggacatgagagaaatttttgtggactgtatcctcaaatatgttttccaggttgcttgctctccctctctctttctgccatgtcagtgtgttatagatttggtttcttcacataatctcacatttctctgaggttttgttcattcttttttatttgtttatatgtctgattgagttaattttgagaactagtctttgagctctcagattgtttccccagcttggtctgttctgctgtttatactttgtgattatattatggaattattgtattgtttttcaattctatcagattcgtttgtatctatcttaaaacggccatttcttcattcagctcctgtatctttttattgtatttcctggattctttggcttgggttttgactttctccaggattttgatgatcttcattcctgtgtatattttgtattctatgtctgtcatttcagcctggtgcagaaccattgctggggatctagtatgggcatttggaggtaagaagacactggctttttgtgttaccaaagtttttatgctgtttgtttctcatctttctgggctgatgttctttaatctttgaagttgctgtcctttgaacgaagccttttgcttttatcttctttgaagccctttggtgtttgattgtggtatagggtgcctttagtcttctggctttgattatggaagattccagggggccgggaagccccagctgtgtcttctggccccttgaggttatgaccctgacggctagaagtgctgaagcrttcctcataagctggccccaaaactttaaggagaatgctggctgaagcgcttcgtagggttgttggcagtggtatcagtgctcacctgtgcttgccagtcactgtggccttgcagtggagtgcttttgtgtcagtggggtggtgcactagtatgggtgaggtgctgacaggggcgggcacaccggtgtacactgwgctcacttgcgccagagaagaagcggcacagcaggggtgggctgctggtggacacgaggttctggaatctgtkcacgcagttgcacccaccgctgtgcggtgggctgcccacacatcagcgagggcgcagtgctggcaggggtgggcaaggcagcagagtgtgctcatgacagcagcggtggggcagtggrgtgcacactcacatgcctgctgtaggaagagggttggcgaggtcggtcggcccttgcgcacacactgccaaagcagtgaggggaggctgcagtgagaagaggctgtgggtgggctggttttgtcggcagagtccggtctgctggacttctctgatggttaggcatggactgccagcgaagaagctatcatgaaggcatcagggaagcaccctggttaggcatttgatgctgcattgcaagcgggagtgatcaggctggggctccaggagaagctggcagcaggagaggctgctcagatagaaatggctctgaaacatgggcaggaccgccctgttcccaatccgactgtcacccaaatgcaaaagccacttagaggagcttggtgagccttgggggatagacatccctggccatgctccactgcagccattcccccgacaaaccttctgagctatgcccaggttggagtcctggcactggcatctctcaaagcagctctcgctgccagatcaagtggtttgtgggggtcctgaggtctcctgcaactaggattacgggggtctgtggcaagggtgggccactcatcacctgttaaactcaccccttccccagtattcactgggggccaggagtgggtcacagggctcaacagccccatgcaggatttccagattcctcccgcttcagtccagtatcttcatcctccttccgtccactctcagtgccttccctctgaaggtctgcttgaagtgtgctagtattcccagtgcctggctgtgtcaggtcagccatcttggctctttcctctgtttttttttgttgttgttgttttgtttttcttactttttgtctttctgataattctcctttttttttttttttgagacggagtcttgtgctttctcccaggctggagtgcagtggcgcaatctcrgctcactgcaagctccgcctcctgggttcacgccattctcctgcctcagcctccccagtagctgggactacaggcgcccaccaccactcccagctaatttttgtatttttagtagagacggggtttcactgtgttagccaggatggtctcgatctcctgacctcatgatctgcccgcctcagcctcccaaagtgctgggatttataggcgtgagccaccgcgcccagcctctgataattctctktatctacctcacccaaaatatacttgtagtgaaaatatacaatttcccttattgacatatacattgaatagaaaaataaaacaaaacatgcatattatcttctgaaaaatatgtatccattttctatagctagataaatatttaatggaagaaacaatgcctcatatgtgtgggcagaagttaaaaaaggaaaaataaaagatatggtacttcttttctaataccagagtttgaagtgcttccattcttattctactttgttttggttagcaacttaaaatatgaattattgccatcagaataaatctgatttagtgaatttattttaagttgtatttgaaaaaatagcaatatttgttaaaaatttaacaataaaaaattaaattagttacttcctggtctttgataagtcctaaagcatgacatcattgttgaacttagaaaatctctgtgctgatgtaggtacttccaatcattaggtgggattctgccactatatcaataagatgtgtctggtacactgatatttgttgacgtcactgattcctagttctctcaggagtctctctgtggctttccaacattcccctgggagaaaacgcagctatcagtggacaacttttcccattttattctgagtttttaaactattttctgtccacttgaaaatttatgttactcatcacattgccttctcctactttaattatactatgtttggaagaaatgaatgaaaacttaaatttaaatcacataataatatctataggaagcatcttactgtcacatattttgaatgttcctagttgcaattagttttcacccccaatatttagcttctcagtgtcatgattttgtactctcctgcctaaaaagaaaatctacgttctttctttaaattttaaaattatatttatcctaatattttacrtaactaagaacacatgactgtaatcacttgaaaggtattgtgaaaatacgaatgttttaggtacaaactcagaggtgccagacaaaatgaaattaatcagtatctacttgtgttgagcagttaccagcacagatggtaggaaattagcttattctttgtctcaatatattaatgatgcaaaattacatgtatttcactttggacaaatatctgacagactagcaagcaatattttagaaacatgaccccttgattgataatggagcgaagcatttaataccttaagtctaacttaaatttaatacattctatatcattttagatgcctccatctaagctttttaaattgggacattacacaaagtgatcaaaatagagtttcagtgactttgtggagtatagaattagaattttgaattcttcattcataaacacaggggtgatttttaaagattatgtttggcacttaagtcttgatggttgtctcctgagtagcctctaatctctattcagaagatttatattgtactagattgtgttttgtttgtttgtttgtttttgacagagtctcgctctgtcacccaggctggagtgcagtggtgcgatctcagctcactgcaacttccgcctccctggttcaagtgattctcctgcctcagcctccccagtaggtgggactacagtcatgcgccaccatgcctggctaacttctgaatttttagtagagacgaggtttcaccatattggccaggctggtcttgaactcctgacctcatgatccgcctgcctcagcctccaaaaatgctgggattacaggcatgagccactgcgcctggcctagattgttaaatcaacaaatcaagccaacaggatgatttgaggatttatataaaacaactagaaaactgaacaacaataataatttttattttttaatgaaatatatcaataattgaatgttaaaaggtgtgatgtaaatgatcattgttgaaaagaaagagtgatcggtcaagggatttttgttgttgttgctatgggcttaagaaatgaagaatgtggaattaatgagaagttgagaattttctgaggggctgggtaagaaactacaagagatatagagaaatacagtatgtgaacagaaagtagtctttttttcctctggaagattaacatatagacaaaagaaaaccaatgaggaacccacaatcttgggaagaacagataacagagtatccacagggagctgtatcccagaaagggcacgagatgagaaatgsagacttcattttttcatctataaaatgagaatttttcattctctttagtctgactaatatgactttcatggagatattttaaaattgtaaatgatatgaaatataataatagataatactggcattatattagttataaagtaaaatcatatccacatataacttttcacatccttgtatgagtaggaatgggcagtactagctttggagccataatgtcctcattatttgaaaaaactgtcaaaatccactctcttcctaaataattggttaatatgatattaaaatgtaaaatgaagmctactctttgaaaattacacgataagtacaccactttagtacttacttaaaattttgttctttatagattactagggtgttattcataagtgcaacattgagaaatttacatattttcccaagaatttgggaagaatataatgaatgtttttttcttgcttaaaaacactcacaaattaatctgcaacttattattgactataaagttattcgtatcgctctggcaaatgagtaaacccagttcatatctgaaatataaaacttttctttctaaataaagaacaagttttactatttttgaaacatcctatttatggcttatcactacaagttaatatgcacattgtggagtttatttttgttattcgtagggagaattttaggtattgtagccaccttctaaagatctgaaatgagttttagttgtgacatgtattgtctttaggtcctatttatattttcagtttaggtggaaatagttctttttgacacgtccactgcttactttttgttattatcctttgcttacttttatgcctccaaaagtttgttgctttataattgatttgcctttaattcactgtaatcttcattgcaatagaatgaagtaagcttgtcaggtgtgattcctagctctttttatatttaggaattcaatggcagtagcaacttgagaactgtcttttcagaaatctcagtacattcrcaactgcaatctcatacactcagtaaatatatgaacggaaacattttttacatttccatttgttttgttactattccaattgctatttattgtcagggtttattccgtcctgtaaactgccactcccaaccataggagaaggagccacgtttgcaaaatgcaattaaagtagccacttcctccagctacctggacacagtaattgtccacaccttgtccaagctggaccaataagattctctcagaatttggaattgggtctcatagatatcagtctctgcggtcacttgaattaagttattgtaaactcaagatgaaagagttcaaccttttttattagcttgtgtgtataggaaaaaaaacagagaatgccaaaccagcgagaagataagaggatgggggatagggagagggaatgatgcaaaaggtgaggggataagagagagggagagagaatgatgaagagggtgaggggctgagggagatgcagagagaatgatgaagagggtgaggggctgagggagatggtgagagaatggtggaacgggtgaggggatgaggcagagagaatgatgaagagggcgagggaatgagggagaaagagaatgagagagaaggagaagagaagagggagagggacggggatgaaggagagtgagatggaagatggtagaaaggatgagagaggaggaggaggagagacaagaagaggggagaggaaagagaggaagaaggaagcctggaaaaaggagaagaaaggaacaggagagatgaagggagggaatagagagaaataacagggagtagggaggaagaaagataaacgagagagagagattgactgtagtaaagagatgtatgaagagcagaatcaagacattaggtgtcttcagagaaacagaaagaagctgaagcttcatgcytctttttattccttgatgctagtgccagaatcttgacttcactctctgctcttggtttccttgagttccacccatattgtttatttattttgcatcactcattcaaccctaagaaacttaaccaagatataaattaaatcaaagcttactaataccataatttaaaaatcaaatggattgtttaggtttttgaacatttaaagccatttaatatcttgttttgctatagaaatcattaattctttagcatatttgaaaaatacatacatggccaggcacagtggctcacacttgtaatcccrgcactttgggaggccaaggcaggtgaatcatgaggtcaagagatcaagaccatcctggccaacatggtgaaaccccatttctactaaaaatgcaaaaaattagctgggtgtggtgacgcacacctgaggcaggaggatcgcttgaacttgggaggcagaggttgcaatgagccaagactgcgccactgcactccagcctggccacagagtaagactccacacacacacacacacacacacacacacacacacacacacacacacacacaaaagcaagaaaaatgcacatgtttaaatgattttttgttttttttgtttttttcattttattatactttaagttttagagtacatgtgcacaacgtacaggyttgttacatatgtatacatgtgccatgttggtgtgctgcacccattaactcgttatctagcattaggtatatctcctaatgctatccctccccccttcccccaccccacaacagtccccagagtgtgatgttccccttcctgtgtccatgtgttctcattgttcagttcccacctatgagtgagaacatgtggtgtttggttttttgtcctygcaatagtttgctgagaatgatggtttccattttcatccatgtctctacaaaggacatgaactcatcatttttyatggctgcatagtattccatggtatatatgtgccacattttcttactagtctgtcgttgttgcacatttaggttggttccaagtctttgctattgtgaatagtgccgcaataaacatatgtgtgcatgtgtctttatagcagcatgatttataatcctttgggtatatacccagtaatgggatggctgggtcaaatggtatttctagttctagatccctgaggaatcgccacaccgacttccacaatggttgaactagtttacagtctcaccaacagtgtaaaagtgttcctatttctccacatcctctccagcacctgttgtttcctgactttttaatgatcaccattctaactggtgtgagatggtatctcattgtggttttgatttgcatttttctgatggccagtgatgatgagcattttttcatgtgttttttggctgcataaatgtcttcttttgagaagtgtctgttcatatctttcgcccactttttgatggggttgtttgtttttttcttgtaaatttgtttgagttcattgtagattctggatatcagccctttgtcagatgagtaggttgtgaaaattttctccmatkytgtaggttgcctgttcactctgatggtagtttcttttgctgtgcagaagctctthagtttaattagatcccatttgtcaattttggcttttgttgccattgcttttggtgttttagacatgaagtccttgcccatgcctatgtcctgaatggtattgcctaggttttcttctagggtttttatggttttaagtctaacatttaagtctttaatccatcttgaattaatttttgtataaggtgtaaggaagaratccagtttcagctttctacatatggctagccagttttcccagcaccatttattaaatagggaatcctttccccattgcttgtttttgtgaggtttgtcaaagatccgacagttgtagatatgcggcattatttctgacgcctctgttctgctccattggtctatatctctgttttcgtaccagtaccatgctgttttggttactgtagccttgtagtatagtttgaagtcaggtagcgtgatgcctccagctttgttcttttggcttaggattgacttggcgatgcgggctcttttttggttccatatgaactttaaattagttttttccaattctgtgaagaaagtcattggtagcttgatggggatggcattgaatctataaattaccttgggcagtatggccattttcacagtattgattcttcctacccatgagcatggaatgttcttccatttctttgtgtcctcttgtatttcattgagcagtggtttgtagttctccttgaagaggtccttcacatcccttgtaagttggattcctaagtattttattctctttgaaacaattgtgaatgggaattcactcatgatttggctctctgtttgtctgttattggtgtataagaatgcttgtgatttttgtatattgattttgtatcctgagactttgctgaagttgcttatcagcttgaggagattttgggctgagacaatggggttttctagatatacaatcatgtcatctgcaaacagggacaatttgactttctcttttcctaattgaataccctttatttccttctcctgcctgattgccctggccagaacttccaacactatgttgaataggagtggtgagagagggcatccctgtcttgtgcccgttttcaaagggaatgcttccagtttttgcccattcagtatgatattggctgtggrtttgtcatagatagctcttattattttgagatacatcccatcaatacctaatttattgagagtttttagcatgaagggttgttgaattttgtcaaaggccttttctgcatctattgagataatcatgtggtttttgttctttggttctgtttatatgctggattacatttattgatttgcgtatgttgaaccagccttgcatcccagggatgaagcccacttgatcatggtgaataagctttttgatgtgctgctggattcggtttgccagtattttattgaggatttttgcatcgatgttcatcaaggatattsgtctaaaattctctttattgattgtgtctctgcccagctttggtatcaggatgatgctggcctcataaaatgagttagggaggattctctctttttctattgattggagtagtttcagaaggaatggtaccagctcttctttttatctctggtagaattcggctgtgaatccatctggtcctgggctttttttggttggtaagctattgattattgccacaatttcagatcctgttattggtctattcagagattcacttcttagtcttgggaggatgtatgtgtcgaggaatttatccatttcttctagattttctagtttatttttaatggaggtgtttatagtattctctgacggtagtttgtatttctgtgggatcagtggtgatatcccctttatcattttttattgcgtctatctgattcttctctcttttcttctttattagtcwtgctagcggtctatcaattttgttgatctgttcaaaaaaccagctcctggattcattaattttttggagggctttttgtgtctctatttccttcagttctgctctgatcttagttatttcttgccttctcctagcttctgaatgtgtttgctcttgcttttctagttcttttaattgtgatgttagggtgtcaatttgggatctttcctgctttctcttgtgsgcatttagtgctataaatttccctctacacactgctttgaatgtgtcctggagattctggtgtgttgtgtctttgttctcattggtttcaaagaayatctttatttctgccttcatttcattatttacccagttgtcattcaggagcaggtcgttcagattctatgtagttgagcggttttgagtgagtttcttaatcttgagttctaattagattgcactgtggtctgagagactgttataatttctgttcttttacatttgctgaggagtgctttacttccaactatgtggccagttttggagtaggtgttgtgtagtgctgaaaagaatgtatattctgttgatttggggtggagagttctgtagatgtctattaggtccacttggtgcagagctgagttcaattcctgggtatccttgttaactttctgtctcgtttatctgtctaatgttgacagtggggtgttaaagtctccgattattattgtgtgggagtataagtctctttgtaggtcactaaggacttgctttatgaatctgggtgctcctgtattgggtatatgtatatatttaggatagttagctcttcttgttgaattgatccctttaccattatgtgatggccttctttgtctcttttgatctttgttggtttaaagtctgttttatgagagactaggattgcaacccctgcctttttttgttttccatttgcttggtagatcttcctccatccttttattttgagcctatgtgtgtctctgcccgtgagatgggcttcctgaatacagcacactgatgggtcttgactctttatccagtttgccagtctgtgtcttttaattggagcatttagcccatttagatttaaagttaatgttgttatgtatgaatttgatcctgtcattatgatgttagctggttattttgctcgttagttgatgcagtttcttcctagccttgatggtctttacaatttggcatgtttttgcagtggctggtaccagttgttcctttccatgtttagtgcttctttcaggagctcttttaggtcaggcctggtggtgacaaaatctctcagcatttgcttgtctgtaaagtattttatttctccttcacttatgaagcttagtttggctggatatgagattctgggttgaaaattcttttctttaagaatgttgaatattggtccccactctcttctggcttgtagagtttctgccgagagatcagctgttagtctgatgggcttccctttgtgggtaacccgacctttctctctggctgcccttaacattttttccttcatttcaactttggtgaatctgacagttatgtgtcttggagttgctcttctcgaggagtatctttgtggcattctctgtatttcctgaatctgaatgttggcctgccttgctagattggggaagttctcctggataatatcctgcagagtgttttccaacttggttgcatttctccccgtcactttcaggtacaccaatcagacatagatttggtcttttcacatagtcccatatttcttggaggctttgttcrtttcttttcttttttctctaaacttcccttctcgcttcatttcatttatttcgtcttccatcactgataccctttcttccagttcattgcatcggctcctgaggcgtctgcattcgtcacgtagctctcgtgccttggttttcagatccatcaggtcctttaaggacktctctgcgttggttattctagttatccatttgtctaatttttttttcaaagcttttaacttctttgccattggtttgaatttcctcctgtagctcggagtagtttgatcgtctgaagccttcttctctcagcttgtcaaactcattctccatccagctttgttccgttgctggtgaggagctgcattcctttggaggaggagaggcactctgatttttagagtttccagtttttctgctctgtttttttcccatctttgtggttttatctacctttggtctttgatgatggtgacatactgatgggtttttggtgtggatgtcctttctgtttgttagttttccttctaacagacaggaccctcagctgcaggtctgttggagtttgctagaggtccactccagaccctgattgcctaggtaacagcagcggtggctgcagaacagcagatatgggtgaaccacagatgctgctgcctgatcgttcctctggaagttttggctcagaggagtacccagccgtgtaagttgtcagtccgcccctactggggggtgcctcccagttaggctactcgggggtcakggacccacttgaggaggcagtctgcccattctcagatctcaagctgcatgctgggagaactactactttcttccaagctcagttggaaatgcagaaatcacccgtcttctgygtcactcacgctgggtgctgtagactggagctgttcctatttggccatcttggctcctccccccatgtttaaatgtttatcaaaaaataaataaagtttacctctgatctcaccatctggaagtagctttcactaatgttttagtacattttcttttactcttctgtgcatgccagtacatacacacacacacagacacataacacattcattctttatggacgctaatcaacagtatgtacagttttacattgtgttatttttatgtaacaaaatgaagtttcgaaggcatggttttattcagtattatcccacttaattaaccgttgttctatttataatcattctggatttttaatttacacagtgttaattgtagcttcattagtgctatgattttttatttcttcatttagtcaacaaatctttattaattactcactctgtaccaaacattttgacacaactaaccaggaagatgtgtgtcttgaggagattacagctttacagtgagaaagactagtaagcaatactttcattcaattcaggtcactcaattctttgagggaaagggggtaagcaactacttcctagggggtaactgggtcttgaactgagtctcaatatatgaataaatgagaggaggatacatgtgaagtagcaggaaataaattagaaaggcaggcaggactcagatcatggggagggagagagagaaggggagtgaaggcttacttgccattatataaggaatgggtatcactgaacattgcaaatgtgcatggtgttggggggaggggagtaagaacatagtagatttgcattttttaaatgattatataacagtagaagatttatttctcaggcataaaacttaaagtgggaaagttacttgaagtgagaaatctactggaagagtccacayaggaaatgagatctaatattacactactagaggagagagattaasttatggctatattgagaagatagtttatgatatttgacaactagttggctgtcagaaggtgaagggtaaggagagactcaaattgctctcagtcttctggcttgctattattttatgaggtgtagaatataagaggaggggcaagttcagtagaaagtgtggatttgggtgtgtttggcttgtgttccctgttgatcatccaggtagaggtgaccagttgtcagctagtgctgccatcacagaatatcacagactgggtggtataaacaacagaaatttattttctccattttaggatctggaagtctgagattagggtgccagcatgggcaggttctggtcagagtctttttcctgacttgcagtggtcactttytctctgtgttctcacatgcaggagagagtgcaagttatcattctacctttctcttcttataaggtaacartcctgttggattagggccccactcttatgacctcatttaaccttaattatctcctacaaaccctagctccaaatacattcaaaatgtttagagcttcaacctatgaatgaatttgggagagtagggatatttcagtccataacagctagacatcagtcttgaacttagtgacacctaagaattggaagtatagttgggtatgcctcatcatgagaatggataggtacacccaatcgagcatccggagaaggaatggaaaagggtcaagaactgaagcatttatgttgttctcaggagaagagaagatagcaaaaaagactgaaaaggtagggtgaaggagctggaggacaagcaggaakcaggatgcctctgcatgtaaggaagcagataattttatctagagtggaagattcaaaagtattaaatgatatgtagaatatcatattctttttacctatctaaacaactattttacctatctaaacaagtcagatcccaatcttttgctcttgacagcatatggtattgggaatattcactcattcctcacctcttccttgttcctagtttctttttagctattccatctgccttgtttatcactgttctgtgttacattgcttgtagtgaacaatgtcagtaacgtaacattggactacttaacaatatagaaacattgctttgtgtctgcttttccatattcagtagattgatatttttaatgtttgatcatttttaaaaaatgatccctgactagagatagcatgagattagcagggcaaactgtcgaatggacaacatatacctaattaatgaaaatatgttatagatgagtcacacttcagacattaatccataatgggtctctatttggagttgtttgaatgacatgtgagatatataatccaaaagaaataagcttagaactgtttaagcatgacctttcctaggagaaataaaaaataagttaaaaagttattttcagaaggaaatatattaaagtcattcctagagttaagaaaagaatgttaggaaaatatttacaaaataaattgtataatatctataaatatcatgggggataaataaataggaactgggaatatatmtccaggtattttcacagaacagcttaatgacaaagacatttcctaaggcttaaatgtagcattattttgaattgtaaaaagacaacaaattaaacagtatttgttgtaaaaatgtatctcatatattattacatattgcacatcaagaatatttttaaataaagtgaatattatrtactcgcttttttggtaaatattgcctaagtaaaacatacaattttggcttttgctctcaaaaacaagccttgatgtgcacacagttagagctgcgactgtagagcactattgccaaaggaggrtggtaaacttttcagtaatgctgaacctactagcgtgtgagggcatttagcatactgatagtgatatgaactaaaggaaatgttgacactgtcctaaataatattctttttatttttaaagttacttccttgaaggcaaaatcataacctgcataagctcatagtacattaaggcttattattttgcctttgctatattgctaagaaaataaatttggttatcctgataaatttattcttcacaaggccatgaatattattttttcccaatagcttataattttattatagcttgcaagttgattgttttcttttgttattggcttcagtatttccccaagcataaaattttagataagtattccacttgggggattattgtgccatcctcttstttctacttaaagatgcactttttaaaacggcaatgtatttgtccttctcttcttccaaatctcaaaaataytcagtgaattctaataaataatagattaagttttctgtgattattttagccagttcattagggaattggggtcttgcagaagtatataaatkttttaattgtttaacttgactcacatttttattagaatttgtttatattttaatcaaggcttttcattctgctgcattttgtggggcataattatgttttcataaggacatatatgatacaacatatgaattaataactaaacaggagacttagacttacttccaaatcctttttgaggataaaaaaataatgggaaagagcatcacttctagctgtagaacagcaagcaaaaaaactagaaagwttgcagattcacaacttttcatggagtcatcagagaactaaggtcgtagggcaaccarctaacctgaaacttaggaggagacatgagcacttgttttcctggagcagatactgccagatagcagtaagaatttagctgaatttttmagtcgaattggtaaagccagttgtgcactagaaagataatatagcaaccctattgactgcagatatgaggggaatttgcactgcagtcttttctccatagacttcaatgtatactcaatatctataatatttatagatattatacaatttattttgtaaatcaaaaaaaaaaaaaaaagatcgtctacagccctctgaaagcatctcttctgatacaggcatagcataagaagtacaggaatcactccgagaaaggcaggaatcatcacctggatccttctccccttccccctacagaagaaaagccttaaactgctaagtgtaggacagctattgtctgaaaaacagtgtaaaaggaagacctaaagttgagagtggagcagatactgagaaaagaaatggctatccatgtattacccatcctcaacacaagagaatactagaggaatttgaagcctgtgatgccaggtaactttggtaacaacaaatcccaaacctagcttaactcctgagtagaatgattcaaaccgcagatctagcagaaggacagtcattctcatttaaagacataaacactatttactcattctttaatgtcctacgcaagatatttagttttaaacaaaatgtacaagacgtgtacaatggcaagaaaaaaatgggcacactgccaaaataaaaagaattttataaaagcaaagatatgacttacataataaaactgtgagacagaaaagttttaattactgtcattaatattttaaagactcaaatggaaaaagtgaacaatatacacatcacataggtaattttagcaggcagctggaaagcataagaaagagtcagatggaaatactagaactgaaaaacatagcaacaaaagtgaagaatgcatttgataggctcatcaatatggttggtacacctgaggacagaattattatacttgaaaacgggtaaattgagagctgaggtagaatagtgtatttgcaatcttctgggaagtagtcttaaatatgtgtacttgtaatcccagatggagaaacagagaacaggaccaaagaaatatttaaggaaataatggcaaataattctctgaaattaatgacaaagaaattaaggaggatttaatgagaaaaaaaatcaatgagagacaccaaaacaaattgaagaagctcagagaacgatacacacataaacacatgtataaaaaggaacccatattcaaattgctaaacaccgaagttaaaaagaaaatttggaagacatcccaagaaaaagacatattatgtacagtggacttgttatcagaaacaaggcaagtcagaagacaaaagggtgacatcttgaaagtgatgaaagaaaacaactctcaacyccgaattttataaccactgaaagttatcatgatgaaggagaaatgaagatgttgtttgacatataaaartggggagaatttattgtcagcagagcttctatataagaaatattaaaggaggttctttagggatatggaatgtaataccagagttaaacttggttattgatatggtttggttctgtgtccccaccgaaatctcacatcaaattgtaattgccacatgycaggggagggacctggttggcagttattggatcatgggtgcagatttcccccttgctgttctcatgatrgtgagtgagttctcatgacatctggcttttaaaatttgtagcactcccaccttcacttgccctctctcctgctcttctgtggaaagatgtaccttgtttccycttcaccttctgccatgattataagtttcctgaggcctcctagtcatgcttcctgtcaagcctgtggaactgtgtgtcaattaaccctcttttcttcataaattacccagtctcagttagttctttacagcagtgtgaaaacagactagtatagctatacagaaagaagtgaagggcgctgaaaataaaatgaatgaaggtaaaaataaaacatgtttctcatatttttagttgctctagaagataactgaccacttattaaaaagtaatagcaatgcgatatttatttatcttacatgtaaaaataaaatatgtgacaaaatactacagatgttgtgtaggagaagtattgggatatagtgttacaacattcttataatacatattaaacaatataacatttgggagttgactaaagatatgtaacttaaactagggtaagtattagacacattttgaaaaattatgtattgtaagtgaataccagaggtaatatggtatcataaaatatatttaatcaaaaaaagagaagaagaggaaaaaaataaacaacatatggaacaagtagagaacagacagaaagatggtagatttttaatttaacagtgttaataattacattaaatgaaaatagtctaaacacattaatttaaaaactgaatgacagattgggtaacaagagcaagatccaaatatatactgtgtrcaagaaacccacttaatgtgtatggatatatatagaaaagtaaaagaatagagaaagacagattatggaagcatcaaccaaaaaaactagaattgctatattaatatcattagactttaaataacatatattaacaaggttaaacatgaacattaaataatgacaaagaaatcaattttccaagaagacaccttcagtcccaaaaaactatttaaatatatatgtacttaacaacataaattcaaaatatataaggtgaaaatgaatagacttgaaaggataaatagataaatccataattatattggaaggctgtaacagtcctttctcactaattaataaaacaaccaaataggaaatgagtaagtataaagaagacctgagcaacacaataagcacgatcagccaatttgatctaatttatatttatataacagtctaagcaacaatgcagctaaagcaactcttcaaggaaaactttatagatttgatgcttatataatatcagaacagaaaaaaactaaaattcatgatctaatctaccatcctaagatactataaaagtaagtgcaaattaaatccaggacaagcagaaggaaaaactaataaatatagaagcagcaatcaaataaattggaaacagactaatcaagagaatgaatgaaattaaaagctggtatttgaaaaaaggcattaaaatataataaacctatttttgaaagatatacaacacgaactttcactaaaaatataggttatgtgagtagtcctgtttgtatttaaaaatcacttaatgaagaagcctgtaggctcagatagattaactagtgaagtctattaaccttttaagaaaaaaataatataaattctacccagtcacttcccgaaaggagaagtagcactttcgatttatctaatactgaaaccagccacagacatcaccaagaaaagaaaytgccaaccaacacaccaatacctctcatgaatatagatacaagaatcttcaataaaattttaagaaaaatcatctagtagcatattaaaaggatattatattatgagaaaattgtatttatccagaaaatccaaaattgatttaacattagaaaatcaatgtaattaatcatattaataaagaagaaaattcatatgatgatctcataaatgcagaaaaagcatttgacaaaattcaacatctattcctgttaaacttctcaaaatactaaaaaataggaagataattcgttaaccttaaataagacacttattatagaaataactggcatcatatttattagtggaaagctcagtgcttttccactaagatcagaaacaaggtatatgaacctacatttcctttttttttttttttttttttacattgkccttgkggcatgcaaccttactaaaatcacgtatttgttttaggatttgttttatagattgttggggattttctacataraaaccattactgtatgtaaatagatattgggtgckaaagatacagtcacagaacaaacctataccattattattaattaattttcttaaaaaggtgcagaaaattcaatagagaaatgtattttcaatgaattgtgcagaaagcaattagagatctatatctaaaaaatgaacatagacccatgattcacaccttatataaaggttaaatcaaaatgtattataagtctgaatgtaaagcaacatgtaaaacttttgaagaaatacaatatttgtaacttggagttcaacaaattcttagatatgataccaaagtcatcatccrtaaaagaaaatataaatatatttaactttaagaatataaatttttgctcttgagaagacattattaagacaatgggaagcaaaccacagactgggagaacatattttcaagtcaattaattgacaaaggatttatattcagaatatataaagaactcatacaactcaataataattaaaaactatctaattaaaacaaatgaataaaaaattaacaggtacttcaccaaaaaaagacatatgaatggcaaataagcacatgaaaatatgctcaacctcattatctgttaggaaatggaaatttaaaacaaaatgagataccactacacacctattattataactttataaaaactgaaaggggccgagcgtggtggcttacgcctgtaatcccagcactttgggatgctgaggcggttggatcatgaggtcaggagttggagaccagcctggccaatatagtgaaaccccatctctactaaaaatacaaaaaattagccaggcatggtggcaggygcctgtaatcccagctactcgggaggctgaggcaagagaatctcttgaacccggggggtggaggttgcagtgagctgagattgtgccattgcactccagctctggcgacagagcargactccatctcaaaaaaacaagcaaacaaacaaacaaaaaaaaccctgagtgctggggagaacctggagtgactggagccctcagacattgctggagagaatgcaaatggctgtcatgacactttgggaaacggtttggtagtttcttataaagttaaacttactttrtgactcagccatcacactacaaggtatatactcaagagaaatgaaaacttaggttcacacaaaatcttatacgtaaatattatagcagctttatttataatcaccaaaaattggaagcaattaacatgcattcaaccagtgaatgcataaacaaatggtggtataaccttaaaatggacactcagccctaaaaactaaatgaactattgatatacacacacagggtaacaaactacatttttccatttatatgacatattggaaaatatcatgtaaataaaatgttttgaacaaaattagagtcagtaggtgcagttttggtttcacttggctttctatttattattatttgtataaatttaaggcatacaagagcaattttgttacatggatatattgcataatggtaaagtctgagcttttagtataaccatcacttgaatagtgtacgtcgtactcattaaataatttctcatccttcactaccctgtcacactcccatcctttcaagcttttccactgtccattatccacactctgtgtccatttattaatgtacacattgtttagttccgacttataagtgagaaaatgtggtatttggctttctgtttctgagttatttcacttaagataatggcttctagttcatctgtgttgatacaaaagatatgatttcagtctttttatggctgaatagtagtccattgaaaaaatgctcaacaccgctaatcacagataactgcaagttaaaaccgtcgtgaggtatcatcttacaccagtcaaaatggctattattaaaaagtcaaaaaataacagaagttagcaaagataaggaggaaatggaatacttatacacgtttagtgggaatgtaaattagtacaatgtctatggaaaaaaatatgatgctgtctcagagaactaaaaatagaactaccatttgatcaagaaacccactactgggtatattcacttgtatatttatcacagcactattcacaatagtaaagatatggagtcaactaagtgtttatcaatgaatgattggataaagtaaatgtgaagtatatatacacacacacatagacacacttggatttcttattgctcatctcgtctcttatggtatgtgcgtttgtatgtttgtgtgatgcttttattagtaagcattttacattaaaatattatttgccatataaatgaatgmgaataacctgtagcttaattatttttatgtggtataagtatttattagaaatcaaatggacgttgaaatttagtatcatatagaactttaaattaaccccrgaagtaagttatatttcctccacactcgttaatgtcactgcaagttgtttctccatcacagaatataaatgggagtatatagcaaatgtctagcatgctatgtacaataaataatgtatgattaattagtcattttttaagtggaaaattattttaaagtagtttgaactatgatttaatttttaaatacacttaaacagtatgttagattagcaaaggcagaaatattttcatcactttgttatttattgatgcctagaccaatgtttggaacatagtagacctctgattaatatttgttgaattatttattgaatacatttggaataataatacatcataactaaatataacaaaaccatttttctaaggtatactttaggaaaatctagaataaatatgaattttggggttgtagcattgttatattatgaatatggattgaacactcattaataggagagagaggaataaagaataaataatctttgagatgaagatatttccatgtctaatattgtaggtaacaaaaatgatagacttatatcttttagaaagagttacctggctttctattatgtactgcttttctgatgatttcattgctttagtatttttaacttgtttmtaataagagctgattggttatttctccccttagtatatataaatgtagctattctaaataatcatttattaacacaaattaaatttttatttcatttattgatacagtttgccagcgattagtgtccgagttaagaaatactgttatagcaacagcaatttccctagaggacttcttaaatcataaagtgagagtatttcaaattatatttgcttcacttaaatgtatctgttctgaaaatggcaacattgatcccatgatatacctgatatattctaattgcctagaacgtaaaccacaaattctgcattgcagatactatcacagtaaatgctgcttaacttatgcaaaatttatagaatgatgacaaaacaaaagcttctgagaggataagtgtttcaccacaagcggtttctgtatctgactccatttctaaactgtaaatcagccttaaattatcattgagtcctatgatagacactagtaatggtaagaaaatatgccattttaagctatattcttattgacctgtatgtttatatgagtgtgaatatgtgtgtacctgtgtgtacatgtttatgtatgcacaccttttttacacgttattttttaactaaaatattttttctttactttactttactttacaccatcatgcattgttactttgacctctacaacctaacaaatatctgccctctaatccaatgggaaggaacaaaatcctgtaagagtgtaggaaacctgaggatggtctacaaggttggctgcccattggaaacacttgtggaattttaaagagatatcgatatctttgttccacccaaggaattctgattaaaaatttattgtatgtacattggatatctgtatttaaaaaaaatctccccaagtgatcctaatatgcagtaaaatctgaaaatccttcctctagaawacaaaaataaaagtgcctaataaacaatgattactgtgtattctgaaaccagaaacaaccattttcttaaccttttatggtttaaaaaagtatggtaggaaagttattttaaaaggaattaaaggtgattttatgtgacatatgtttatttttttaatgcaatcttcattataatggttttgaattaaggtataacctgtttttcttgtggagtgtatgcaatagaaaatcacccaacttaagagtcagaaaacatgagtgtgtgtggtggttctgccacttcttaaatatattgccttggctgggttctcctataagacttactttcttattgcccatggtagtacaattgttatagcatttcaaaaattaaatggtgtgtttataataaaggctatatataacaaacccaaagctaacatgggtttcccatactgaacaggcaaaagttgaaagcattccctctaaacactggaactagacaaggatgcctcctttcaccattcttactcaacatagcactggaagtcctagccagagcacttaggcaacagaaagaaataaaggtatccaaactgggaaagaggaagtcaaattgtacctttttgcacatgacatgatattagatacagaaaaacataaagactcaaccaagaaactcttggaactgataaatgaattcagtaaagttgtaggatacaaaatcaacatataaaaatcattatcattcatatatatcaacaatgaattagctggaaaagaagtcaagaaagtaatmttttttataawagccacagcaaaaaattacatacctaagattacattttaccaaggaggtgaaagatctctacaattaaaagtataaaacactggtgaaagaggacataaaaatattgtaagatgactaggcacagtggctcatgcctgtaacctcagcactttgggaagctgatgcaggaagactgcttgagcctgggagttcaagacccacaacatagcaagggacaactctacaaattttttttaaaattagtcaggcctggtgtcatgcacctgtagtctcagccactgaggtggcaggattgcttgaacccgggaggttgatactkcagtgagccatatttgtgccacctcactacagcctgataataagaaaagaaagaaaaaatagtaagacaacccacgctcatggattgaaagaattaatattgttacaatgaccatactacccaaagcaatctcaggttcagtgcaatccctattaaaatwtcaatgacatttttcacagaattagaaaaaatattaacatttgaattgaaccacaaaacactttgaatggccaatgccaagcaaaaataacaaagtcagagatatcacattacctgaattcaaaatatatgacaaagggataagtaaccaagcagcatgatattggtataaaaacagacacatagaccaatagaacagaatagaaaactcagatataaattcatgcatttatagccaactgaattacaagaaaggtgccaagaatgtgcgctggggaatgggtacccttttcaataaaagctaggaaaactggatatatgcatgcaagacaacgtaagtagactcctgccacttgtcaaatacaaatatcaactcaaaatgtattaaatatttaaatgtaaggcctgaaaatataaaatcactagaagaaaacataggagtaatgcttcaagacatgagtccaggcaaagattttatgggtaggactatgaaagcataggcatcaaaacaaaaatcagcaaaagggacattataagctaaaaaccttctgtacagcaaaggaaaaaaccgagtcaagacacaacctgcagaataggagaaaatatttgcaaattattagtccaagaagggattaatatccagaatatataaggaactcaaacaactcaatatttcccaaacaaatgattctattaaaaatggacaaaaaaatctgagtagacatttctcaatagaagacatacagatggccaataggcatatgaataaatgttcagcatcactcatcatcaaggaaatgcaaatcaaaaccacaatgaggtatcacctaacctcagttagaatagctattctcaaaaagacaaataataacaaaggctgctgaggatgcagagaaaaatgaagttttatactccattggtgggaacatcaattagtacagccattatggaaaacagtatggaagttcctcaaaaaaactaaaaatagaactaccatatgatccagtaatcccactaatggatatttatccaaatgaaaataaatcagtagatcaaagagttatctttacctccatgcttattgcagcactattcacaatagtcaagatatagaatcaacgtaagtactcctcaacagataaatggatcaagaaaaatgtggtatgtatacacaatggaatattattcagccattaaaagaaggaaatcaggtcgtctgcagctacatgagtgaacctggaagaccttatgttaaattaaatgaatcaggcacaaaaagataagtactgcatgttctcactcaagtggaagctaaaaaaacaaaaatgagtttatagaaatagagagtagaattacrgttgttagaagctgggatgggtagcagggaggagaggagagggagaagttacctaatggatgcagaattacaactagatgggaggaaaaagttctagtgttctgtagcactgtagggtgaatatacctaacaataatttattgtatatgttaaaaatactagaagagaggattttaaatgcctcctacaaaaagaaatgagaaatatttgaggtgatggatatgctaattaccctaatttggtcattacacattgtatacatgtatagggatattgtatgctccatatatatgtacaattattatgtgtcaactaaaaacaaaagaaaaaagtgtctataattattcaggtataattttacactgttatctgtagcttactctggcctcttatgttgacaaactgtgttttttaagttcactttactgaatgacatatttactgttaactcatttcatgtagtttttattaaataattattcaatgcctactacatatctgtcagacacttgataagtgttgaatgcacagtgtcacgtgagacatggttcctgtctccagtgagttattgtccaatgcagaagaaagatacacacacacatgcacatgtgtattttggaggatagggtgaactaaaagtccaggattgcataagtaaaatgtgaaaatgctcaaatcaagaaggtcattgtgagttctttaaagcccaaaccaaatgtgttcaaatctaagtcatctttctgatgtatcttaggcattgaagttttggtgcactgagtagaatacatcgtgattatgaaatgttttcattgggacgtagtataaattaattgataatggtaaagactttgaaatcatattgtcttggttcaattttttcccctcaacacatcagctgtatgattatggataggtttttaacctttgggtttcactgtcctcatatgtaaagtaagcaaatagtgctaatacttcttggacttgttatgagaatgartaggtaatacctacaaaatgttttgagtgttgtccttacacatagggattagacaatatccactattattttaaagttactttaatgatattgcttatttgggaagcagattttttttgccttttctatatcagaatggttagttgaaaatattttacttttaaaataattattgaactgggaaaatgatttcatcagcaagatacagaaaaaagttggcaaaggtaaaaatacttttatttttcatcaaaatattaatatattatttttctgatttatggctcagacctattcattattattccttagatgctcgaatcctccatacaatgtggtacttttaaagagaacatctgtttttgtacaaagtgttgctatgaaacttcagtaggaaaacatagcaaacacatatacaaagtttagtactgcagctaaggcatgggattatattggtttggtttgttcattaaaaaaaggaaacaattattagctaaaccacacatttcagatgaataaggataagaaattcagggattatattgttctttggtaaaaaatctttgttttatagatttcagtgccttgaaggctcataggaaatgtagcttcttttatgtctaaatgtgttttgttatagaaattactcaagctatcttaaatgaagacctcaattgaagtttttagactatattattttgcttgtattccacaataactgtgttattacttccaatctttgattctgagaaatctggcctttattttttagagagagaaaatctcttgagagttttgagattagtgtagaaatatgcaattttttattccttctaaatttcacgcttttatattagaagatgttctgtgaggtttttttctggacagatattaagacagaatcaatcaaaaccaacgtaaacacactgttaaattcacacacaagaaaagaggtgtgtcatcaattaatttacataaattatctagctggctttgaaacctattgacatgtgagaagttcagagttccttcagcatagggcattctgttaagaatatacatgtttaaacagacaaaagaatttatatagataccatagacattttctgtaatgatatgaagtataatttgtatttactttcttcaaatatgggaatctctaatgtctttcaaaattaccatgatgttgaagacaatgtttatagtgatctcatatacaagtatagattttactgctctagtgatatmatttacaagtatagattttactgctctttcttctttgtttctgtgcaatctgttacaccaaccaaaaataagattgaaccgagatatgatttttagtaaacttggtgcttagtaaatttatttagatacttagtaaattaactaaaattaatttaggtgtttagtatatttattgaatgaaatctagcctaatatttataactggaatgttttataattgatttataaaaatcacaagtgatgttctttttatacagtatctatgtctttatcaagtcatagagattatatacttagtataaagagcaacatcaagattttgatggctggaaagaacactagaggaggacccctgaatatccattttcacttaacttatctgagtctgttaccttgagcataaaacggaaacgatgacattaccccagtaattatagttttgtgtttttccccagtcaccttagaaatatgtgctaagtacctcattatgtgctgctcataattttaaatactgtactgaggatttgctccctactttcaaagaaataccttatagtcagtgggggaaaaaaaactagcagacttttactacaaggtaatatgttatgacattataatttggttttatttgttggtcgcagcttaaatatcacctcttcagaggaatttcctgatcacccagtctaaagcagccttccagacaatatcataatcttttttaaagtgcacagcactatctaaattttctttcttatttgttcattatttttctgtctcccctcaaataaaatgtcagtcttatggctgcagatactatgttattcttttcacttctttaccctagtccttatcattatgcatatatatatatatatatatatatatattaggttttcattaatatttattgaataaatgaatgaaaggaaacttaaaaatacttgtgccatggcagcatagataaagagactttattaatttaaataattttttttctactatgttccagagacatactgtttgccccggggaatactttgttaatcttagtctggcgggaaggcattgatcagctttataattgcaaacaattgtaagtgctatggagaaatagtgaagggtggcatatgactatgttgaagaataaggtatttccctaatatgggagattagaagccttttgaggaagtttcacttgagctgaaatttgaactgtttgaactaaccaagtaaaagcaatgagaacatcatatgcaaaggccctgtgatgatgacagcagtagtctttgaagaaagtgaaagaaaaccagtatggattaactgtaatgggtgagcacttggtagagtgggagagatataactgaaatgctggacacagaacttgtaagtcactgtgctggtccrtattagtagttgatatcggaaagcaaaatgtatacaggagaaacagtgtaaataaagcaaaagagtaaaaaaaagttagggatgcatacagtgtttgtcytttgacataactgggttactctgaaatatcaacattttcaaaatctcttctgtcaacactactataaggacktttatatatatatatatatatatatayayatatatatatayayacacacmtgtatacataaaaacatgtattgcaaatagaaataaggtctctatttaaaaatctaacagttatttgctaatcacttatttttatacatataggcattagagaaaaaataaatattcatcaaagtgaattaaaaacaagtttacagtataatcagtagagaataggtcacattaaatacaaaatgtataattaagtcaaaatattcattgaatgtctgacttgcataggaagagacacaaggtctagtactattttcaaaaaatcagctgagacataaaacatacatgtgacaagcatcataacaaacatgtgacctacacaaatataaaaggaaatagctgagtaagakctaggcttggccaggtgcagtggcttatgcctataaccccagcacattaagaggcccaggttggtagacgggggcaaaacccagtctctacaaaaaattcaaaaattagctgggtgtggtggtggtggcatgtgcctgtagtcccagctactcacaaggctgaggcagaatatcacttgaacccagaaggcagaggttgcagtgagcagagatggcaccactgcactccagyctgggtgacagagttagactctgtctcaaaaaaataaaaaataaaaaataaaaaaatataagatttgggcttagtaaatatagaaggctttgtaggggatcaagtttgaattgcattttgagaaaagaagatgatgaatattaataaacacgtgaagtgaatgggagagaggctagtaatcaaaggcatgaagcccaagccatagaagtaagaactaatgaaatgtgtgaaattaacagatattaattttatggaaagataaagctcaagagtagaaaccttgattaaaaagatacctcgtcaattatctgaaggataagggaagaaagagcatttcagatggaggcactccctgtgtgaaagcttggatcattcagtgtcagtcatgtagcaagatgatgttagcttggagatgtagctatggtagaggctgaccactactaaaggagctaggtcattataggcctggtcatcttgctatagagctgtagtctggtgcattgaaaaagtactgagtgaaacagaagggagctaggacatgattacagagggctgggagggagatgatgaatataaaggaaaagggaagtgaggagagaaactagatgttagaggtatttagtcaattcagtaggatttaatgatttattgcagacagaatgaaggggaaggagaatgaaggataattcttatgtctgtttagctaattgaacacttaaggggaaccctgggccaacaaggtttttctttttttaatttttatttttttagaagagatagtgaattaaatgttatttgcatttaatcctaggtaattgagatacacaggatgagatatctagagggtagatagtcaggtccagccttggtgttacccatttggaagccatagcatcgtaatggattagattttagctgggcctaggaggatgaggtgtgttattggtcagtaccagggaaaaacagagggcttctgagctgcatggtgacatgtccatggagtaaggagaagacaggtatcactgaactcagcatgtgctggaataatatgtgataaggatgaatcatggatcagtaaggtgaggcaaatttatagatggaagtaacagaataagaggtgctacactttttaattgaagcaacttttagaaaaggaagatgaaattacacaatgaatgaactgcttaaggatgaataattgggtagacattggaagacaggactttatttcagtcaagtcatgtgaattgtggttactgtggttggaagatataggagaggtacataatagctgtcatataagagacaaagaataagagtaacatggaaatgtatgctcaaatgagacagatcaataattgtattcatgatttactgacacgaaatgctctttattgcctgtatcccaggtcttaccttgtttccagttagctgtgatttcaaagaagatactcctttgtgacccttgcttcagtcatctttccatttctttcttttctctttgtttctgctaacctgctgaggaggctgacagctctggacgcaagtgtttttgcttcaggagtagatgggagaaaagcatgtcctgtagttataatgctgctttttcctaggcagggagaagcagcccctaaattctagagaaaaatactgccttagttcaatgtagcagttctgatattcctgtgagtttaagaaaaaacaaacaaacccttcctccgctcaccaaacgaagcaataacaaaccaacaaaccagaaaccttaaagcagaggaaatccagattgtacttactcttcttctcactcacaaagaaaaggattcaccacatttttactgtcatggcattattgccgttaaagtctttttctttctctgtctagtaagtcttttttttcctgttcaatacagtttttttttgcttgttcattttttttccgatctagtggagagaacattgcaggattatgaataagaccctgagctggatgtcgtggctcatgcctgtaattccagtgttttgggaggatgaggcaggaggatcacttgagaccaggagttggagaccagcctgggcaaaatagtgagaccccatctctaccaaaaataaaaaaataaaaataaaaaaagaagaagatgggcatggtcatacatgcctgtagtcctagctacttgggaggctgaagcaggaggattgctgtagccaaagagtttgaggtttcagggagccctgatcatgccaccgagtacagtctagatgacagagcaagactttaaaaaattaaaattgaaaaaaggaccctgataaccatttgtagatacaaacacatttcaagttgggtctggtgggccgttttcctttagggttcaccacttgtggtgccatgttgcaaagacacagtgctatttatcatgtagctatcttacagatcttttgtctaatacctaacaaamcactcttttagtcctccaggaaaaagttctgggcactttaagccccatgccttgttcagaattatccttgctatatgctgtggtctaaamtgtgattctccaaaattcatttcatgaagccccaaagcatagtagcttagaatgtaaccatatttggatataagactttaaagatgtgactgctttactatgagctcaacagggtggggccctaattcaatgcgactggtgttcttataagaggaaaagacactgtggagaaaagaaagaagaaaaggaagattaaaagccatctgaggatacaggaagaaggtggccttctgcaagccaatgagagaggcctgagaagaaaccaaacctgctgacacctggatcttgaccttctagcttccaaaactgtgacaaaatatatttctgttgtttaggccacttagtctgtgggtttttttttttatgtctgtcatagaaaacgtaatatacagtactttctggtgagtaagtttttattttccctgagtgaatttttagtagcacatatcttttctgtgctgaaaatgtgagacctctgatgatttgatgagcccttctcttaccctaacttgcttttacacttgtaatattataccaaaactaagtgctttctattcttattttcttgttagtgtgatgtttcacttagttgcattattcattttgctagaaattttgaatacatttgctaaagctggaatgaaaatctcaataaatgaataaataatgatttagtgacatctgccgtgtgcttgttcactcgttgatctttaagagtgaaattttccaaaagagactgatcattaggggtttctgtagatyttaagtatgatgctttttaaaaccttttatcagaaacacgcttctttgattaacatgaatataatatagtgatgtagttaagagtatatggtctggagttaatgtgctatggtttaaatcctggctcagcctcttggaagctgggtaacaatgagtgagataatcaattaaattagagcctcattttcctcatctgtagaacaagagtaataatagttgtgttcaactcatagtactgtgatgaagattgaataagttaataaatacaacagcacctggttcatcgtaaatgctccctacatttgggctattgttatttttctaaattctattgcttgcttgtctgaacatcatcttgggttaatattgttactactggaactttattgtgatattaacttaaagcagatttctcacctttggctctattgacatttggggctggataattctttgttgtgagtgctctcctgtgtatgtagcatgtttagcatctgtggagtttaacagcgtctataaagtctacctaccagaccccggtagcacactgcctcctcacccaagttgtgacaactgaaagtgtctctagatgtattcatccattttcacattgctataaagaaatgctagaggctgggtaatttataaagaaaagaggtttaattggctcatgattcagcaggctgttcagggagcatagtagcttctacttctaggaaggcctcaggaaagttttaaccatggcagaaggcgaagggggagcaaacacttcacatggctagagcagcaggaagagagagattggagagttgctacacaattttaaaaaactagatctcatgctaactcactatcacaagaacagcactaggggatggtgttaaaacattggacctccatgatccagtcacctcccacggggtttaggtgggggcccacctccaacactgggtattacaattctgtatgagacttggtgggractctgaacaaaaccatatcaccagacattgccaaatgtactctgggggtaaaactaccccmagttgagaatccctaaaaaactttgattaacaaataaaatactgtttgggaaaatatatctaaaatctgcttcttacatgagctcgatttattttgactgatagtcttgggattttgtaaggtagcttttctttaaaaatattattaaaggaggtcatctacagtgtaactcataatttctctcactgtgtcataaggccagaatatcttgatatgtctaattctctaaattagaatgtatagccatgaaaaacataattgacttaaaaactgatcaaatatgttttcatgaaaacatctagtagctgaaataaattatacctgccacttattagagataactcagatgttatcacaaatggaattgtaattacttacttatatttctcatggtgctatagagatttgtctaaattagaattgggagtaggagggagaaatttaaatattcatgaaagtgtgatgtcatatttcatgattaaaggtatggaaagattaagtatatggataatttttaaagtaccatagaggtatttttctagagaaatgagacacatcacagtcaagtacatgtggatgtatattatctttataaattaagatattacgtggaacttactatggttcaagaactcagtargaattttttaaaaaaataagtatgcttgcataaattccaaagtataatgacatcttgtctctgtcatccctttgtagtccatcaaaatgattaatgcctgtcagttgccattcattactcttttgctgactggaagttgcagtgcctcatctgatacactgatacactgatcaatgtggaataggctgaaagtacattttgcgggtctgtggaatttgtcttaatacttactctaaagtatttaaatacttaaatagttaatatttattttattttacaataaatactgttttatacttatatgtgtgtgtatgtatatatgatatataatttaaagaatatatatcactatataatgatatataaagatatatgaatatatggatataatggtatatatactattcattgtgatatatatatawaatggtatatatatatttcactgtgatatgaaatatatataaatatattttaaatattatatatatatatatawgtatcactacagtgttaaagtcaagaagcatgggaagcaaacagatccagaattcagggaatacaccacatataataaatgatatctagctctctttctccactaaaaaatacgattattgtagtttaatagcctaatgggattttccacatacttaatagttaccacatcatgttttcatgctaaggacaggttttctataatcctttactggcaaggtgacaagctggaaaagaatgggttgtctattactgattatgtagtctctaagaaatctttttcttttgttgacaatttgaatgccatgtcttacagtttttgtcagtgtgagaattttttaaattacttattttatttttattttgttggatgctttttctgtttgaccaataccagcaagtccttccaaaatcacaatatagctaaacatatcttcctttctcaattgtattaaatgtttattatattattaattgggygaatttttgtattaatatgttatttaaaatacaccatttaaaattagattcaatatttatgtcagttttactttctttctctttgtcctgattgttttatatagtcaacattgaaactgagaatagagagaaagagaaacaagggattttaaaggataatagtaataagcctttgtataatttttttcatacatgactttttaaaatttcataatagwgaggtgatgtggatgtaccttctaacatcatcacattttgacagtgaggaaagtgagactatgcatgggaaaaagtgaggcttagtaagtgaagcaataaagtggaaatggtactttgtctagcccctctgaccccagaccctgtgctctcatgctacatcacagtgtctgtggaataaacttttatcacttttgttgttgagaaaatgaacttgaggtttcttattatgatgtataatttcccctgggaaaatcgttgatagcttgataaagacagccaagagttttggagaatgattaaataccactcttcactttttttttcttttaacaaggctttgaggatctcttcttctgatgctgaaaaacagcagccaactcaaggggggaataatatgaaaatataaatacatattttaacatatttaagtatcagatgttgtggagtactcaaagagtgtttttgcccggttttaacatatgcacatctgtatttttctttataaaacaaatgtagtgaaatagtttaatgctgaatattttattacctttttctacacactcaccatcttcaaaatcaatcaaccttcacttcaggcatactgtatgtggtcttatactagaaaatacataaatatattgtttaaaggattaaaagaaattaaccacatgccatttgtttcacgaaccaaagctgagtagtttatgtctgttttatagcgcatacacaatacttgacctccccctcccaggacttagaacaatatgaactctgaaatagaaagtcttctcggaaactttgggaacattgtgtcagacggagagatagtgctcagataagagccagtggtagttgtaactctcagtaataatatccatcatatcatctcgtggatcagtggttgtcttagtggaaatcagaagataatgccaaagagacattaaatgttcagaatgtcctgcactgtagagtataacttgytaaatttcacttctgtttaaatctcaattactggaagaagcaggtggtgataattatcttactccttcttttttttttttttttttttttgagacggagtctcgctctgtcgcccaggccggactgcggactgcagtggcgcaatctcggctccctgcaagctccgcttcccrggttcacgccattctcctgcctcagcctcccgagtagctgggactacaggcgcccgccaccgcgcccggctaattttttgtatttttagtagagacggggtttcaccttgttagccaggatggtctcgatctcctgacctcatgatccacccgcctcggcctcccaaagtgctgggattacaggcgtgagccaccgcgcccggccatcttactccttcttgaagtttaagctatttaacaattaattattaatcagggttagaatcaagttaaataatctacttcatttagatttttccttctaaaccgagtataaattcccattagtactactgttattaaatggaacaatgacattatgatctatagatactttcctttctagataaacatattgtaaattcactccagcatgtgagctatatgttctaagtaaacaatgtgattctcctatttagcaaaatatttcattcagtgtattgtcttatcctaactctgagctttccaatgtatatttagaaatgatattcctttgtgaaagactgtatttctcagtgtgcatacctgttagaaaaatcaaacatagggtgcaagaaaaagtggtgaatttttttttttacttgttcctgcagttatactcatactcctctgctcatgtaaacatttcagctccccaaattcaacctgactgcttgaaaatctttactaataatcattacctcttgaataaaatccagattcctaatccttcagactaacctccatgagagcagacactttgtggttgtgcttgtggctaatatcatcagtgcttgctattgtgcctgtcctacagtaggtaatcaggaaatatttgtgaaagaaaaaaatatcataaccaaggtactatgctatctgacttaagtgtactttcctgaggtcatcttacataactcatctccrtacattctatgttttaatccaatgagactatttttcttgcaccttcaaatgacyccattatctccatgcatgaaacaccagttcaagtgtactctcttcctaaagtttttcttatcacctcatttagatttttttcttctcaaactgtcttagaattttgtgtttcttttactattttttttcatttttcattgaatcacagttactaaatgtatcctttttcaactccttgaggtgagtgagtataagagagaggagagtatcttaactcttctttcttcaacagtgctcagcataggaccctcaagtgtactggtgtccaatacatgttggtgtgctgtgttggtgttcaatatatgattgttgactgaatggacacttctttgttcactttactacagaattgacttttttttttttttttttttgagacggagtctcgctgtcttgcccaggctggagtgcagtggcacgatctyggctyactgcaagctccgcctcccgggttctcgccattcttctgcctcagcctccctagtagctgggactacaggcgcccgccaccatgcccggctaatttttttgtatttttagtagagagggggtttcaccatgttagccaggatggtcttgatctcctgacctcgtgatccacgaggccgcctcggtctcccaaagtgctgggatataggcatgagccaccgtgcctggccagaattgactattttttggttatcactttttcctttagataaatcttaaaaaacttcccacagctgatgtaatttgatagaaattcagttgaacttagttcttaaagatatctgacaaacaacttttgacttgaaatataataagaaagaacactgaacttggaggaagaatcttgagttccaaaactggatttctgtgaactggttgagtaaatttgacatcaaaatcaattcttcgcattaacatcgtatgcaaaagaatttaatatggtacatggcgatagctatacctcaataaagcctcctttcatccttttcctattattatttcccttcacttaacttttttttttctttttccttttccttcttgccctctcctttaaaaatcataaatttattgaatgacttttaacattttatgacctaaaacttttctggyctggattttatattaaatcagttcagcctgctttattagtttatttgatttcccatatacaaaaattgaaaaaaaaattctatttgctttttattgaaaaacaaaagactaactaaacaatagtgccttaagctcctatgatgaaatatatagagtatttttaaaaacatcattggttagcaatatctaggtatgttgctagcatctaccttccaaatccactttggaatggctttgttgcttagattttaaagaaacaaaatttaaagaaacttatagtttgaatctgggctracagtgggtgaaaggccaggactgagcatcttttgtaaggtgagtcaatcttcttaattgtgaaatgccccttttatgcagatttttctttttctttcaagtgcatctgttctgtgttttaggtggtgtttaaacacttttaacagaatggatagattttcctattattttatctacaaataaacacctggttcttgatacttctctttctccttttatcaccttttgcctaaggaaatctaatttattcattttgcctgtattttatactcacaatattttcttttttgcttttaccttctgcatataacaaaacattattcttgcacagagctctttttttcttgcaaacacatttactcttaatattttatcttttgagtctatattatgctgatgggaagtttttcatataggattgtttcatttttatgatacaggttcacttctttctcttcattgccttgtttgtagttttttttccctgcagaatgttttgtatgctacctttctctttactttttccagaatactttctaaacaagcagwttgtgaatttcaaataattcatttttatttttatgttatgaattgacattcttttcctctgctattattcagatgaggaagaaagataaaagtgataaaaggaacataaattctgccatagaagttaccgccaagtgaatacgtattctagtatataggagttttactcatgaaatattttgcctttacttaagaaacctaagttaaataggaaaatgattattttcatttttaaaaaattaaggtataaattgtgtgtgcaagtatatgcacagtctccccaaattatatttttctgtgtaaatatttacaaaattgaatatccttcttttttaatgactcctatgcagacaggagggagggtacttcataattttggttcataacatcccttaaggaattcattctagtggccaaaagagcaacacctttgtaggagggaaacaggatcaatcaagttaacaaaattattgttataagtttcttcacaggaagctttatgaaataaaaattatattcataataaaataagaaattatgaattatgaactcatcttaaaatggtctttaaatgttctgtatgatgtcagtgggccacacaacttgttcagtgtctaattatgttgataaaataagatatgggactttttttttaggtgaaataatttccattgtaactttttgcatatgtatgacaaattattctctttacgcaaagttaattggaggtttgatcaagaatctaggctctgtctggttcaataaatcctacataattatttattcatattatttccctcataagtaggaatttttgtcctatcattgttattttgctatgttgcctgtgtagatacagctatcagtttgaagcagcagttctgtctatgagaagataaaataatatctttgatgggtttctccatgtcagggttccttcaccttcaggcatgttttccaacatgtagttcttttttttcttcttaattgaatcagtattgctcataaattacaattgagtgcagattgaaggaaatgcaatgtcttcttaggagagtgtgtcacctagtatttataatgtaatcacaatgttcatagaaatttaaacgtattctttcccctacaacatttacactttaacagagacaaaacaaatatataatcattaaaactgttaaaggtaagcaggtaattataagattgcactgaatttcagctataagaatgggagtgactaattggagaaagtatcctacagctataattttaggggagaaagccctgtggatagagaagagatgctgttctaggtaaataaaatggtctgagtagagccaaggaggttcactcttaaaagtataaggagctagtacagataaatttcaaaggcaagccagtatccagattcaaaaacatcttcttaaattatatggttttctcgccacagatttagattcattctcattagaaatattgcatttttaagtatggcttttagaggcttgtggcttaaccagagcaaaggcagtagggtatgatctaaaggtcattctgcaattttagcagagtataactgtctcctgggtcaagatttggctattctctcaagaaaaggaggttaaatgacatctaaatggtattgttaagtaaaccaataagaagttttatctttgtagttataattctgtgacaggcttttcttcatgtcagaattactgatccctcataaagacaaaagcttaggtaagaaaatgttttcatctgatttagttttattgcttagagctgtgcaatttttatatgcctatttaaaaagaaaaaaaggaaaaaactcagaaagttatttttttctgggtaaaagataattggaaagcatttcaaccaaaagtcaatataagtctgttgagtttgtcattctccagatatgccctcagtttatttttaaaaaatcttaagttgacaatgcattttatttggctataataatttaagtaatattagacatctagacttatcatattcatcatagaaaaattttggtagcatctttatatttttaatctaaagcaaaatattgatcagcctgtcctaggatgtagttaatacattagctgatcaatttaaatgccatgataacttcagactcatagatcaagtgctttttatagtactttggaaacccttgagtttttttattctttcttggacttgaattaattttcagtctttcttcttactgtacttaragtttttgacagtagagccatcattaaatgaatgggagtttgacctaaacttatagctgatattgataacaactgcttaaattttagtgaaacagtgaaatgtgtcattgataaaaacatcatgacctaggttccctgagtatgttagtaactccaatttgttagagtttatatgtatcatggtgttccatgggtgatagagtgccaaaacaatacaaacatttacatatttatggacattttggaaacagtcaattacctacttgtaataaaatatttaatattagaaaaattgaagaataatataaattaatttattttagttttaggttgagtttctttgactcaagaatttctacttatgtttttcatttctcttactacctaaaactaaagaaaacattaagaaaaaggcaggaaaggaacctaattctttttttaaactttttatttttattttattttattttattttttgagatggagtcttgctctgtcgcccaggctggagtacagtggcgcaatcttggctcactgcaacttccgtctcctgggttcaagcgattctcctgcctcagcttcctgagtagctgggactacaggagtgtgccaccacacctggctaattttttgtatttttagtagagacggggtttcaccatgttagccaggatggtcttgatctacygaccttgttatctgcctgcctcggccccccaaagtgktgggcttataggtgcgagccaccacgcccggccctaaaccttttattttaaaacaattttagattggcaatatgagtataaccattcaaagaagcaaaaacaaaatgtactgtgagattcaaggcactgtcttattccctttttctcttctttttattcattaaatatttatgtagtactgactttaagtgctggggaaactaaggtgaatataatagccgttgccctggaaaatttcataatcgattgtggaatagagacacattaacagataacccaaatcaactgtattaaatgcaatagcggaacaaagagaagtaggatcacataatccagctctgcagcagaggtgagggtggagagcagcaacaaaagagagcaatggcaagggaattctttatatttttgcacatgtgaaatgtctgtatagaaatatttgactaagatttactcagcaattagaaattgttttttgtttgtgcctatgtaattgtatcattacgatttcagtatcatttagactttatggataatctacacactaaatgtttattagggaaggaaaagtacttttagaatatgcaacaattctggtgacactcaatacatttttgttaaatatattaatttatccgtttattcaactaatatttattgaacagctgcatagtgctagtcattgcacttgagtcccaggaagatattgttatggactgaatgtttatgaccttccaaaattctatgtaggctcctgcccccaatgttatagtatttggagataggacctttatgaaggtagttaatgttaaatgagattataagtgtgtggtcttgatctaataggagtggtgtgcttataagaagagacaccagagagctcatactctctctcaaccatgtgaggacataagaagttggctttctgtaagtcagaaagagagctcttaccagaacccaatcatactgccattctgatctcctccagactccagatctgtggcaaaacaaatttctgttgtaaaagccaccaagtctgtggtattttgttgtaacaacctgagctgattaaaacagccataaataataagtgtaatacataaataaggttaatataacaattgcattattaacataaagtgtaatacaggtagaatattataaggcaacgacttgtggaacacaggaaaagtgggaaagagatagggaataggaagtggtgtgatgaagggaatcttacaacattaagtaggaggtctgggtaggcctaattgaaaatatgacatttgagcaaacacatgaagtttgtcctgtggatatttgggaagttcgcattctaggcagtgagaacagccagggtcctggccctarggtggcatcatgtctgctgtgtttgaagagttgcaaggggccagtttggctggaggagagggatactggaaattaattagcaggcaataagtttggagatctaataggagtgaggtacctcagggccttttaagctattatagattttaggttttactttgagtgaagagaggaaccattgtagggttttaaggagaagggtaatgtagtgaagggatttgactgactactgtattatgaatagatgttaggaggggccagacaaaagcaataataccaattaaaaggctattatagtaatccaggcaagagaagatggtggttctgactagggtggaacagtagaggtgattagtgattaaattctgtattttgaaataaaaaccaagtgtatttactgatggttaagatttgaggtatgagacaaatataggaatcaaggatgactccaggatttggaacctaagcaactgaaaaactgcggttaccgcaaactgaatgaaggmaaatatttgtctccgttcgcctaacctgctgttattcatcactggtagaattcaggtggctttggttgtagaatataaacagaatattttgagaaaaatgaaaggaagataaaaataactagggaaaataaccatgttatggtatttaagttgcttttagctattttaatcttcatttctcttgaatgaaccttaaggtcttcaccatggctgcaaggagcgtgataaaattcaagtgataataatttacaatataaaggcttgatcagaaatagcatggacttcattttgtttttaaggctgtgcttcctgtatctacatataaatatttaattcctaccaaattgtatatgcaccattatgttaagctattctgtaaaatcttttgagaaaatgtgtgatgctatcttaacacaattaaattagtttcatccatttttcatctgcaaaacagcccatggaggtatttcaaaatgattaatttttcatacttattcacaaagcagttctactaatagttggatttttgtaatatatagttttaaaaatatttccagtatgtaaatacattatatttttcatagtgttttccttcttattagcattatgtaccagacaagatgcctgcgggaaagagataacacactcaaaaagagtgactaaggaaggtttaataaaggtaatatttaccaaggtgtgggcacggttaagagaagtcagcaagggatggtgaagcttggggagctggtagggactgaatttttgtgtcctccaaaattcrtatgttgaaatcctaatccctactgtgatggtatttggagatgggggttttggaaggtaattacttttagatgaaataataaaggtagggcccctgtagtgggattagtgttcttataacaagaggaagaaaaaccagagctcccttgctgccctccacctatatgagtgaacatttgcaaaccaggaagatggctgccactaggaattgaattgctagctccttgatcgtggattttccagcctccagaacttcggaaaataaatgttgtttaagccacccaggctatgctactttgttgtaatagcttgagctgactaagatagtgagtaggctcacaagaccaagattgctgtcttggtttttcaggtacctggagatagagttatatctttattttttatatttatttttatgtttttaagacagagtttcgctctgttgcccaggctggagtgcagtggcatgatctcatctcgttgcaacctccacctcccagattcaaacgattctcctgccttagcctcctgagtagctgggactaagggcacatgccactatgcctggctaatttttgtgtttttaatagagacagagtttcaccatgttgttcaggctggtctcgaactcttgagtgcaagtgatttccccggcctagggctcccaaagtgctgggaccacaggcgtgagccactgcacctaaggccagttatacctttaagtgtagctgtatctgtattagaagaccattgaaaagaagcagtaaacttgggtagaggaacaaatcctggaacagagcttgacctaatggggctcacacatgctgattctgcttgcatttttaattgactaaacacaagaaagtatattaggaaagggaacccaattaatatagttcctacaggtcagcctccagggggacacagcaagctatagagacctgaagagtagatttggagagacacacagaaaaatctagccgacgtgaaattattatttataaagggaaaattgatttacatcaagatcaacaaatatatcaagcattatgagtcaacacccctaattgtgctaagtagtcttcttagcttcttagctttatatatataaagtttttattagaaaatatgttcaaacttacaaaaaagtggccaaataagaatattacaaagaatatccctatcccctttaaccagattcacctattgttagcattttactccatataytttattatatgctctgtgtctctttttatcttagtaatatattttatgttatttttctattataaaagcattgtcagttgaggcgttgggctgagtccttgactgcagctcagtaattgcaatgcgttggctgtaaataccaagtctagtgtggggatggtagctttccgccatgtgacctgacaggtaaaagcctttgtaattgcctgtagttaggcctcaaagatctcacacaggattttgggtcagagctggactcctcaatcctttgtcagaaattataattttattcagattaatttttattcatcattcttcctctgttttagctttaattctaaaaataaacatggaatgctcaacatcagtccttttttaaagttttttcactcctcccttggttggatgaagctcccaccaggtctgtcccccaacggaattacaatttgacatgagatttgaatggggacacagagccaaaccatatcaacatttctagcgtagttttgatacttctaattcaaagtgtttttaatgaccccaaatgtttcaggatgtttaattcaacatggaatttttttatttccattttttggctttatgtttgtttttaggagagttttcattaggagaaattgctttcgtcataattttagcagtcatttagcatcgatgtgatctgctttttctaacattatttatattgtaagtaggttcctcactaagagtatatgtgtacaatatccctgggcctttgtacgttcaaatctgctttttatagacttgatatatgaaacacagtttgactgaatgtatctttggctcatactttcattttttttaactttcttgaaaatatcactgtacttgtaccttgctttgtatgttgtttttcagagaagtttgatgaaattcaaattattttgcatttgtaagatattttctctctttgcctaacagtgctgaggatggtatcttcaaactctaatagttttgccagacatgtgccagagtttagtgttctgagtcaatagaaatgatgtgtcattcctatgggtggaatccagtcttactttattttgggaatgtttttcattatagatgtaataaatttttatgtgattctattttctcttggtaatattttccttttatctttatttctgatatgagttattctttttctatttctttctgaagtccattacattctcttatcttttcttcttatttgaccatttgtattagtctgttctcactctgctaaaaagaactacctgagactggataattgactcacagttctgcagcctctacaggaagcatggctgggaggcctctagaaacttacaatcatgtggaaggcaaaggggaagtaaayacctctcaccatgcaggaaacagagagagaaggaagtgggaagtgctacacactttgaaacagccagatctcatgagagctcactcactatcatgagaacagcaaggggaaaatctgctcccatgatctaatcacctcccaccaggtctgtctcccagcggaattacaattcgacatgagatttgaatggggacacagagccaaaccatatcaacatttctagtgtagttttgatacttctaattcagagtgtttttaatgaccccaaatgtttcaggatatttaattcaacatggaatgttttttttttcattttttggctttatgtttgttttaggagagttttcattaggaggaattgctttcgtcataattttaacagtcatttagcatcgatgtgatctgctttttctaacattatttatatagtgaacaggattcctaattcaagagtattcttttttgttattgttgctgttttcttttttcttatttatttctttattttttacagaagggtgttggggagaggaaagagttgatgtgtttttgtcaccctttttgtttctgcagcaaatatgtatttccttatttttcttcactgcctcatttcaatcccttatatatatcacattctcttaaggaagcagtggtcttagaaggctgccactttgatcctgcataccatcaagggtcttctgtatagccagtgttataaccaaacaaatgctgacccatgtttagtattttagcatttaatgatgcagtttgtcttttagggactgatttggtctatgtttcattgataacctctactgtcctcatgtttttcatgacatctcttatgccttctcttttgcaaattccatacccacagatttgtaatactaggtgacttggtagaaattctgctggaattttcttcttcccttttctaaaggtcatatttttcttggtctcctagttaaattgaagtcctgggttatgcttggattattttgctattattgattttataatttatttggaagggtgtggaggagattcagaatcaatggccccatcattattatccaacaccagaggttgccacttatctgtattttgaactagagcaatcaaaaattaatttaaagctattttgtttaaataatcatacaattttactctcataaatgatgaatattaaatgagaggtctagtttcaaaagcaagaggttttttgcagtaaaatatgaaaaataacaacttttatgggaaacagagcaacatggctgcacagaagcctccactgattttccttcctgcagggacaccaaatttaacaactatctacacaaaaaagcagcaccttcataagaaccacmagtcaggtaagccatgatagtacctgatattaacttcatgccattgaaagaggcacagaagagggtaggaaagaaagtcttgaattgtggacatcactctacccctatctgctggcagcagcccagtggcagggagaatctgtgtgcttgcaggatggagaggccagtgattataggacattgcattagaacccagcacttccctgtcacaacagaaagcaaaaacttgtagaacttagccgacactgatggaaggagcatgtacaccagccctagacagagaagaatcatccatcccagtggttggaacttgagtttggcaagcctcactactgtggtctaaggtgctcttgagtcctaaataagcatgaaaagcagtctaggcaacaagaactgcaattcctaggcaagttctagttctgttctgggccgagagcaagtggaactggggagcatgtgatctaatgagacactagccagggtggcctagggaatgcttgcaccactcctttcataactccaggcagcacagctcacagctctgayggcttatttcttctgcttaaggagaggagagggaagagtaaagagtactttgtcttggaacttggataccagctcagccagagtaggctacagcactgggcagagtcatgatggtcccattttaggccctagcacccagtgatatttctagacacaccatgggccagaagattacccactgcctataaaggaaggacccagtcctggtaggatccatcacttgctgaccaaagaaccgtgggaccctgaaaatcaccagtggtagccacgtaatacacccagtgggccttgggtaagactgagacatgctggcttcagatgtgatccagcaattcccagcagtggtgactatgaggaaagattccttctgcttgagaaatgcagagtgaagagtaaaggggactttgttttgcatcttaggtacccgctcagctgcactggggtgaaacaccaatcaggatcttgtagtcctcaattctaggctttggctcttggatggcatttctggaygtgccttgagccacaggggagcccactgccmtgaagggtgagtcctaagcctggcattcaacacaagctgactgaagatcccttgggctttcagtgaacattgctggtagcctggcacaactctttgtgggtctgtggcagtggggaccacagggagagactactttgcttgttgaaaggacagagaagagtggaaggactttgtcttgtggtttgggtgccagctcagctgcagtagaatacagcaccacatagatttctatggtcctgactccagaccctggtttctggatggcatttctggacctactcagggcctggggaactctccatcctggagggaaggacacaagcctggctggctttgctgtctgctgattrtagatcctttggaccttgagcaaacataggtggtaaccaggtagttgttacagtggagcttgactgagatccagtgctgtcctgacttcaagtctgacccaatacrttgccagtggtggtacctgccacccctcacccagctcyaggcagcttagcacagagaaagattccatttgcttggtagaaagtaatggaagagaacaagcatctctgcctggtaatccagagaattcttttggatcttatgcagtatcaccaacgcggtacctctgtgagtccacaagagccatagcattactgggtttggggtccccctaatgcagatatggctgcagtgaccaaaacttagatcataacacacaagtccattcaaaatcataggaagtcttccctaraaggrcaggtatgaacaagcccagactgtgaaggctacaattaattctgaattctgtaatgcccagacactgacaaatatccacaagaatcaagaccatccaggaaaacattaccttctcaaatgaactaagtaagtcaccagtgaccaatcccagagagatagaaatatgtgatttttcagacagagaatttaaaagagcttttttgaggaaacacaattcaagataacaaagagaaagaatttaaaatcctatgagataaatttaacaaggagattgaaataattaaaaagaatcaagtataaaatctggagttgaataatgtaattgacatgctgaagaattcatcagcgtctcttaatagaattgatcaaacagcagaaacaattagcttgaaggcaggctatttgaaaatacacaatcacagcagacgaaagaaaagaagaatagaaaagattgaagcacacctacaggatctagaaaatagcctcagaagggcaaatctaacagttattggcattaaagagaaagtagagagagagatagaagtagaaagagtttttaaaagcataataacggagaacttccaaaacatggaaaaagatatcagtattcaagtacaaaaaggttatagaacaccaagtagatttagccccaaaaagactacctcaagacatttaataatcaaactctcaaaggtgaaagataaaaaaaaggatcctaaatgcagcaagagaaaagagacaaataacatacaatggagttccaagtctggcagcagacttttcagtggaaaccctacaggccaggagagaatgaaatgacatatttaaagtgctgaaggaaaaagcattttgccctagaatggtatatccagcaaaaaatattcttccaacatgaaggagaaataaaaatttttcagtacaaacaaaagttgagggatttcatcaacaccagacctgtcctacaagaaatacgaaagggagttatttaatttgaaagaaaaggatgttaatgatcaagaaaaaaatcatctgaagatataaaactcactggtaatagtaagcacacagaaaaacacagactattgtaacactttaattgtggtatatcaacaatgtatatcttaagtagaaagataaaaaataaatcggtcaaaagtaataacaacaactttccaagacatagccagtataataagatataaagagaaataataaaaagttaaaaaggttggagacaaagttaaagtacagtgtttttattwgttattgcttttcctgtttgtttgcttgtttttgttaatgtaataagtgtcaagttgtcatcagtttaaaataatgggttataagatattacttgcaagcctaatggtaaccttaaatctataaacatgcaacagatacataaaaagaaagaaattaaacataccaccagagaaaatcatcttcactaataaggaaggaaggaaagaaagaagaccacaaaaccactataaaagaaatggcaaaatggtgggattacatccttacttatcaatggtaacattaaatgtaaatggactaaactctccawtcaaaaggcatagagtggctgaatggattttaaaaaatgacccaacaatctgttgcctacaagaaacagacttcacctataaagacacatagactgaaaataaacagataaaaaaatgacattccatgcaaagtaaaactaaaaaagagcaggagtagctatacttacatcagacaaaggagatttcaagacaaaactataagaagagacaaagaagtttattatttaatgataaatgggtcaatttagccagaggatataacatttgtaaatatgtatgcaaccaacactggcacagccagatatataaaggaaatattagagctaaaaagagacaaagaaacattggacttaatctgcattatgtctcaccatatacaaaagtcaactcaaagtggattaaatacttaaagctaagacttgaaactatgaaattactaaaagaaaaatttagggaaactctccaagatgttggtctgagctaagatttcttgagtaatataccacaagtacatgcaaccaaagcaaaaatggacaagtgggatgtgtcaagttaaaatcttctgcacagcaaagaagataatcaacaaagtgggaagacaacccacagaatgggaggagtatttccaaactgttcrtctgacaagggattataaaccagagtatataaggagcacaaacaactacataggaaaaaatctaataatccatttaaaaaatgggccaaagatctgaattgatatttctgaaaagaagacatacaaatggcaaacaagtacatgaaaagctggaaaacatcactgatcatcagagaaatacaaatcacaatagcaawgagatgtcatctcatctcagttaaaattacttctatctaaaagacaggcaatagtaaattctggggaggatgaggacaaaagggagccctcataccctgttggtcagaatgtaaattaatacaagtactatggagaacactttgaagattcttcaaaatactaaaaatggatctgccatatgatcctgcaatcccacttctaggtatatacccagaagaaaggaaatcagtatgtctaagatatagacatactcccatgtttattgcaacactattcacaacagccagggagtggaagcaacctaagtgctcacaaacagatgaatggataaagaaaatgtggtatatatacacaaaggagtaatattcatccataaaaaaaagagtgagatcctttcatttgcaaatgaggttattatgcaaatgaattggagatcattatgttaagtgaaataagccaggcactgaaagaaaagcttcccatattctcacttatttgtgagagctaaaaattacaacaatcgaactcagagagagagtggaatgatgattaccagcagctgggaagggtagtggggctggtgggaagtggagatgattaatgagtacaaaaatatagttagatagaatgaataatctctagtatttgataacacaacagggtgactacagtcaacaataatttattgtacatttttaaataacttttagttatttagtatccagtattttagttatttaatataatcagattgtaatacaaagaaaagataaatgcttgaggtgctggataccccatttaccctgttgtgatgattatgcattgtgtgcctatatcaaaatatttcatgtgccccataaatatatactcctactaaatactcagaaaaatatttaaaaagtaaaaagcaaaaacaatgaaattacgtctttagagggccaaaaggaagaaaaagtcaatgtagaattctatactggataaaaatattcttcaaaaataaatattatttagacaaaactgaatgcatttatagcaatcttcattacaagaaacaccaagaaagttcttcggcttgaaggaaaatatttgtaaatggaagcacatagtatacagaaagaagagaagagttccagaatgttcaaccatagatacaaagtcaatattaaaaaaaataactgtactgttagagactagcagcaaatgattacataaataaacccttaaaaatgctatttataatagcataaaatcatgaaacaccaagagagattttaatagatgtttgagacctctattttgaaaatattaaaatactgcttagagaatttaatgaacagagaaataaatggagatcatctataaatttattatgattctaatctatatttaagcatgtttcttttcttttggtggacattaaataattttaatatttatatgaaattcaaaagacatagctagaataatgtttaagaagaagaatgcatattaccagtttttaggattcattataaaattagaatagttaaatgactatgggatttgcacaaggatcacatcaagaggtgggataaactagagtatagaatagaccaacacctatacattgaggaaaggataatgtttacatgaaaatagtaatttattctttccatatatacaaattaacttgaaatttacaaaatacatgtctgtagtagcattcatgtttgtccccaagtaactagcacatttcaaggcacatgatggatattggataaagagttgatgaaacagtgacaacataaacttcattactgagaaagttttattagaatgcactactaaaataaaagaaaaattaaatttaaagaatgcactattaataacagcaataagactgatcctgcaagttttcttcttgaggattgaagaaatataaatgaatgctcatcctactgatggttgatatgtggycctagatttaaatttaaggggatttacaactgacctccagtctaggaattcatagtcactcatttattgagcctatcacaaagtagagttctttatttggtgttgaaggggccagggaaagaaagaaatggaaaagtggtgttycatgttgcttccttrttactaaacatgagaaactgcattatgtaaagtgatttctaaaatttctatagttccacatattatcagtatcaacatatcatactgtcatatggttccatgtattgataataccattcaaaatagttgacttgagaagttttaatctaaattagcgtaaaaagcaaacatggaaaaaacacatatggatgaaatattatggagctggtgtcttttagtgaagaacagaagagatcatgaaaaaagaaataaacaaaatatgttaaaaktcaccaaaaagaaaaataataaaatgatctactatcttctcctcttttatattgtgataaacagagattcaagtttttaaaaagaaaaattgggccaggtgcagtggctcacacctttaatcccagcactttgggaggccgaggcaggcagatcacttgaggtcaggagttcaagaccagcctggacaacatggtgaaaccccatctctactgacartacaaaattagctgggtgtggtggtaggggcctataatcccagctccttgggaggctgaggcaggagaattgcttgaacccaggagacaggttgcagtgagccgagattgcaccgctgagctccagcctagttgacagagtgagactctgtttcaaaagaaaaaaaaaaagaaaaaaggaaaaagaaaagttggatcacttagctatatataaggagacaataaaatacttatggatggtttaaaatggataccaataacgtttttctataagttggatttctgtatttggttgtcttttctaaaactcctggaactaatcaatcagggccatactaatttgctaaaaatgaattttcaaaataatattgaaagtttcaaaaatcttttctgattcatgacttatttcttgcaagttagtgctttctctttattaattcaagcatcatggcttctttgccaatattttattcaatcctgaaaactagcataactgacatctatttattttcatgagactgatatagggggttgacgccatttagatgaagagctcagaattaaaattttctagaatttctgggtctttgtgttacagcatgtgtaacaactactttaatatccttaatcctaatatagggtcacatgaccttaaatgtaggaaatttgtaaatgagtgcttttattgcagacagaaaaaacatacatgcaatttcatctttttgttgtggattatatttttataattctaaatatgtttgaactttaaatactatgttagcacagttagtcctcattatttatggatttcatatttgtgaattttactactcactatgaaatatgttgataatccccaggccaatactcatggtgtgtttgctgtaattcacrgacatgtacagaacattgaaaaatgtgaattgttcaaaccacatattccagtcatgtgagaagaaggcaaaacagcagtctgccttcttgtttcagctctcatgttataaacgagtgtcctttttgcagcctagttagtgccaagagctttgaattttcatccttttacttggtgattttacttttaagatggtctaaccatcttaacccaaccagtggtgaagtgctgtttatgatgaaatagacaagaagcacaagaagactatgatgtgccttacaatgagaaaatatgagtgttagacaagctttgtttagcgtgaattatagtgcttytggctgtgagttcaatgttaatgaatcaacaatacgaatatccagaaaaaggaagaggaaatttgctgagctgtatatgaagttgcttcgtaaagtgcaaaactaacatctgtaccacatgataaaactatggaaaacatggaaaagtggctaaatctgtggattcatgaaatgacaggcaagcgtagagaatagcattattttgatgcggatagccaaagaaatttatgctcatgttattcaggattttaaagatgctatgctaaatccttctggactagtgctacatggcccacatgtttcaaagagtgatagcatgaacatgataaacttgcaggtgaggcatattctgcggataggaggctgtgaaaaacatttttaaaagaattctgaattctttataattatgtttatgatggaacacatttatgtttagcttatagtttgtttttttatgatcaaagagactggagctaattgcatcttactctcttttcattatagtgtatdtaagatttggctcaaaacatcaatgtaaccctctagctcataactattactggttttccagactccagactaatacctccctgtttcatgctgtctcctttacagtgtgtcacccaaaagattacaaaatgttttgaaaaacccctaggacattgctgcctggttatatgtagtagagtactgatggtacctatctgtctactccttacagcaactggtggtagggctgcaactacaagaattagataaaattgattaatgatactgtgatctgctaccaagtttgctattggaaaatagttcactgattgtaaggaacacaaagaattaaatgaagacaggagaaatttcttctaaaagaataaaatgaagtgtaataatttcctgcatacctcagggagatagggatatgaaaacattttcatgacttcaggatattaatgtggcctatgtcagcgattctcaaattgtgwtgtatcccttaaaccctttctgaaggtctaataggtcaaaactttttaaaaataatmatagtatgatggttttgtcttgttcactttgttgacatgtgcactgattgagacaggaagtagtggttaaaatttctgatgtctacatttgaaggaagacagtgactacacatcatttataatgaaatgcaaagtaagtgtaaacaatactggcttcatcctcatgtgtgatgaatgtgtagagtaaaagcacttgtgcgactgtttgagttgcaaaataaagtagctagtttttcgtagaacatcatttttaactgaaagaattactatgggtaatttaactgaaagagaatctatggatgttaaaacttgggtattttgcagacattttctgtgaaaatataggaagtgagtcattcgaataaaacaagtaactatttattgccaatggtaagtcaaactttcaagtgacaatttgaattttagaaaacttgtatccatgttcactgtgaccctgatagttttccaataaagattattctgagaaaagttataaacaaacgtattttcatattgcatttgaaatgtgtaaaaatttgctaaatctgcatagcccaaataaccagtattttccaaatgactaatgcagaatgttacaaaatcatgaagaaatttaaaaattcattcaaaatgcaagataaatcaatatatttaaccaattagagtatgaaatattcattgtcagggcttttattttcacattgcaagtaaactgtaaggaactattacttgctgagttttgatgtagtatcaaagcaggatatctcaattatctgaaaaatctgccagaatactattccaatttctaacrgaatatatgtgtgaaacaaaataacataacaaaaacaacatactatagcaaattgaattcaaaggcagatttgagaatctggctagtttctaataaggcagatactaatttttttaaatgaacaaaatgccatttttcttactggttttttgataataaaagtatttgatatttaaatattttatgtatattaatgttttaggtttattgtttttacattcaaaattcagaaatgtttttaaattatactgttaaatttaatacaataaagtgtttatagatgtagcccaaacaaatgctcttataggccttaatcatttttaagagggtaaaagtgtcctaagataaaaaattttgagagctgctataccacattttgaaaatcatagtataaggtttcattattatcttaaataagttatgcttaaaagtgaaatggtagttaaaaaggataatcaaaaggaagatctcagaacttgcttgagatttggagagccagtcgactggtataacatgatacaaggactcattttcaagtgtgaattacaatggtaacatttattgaggacaattaggtttttacatacataattttgttttcttttcacacaacttgttgaggtagatactattaccataattttgtagatttgaagaacatagcccactgaattttggtaactttactgcacacagaaggagagatttgagaataagataagggacacctccctgactaattcattctatkwggccagcattctcttgataccaaaatctggtagagatacaacaaaaacagaaaacttcaggccaatatccttgatgaacataaatgtaaaaatcctcagtgaactactggcaaattgaatacagcagcacatctaaaagctaatccaccttgattaagttggctttatccctaggatgtaaggttagttcaatatatgcaaatcaataaatgtaattcaccacataatagatgcagaaaagtcctttgataaaattcaacatcacttcatattaaaaatcctcaacatactagccactgaaggaacatacctcaaataataagagccatctatgacaaatccacggccaacatcatactgaatgggcaaaagctgaaaacgttccccttgagacctggagagagacaagatgctcactctcaccacttctattcaacatagtactggagatcctagccacaacaatcaggcaagagaaagaactaaagtgtaaacaaataggaagagaggaagacaagctatctctcttcatsgatgaaatgagaggtgagaggatcaaaaaactaccttttgggtactatgcttattacttgagtgacaaaataatctgtactgaacccatgtgacatgcaatttacctatattagaaaccttgacatgtacctctcaacctaaaataagagtttaaaaaaagatactgtcaaaacaacacagttctttctatttctgttgtaccactttgtaatatcaaagggtcctttcttttcctctttaggtttygagataacatccataccatacataaaaccaagtatagttgatttttatactactttttcattataaaattaatgcatgtaaaaaagtatcattaaatattcctctataacagttttagttactaagtagaatttaactgtatggctataccataagttatttaattcctgtcattgttgatcaaatatattttcaacattttgttatcgtaaatgatgtagcaatgtacactcttcaattataattttgaatatatccgtaattccttcacaacaygattaaaactagaactattaaaatgtacctctagattgtactgcagaaatattgttgctgttaatattaatctagtctaatatttattgtcagttccctactggggtaaatacttttgttttatttttgtttgtttttatctctagtatcactaactaactttgcattgtttcatgtgatcataggctatttgctttgtaaaagttattcactattgaaatggtatgtgtcagtcattgctctaagtgttttatatatatacacattacatatatatacatatacatttatattgacacatttatttctgaaaacaaccctttgaaataatgtaccggtcagattaggtgaagatatgctgatataatgagcaacactaaaatctcagaggcatgcaacaacaaaattttgttgttgctcacattacatatttattgtgggccaacagcagctctgctctccctcttcttcattatagtacccaatctgaaagattaattcctattggaatttttaaaatcttacggcaaatggaaaagggagggggcttaaccacaagatgactcttaacatttctgtgtgtaagtggttcccatcattttagtgcacattgctttgaccaaaagaattcaaatagttaaacacatcttaatgggattatgatttttagttcctccatatggagaaggatcagaaatcgcagtcatgatatcaatgagcaacagaaagtattcttgcacaaagagggtggcaaatatttgagaacaaagacataatccacattttgtagatgagaaaactgagatacagagagtttgagtaacttacccatactgagagatttaataaatggtgcagctgggatgcaagcctgagcactctggtttcaaggagtgtgctctggtccaatgatagaagataaaatttatccagaaaaagttacctagcacctcatagtattttacaaatatgacaaccctagaaattattgtccaaagttggaccctttttcttggataaatgctaaactgggtgggatatattaactagttttaacctgggattgtcccaattaaaccaagatgtgaggtaaatcttgaggcaaattttataaaacattatactattgggtagtaattaagggttttggcaagcttgtttaagaagtaccaaccaaggaaacacttattrtagaggcttcactgcaaaatacgttatataataccctccaatgcacactaagtttctgagttggttttgcttctttgctatattctgtaagtgaaacttattaacgtttgcagcatttcctaaggtggtctctaaaatctgctctattttagcacttttaaactaccatttgaagtaacaaatatttctaaaggaggccaaataatagttgtaaagtttgaataaagcaggataaataacaaaacacactaggaatttattagtataacagtgaaaagaagcaaaacttctagacttgagcttatatgcttattgttttgtgtgcttagtggaggaatgtataaatgcggctgagtatacaaactataaaatctctaattttaacattgcttgtttatatattaggaacttttaggggagttttgatttgcaagtttttrtaggtttaccagactcattaattgcctgggaagaactttacaggatttcctttggtttatgtctaatctttgaaattggaaaacttaaaagtgaaatataaattcctcatggagaagtgatcatgaggtctgaatagaatcaggtaattcccaagagacatgcaagataataataaagacacaaaaaattattccatatcatttgtgcccttatttgtgagtaaaggggtggaaaataaaataagatgtcattttcatctattgaattggcaaagattttaaaatataatattgaatggttgtaagggattggtcaaatgagcattctcttatatggctggtgagaatttaaatagacacaaattttgtggcaagtagtttaaaatgaaaaacacacaagaatttatacatgttcttagtcattgacatcaaggaatgtatgctttggaaatacccacagattttaatgacatatttatcttctagaattatttttagtgttgaaaaactagaggcaataatgaaaggttaagtaaattatgtctgtccacatgggggaaggttacacagcatttttttaaaatcatgctttcaaataatatatcttaggaaattttaattattcaatcttgaatgaaaatagcagtctgcaaaattgttaaacagagaatggtcacaatttttaaaaacagaaggaaatataatcatgtatcagattaacagcagttgtaaaccgtgttgtagaaaaatgagtaatgtttgcctttcaaaactatggatattttccaaatactctgcagttttctaattataatcagaaaacagttattaaacaaagtgaaagaaattaaagtttaaatttaccagtataagttgcttctttggagggtatattttaacttattgactaccatcagatttactaaatatcatagcacgtaatttcatttaaattcaccacacattacttttctatgtagttcatttaccacaggtataatattgccatttgtattactagtagaaattatacttaatacattgaatttatgccataggaaaaagaaaattaaaattatgttcttattgtatatgcacatattttcttcttgataaaggatttgtctcaaacagattgtaatgacagatgatagctatagatagatagatagagtaaacatgtaagctactacaaggatccaattagagtgaatttaggttggaagaargttctttcttcatctttctttatctctgaataatttcaaagttgacagaccatggttgctgacatctttattgagaaaacaagagttttgcccacgcttatttaaatgtacttatattttcctgtttgctttacatattacatatgatgaacttttgaggatgggggtcataatttcctttttttctatctttctgaactaaaatatatatgtaaaaactcaataaatgatagagaattaattactgaacatatgtttgtattcacacagaaaggyggtaaatatagaagttgataggcagcttctagagccagatcacttgtgtttaaatcccagcattgctatgtggcttcaagaaagttactcaatttctctgtgcctcagtgacttcaattcaagtataacatgaagaaaataatgctactcatctttggagtggtgaagtgacttaatgcttaccaaacacttagaatatgctggcatatggcacatttagctattatcatttcaagataatttccttgctaagtgactataatgattacaactcataactgtagctttgaggaatacgtacacatattcaaagctgggaattgtttgttggcagctctactggtatatggagggatacagaagaaaatcatcatatgtacagctaatcaccaagagatttatggatataaagaaatacatggtaacaagaatgtttattgatgaatttataattagtgagataaaatttacaaatggtatgggatatcattaaaaagcttttagaaaaggaaattcttatggggtacacaaaacaatatgaagataaatatttgtgaactggaaaaagctggcctttcaatctagacaggatatattatgcaagtagtcwcttaattgagcctttcctttttctgacttagataattgataaaaaatatatatatttttatttcagagcaggatggaagtttatttaacagctttataacaggaaacaaaggaaagtactcttggaagagaccacacaggcaccttggaggtcaagtgacctgtttaaccttgcacctcaaattttatatgctggactacttctttcatcttgtacccctttccctttattcgtccctcatgatgagtcacccacatgcatggtgccctccttatrctccagagatgagcatgcagagtgtgattacgaagttgcttgcatacttacctcaggcttttttccatgatacaaaggatatttttgaaatacaaaaaataaccttttaagtaatttgccaatgtaaggmattatgattactacttttcttattaataatcatcatygaacatagaaaattaaagcaaagtaaaattaaattactttgcccctccattggagaaggaatattaaggaaaatttacattacattttattcttttgtttattttttatatagttcttgggattgcattttttgaagttgagtatatttgggtataatgtgctttaatacattgaacttcttccacccctttgttttctaaagggcttttttgttgaattttaaaggaagtttagatttttaaaaacccaacattgttgttaatagagttgaagatacgtgcgtgtgttatttcaacaaaggctgctgggtggaatgtgtactgtgggaacctttatttaagcaattttgctgctttagttgcatcctttattcattctgcaaaaaattcactagccatgagctggagtacggctactcttttcccattcccccactgttgatcaaataaagctatggaaaaagaaggagagggagaagtaaaaggaaagagaagaaagaagaaggattaagtattaccttcaggaccaaagagtggaagtattttctttaacatttaatgaagtaaataaagggagtacaaagtcaagtagcaataagaaaaacttgaaatgcacgagggcaggaaattgctctgtaaatatgattaaattctagacccaacrttcagtggaaacaagttttagaatttttccattagagatcattaaaaacattatttctctcaaacaaggtgacaagtggaagagcgtgcacttgatttctaanttgccaccctccttagattcttctgacatactagcagtggccaaattccaatatacattcatagttcaatgcaccttttcatactgtggaggcacctgcatatccactttctccctaatcctttgactattcaaataatattatcaatgcacaattatgtcagtgatttttcttcatgaattgtaaccctgtgctagctaaagtatgtcaccatcatatcagtgctagtaaatattgtggttccttgggtgaaactcaaagacttgtattcaggatccttaaacatgttatccatctagtttctaagagggaggacaggaaatgtttagttttaaagtttagttttttgtgtttttcatggcctgtagcataagtccccatgttgcatagtcacactgaaacttgatattatattttgtggttgctgtgcatccaagattcctttatactcctcacatataaactgagttttatgtccttactgcctgaattttccttagaagtcctgtaatccaaatgattttagcatcaactccacagagaagtcatgaagcctgtagaccatactctatgtaaatctctggttcatttctcgttgctaatctccaccctcgtacccttcccttgactttgtcacttgtatttttctttkaaaccctttccatatttaaaacaccacaatattgacatgtgagccatcttctcgagagagaatcaggtattctcttagccttctaccttctgttgccgttccaaggctattactgtttagagcttaacttcttgtaataacttgcatcactccccttgtgtcckcttaacaaacaatcacatcactgctcactcatcatttccctcaatgtgacagtatgaagaattcaatttaatccttgctatatgggagtgacagtagaaaactgggccatgatggatcaagcattatcaattccacagatgctcttacccaaaactcaggtcataaatactgtgaacgtgccctgaaaatactttctacttgtatcctcacccaaattatacgcatttataccatagcgcaatatattcccccatactactgaggaaattcctatatctatgaatgctacaagagatccaaatgtagtttgctttgaaggtagaccattgtcaaatgaccgttgattaatcttatttatgctttgataatatgtataatgtttaacagcttgaagtagcctcaatctttaatggacatttgtggtgaaaccacaataaaacagtgcttgagccttgggttttcatagtctctaggctctaattcaagcaatttcctatccatacaaccaatagattcttcaaatatcttgtgaatatgacaaatttcttctaaaatagcatagctttctagttcctagcttctgtttaaaatctagaaaccaatttattattccctatccaaatagattccctaggtacataaccctatatccaaaggttacagtgtaaatataaagagaactttatcaatggttttatgatgtgtatttttaaaggaattttmtcctttgttttttaaaacaatgtaacctatatgaattttgttttcatcttaaaccaaatgaaactgaagtaatatatcttacctagggtcagaaaacaaagatacaatggagttgagatttggcttggtggtgttgtcttcacattagggattttcctctgtcttatgtgccagagcagttgagaattctatatgacattaaaaatctcttaatttttagttcataaatattgaaaattaatttgattattgattctgttgattaaggttgttgcacataaacgtgcctaaaattccttagtgctcctactttctgagttagctggaatgcttgtgytttgggcataccttatgtgcaactctattgtgatgaatattatgaaatgtaactgtttcttcactgaaaggaacaaatgataaatatttcatcgaatgaatacgtactattgttgttgagctttctgagttggagaaagagcagactttcttgaggargtggtttcgaatcagaactagaaagatgagaaagacatcttccttccattttccatggccacctctgcttcagactcaccttttttctgttcatatcctttgcccactttttgatgggtttgtttgtttgtttcttgaaaatttgtttaagttctttgtagattctggatactagcccttkgttagatggatagattgcaaaaatttcctcctattctgtaggttgcctgttcactctgrtgatagtttcttttgctgtgcagaagctctttagtttaattagwtcccatttgtcarttgtggcttttgttgccattgcttttagtgttttagtcatgaagtctttgcacatgcctttgtccggaatggtattacctaggttttcttctaaggtttttgtggttttaggtcttacatttaggcctttaatccatcctgagttaatttttgtataaggtgtaaggaaggggtccagtttcagttttctgcatatggctagccagttttcccaacaccatttattaaatagggaatccttttcccattgcttgtttttgtcaggtttgtcgaggatcagatggttgtagatgtgtagcattatttctgaggcctcttgtctattccactcgtctatatatctgttttggtaccagtaccatgctgttttggtgactgtaggcttgtagtatagtttgaagtcaggtagcatggtgcctccagctttgttctttttgcttaggattgtcttggctgtatgggctcttttttggtgccatgtgaaatttaaagtagtttttcctaattgtgtgaagaaagacaatggtggcttgatgcggatggcattgaatctataaattactttgggcagcatggccattttcatgctattgattcttcctatccatgagcatggaatgttttttcatttgtttgggtcctctattatttccttgagcagtggtttgcagttctccttgaagaggtccttcacatcccttgtaaggtgtattcctaggtagtttattttctttgtggcaactcacctttttatgacttgcaccacggataattaagtgatgtctttgtgtcttctcaccagacaaccatgtccctgcctgacctttccttttatgtgacagtagcagcagttgtattttagttcctgctgaagtgaagaaagtgaagttttaaagaaagtaatggtttgtgaattgggatgatatgacagactttagtaatragagtagtttgcctgtgttggagaatcctagaaaatgagtaacaactgtcatgaagaatgattcaaacgtgatgttttcattgataggaagagagaatgatcatatctgcaacctaaggactaaaagagctgatgtcttgggctccgtatccacataggctacctctggaatactaaaacaaatgtacttctcaatttttactggagaagagatgcagtttaaacgctgccacagagttagtatttttagtgtcccaaacaataatggtccagatgtgttatttcaactataaatttcactttttattgtaaaaggttaaagaactttacaaaataatttttattaagtttcttacatttgtttttctggccattctctctatagttttctaattataaattaatgatgggaaatttattaccaaactggttcacaagattctttgtttacatagtttctactataccagtttgacttgaattataaaaattaggttgatatatctcgagtatgaaaggaccctttaaaattcaattgtgagctgtgaaacaatattacaactctaaggtaagcctactaaattttaggaaattgattttaagtagagtataatgtaatccctaaattatttaagtctacttggaaacatattttatactgtaaaactgcttactacaatactaatgctttcacttgcctctattacaaatgctgaaaaactcatattaraacaaatctatctttcatgccaactataatacagatattgtgtcttagttaaaataatagggaagcgtgttagtgcccaggtaagatttcatgctaacagtgctgcctaagaataactttatataaaggtttccttcttctttctgaaagttattttttaattgctcaacataggccaatccttagtgacattgtatttgaaattgtttaagaatctatttatattttgagtaacttatcatgattaacaagtttgaacatttgccttaaatttgttaagaaggaaatttctatattctctttcactgtttacttttttcttcctcagtaaggcaatttaattgctttcaagtaatttcaaggtcatccttagtttttggtcttgtgcatgttcccaagaacttaattatagaagtttttctgtaatgaatatgacagagaacccaactctacacaactgatctatatttatgttcctactgaggcatggtagtcctccttccccacacttgcctgcccatgaaatcgaaatatttggcaggattaattctcaaaagataaaaacactctaattgaagaaaagtatcaattcaaatcatatcttttaagaagaaatatattctttactttcctgcttaaatttgaaatagtagcagttgaaaattgtggattggaactaattactgattaaaacaaagtacacctatgagttttaatagaagcagtaagagtaatgtgtaaatgacttttctttgttcatggaaaccattgtggttttcaggtgcagcttaccttcacaaaagctaattgtagagataattacatccaaatgcacaaattggggaaaacacagagaagcttcattcagaattcactgacactatgaaagacaggatggtataaaagagttagtgtgctctgaaaaaggaagttcttaaaaactttggaactccagagtcttgggtttgatttctgcttccatcatttaattgaatttcaggcaggttatctaaactctgcctcagtttgctcattgttcatgcaacagagtttctatgcagactacacatagtaatatattttaagctttagacataaatagagttcattcctcactgaccgattttcttttaataaataaatcattcttaaaatttcttttcttgaagtacgttataggtcagatacaatagctcacttctgtcccagcaatttgggaggccaaggtgggaagatggcttaaggccagtttttcaggaccttcttggacaacagagtggggctccatctctacagaaaaaattaaaataaaaaataaacgtaaaaaaataaagtatgttgtaatttggcctgtttaatttgacaatgccattagtagtatacactggaaagctgttatactatggttgttgcccattgtcagtaggcaacatttcaatgagctgtaatgttaaactgaaaataccctttttcttgagcaattatgtgctatttatatataatatatattatgtgattatatatcatataataaagtatatattatatagaatacatataatacatttacatataatatgtataacattttctataatgaatacgccagagaacccaattctacacaactgatctatatttatgttcctactgagtcatggtagtcctccttccccacacttacctgcccatgatatcgaaatatataattatatgttatacatattatatagcaattawaggcatcacacaattttctttatatatcaccaattctatttatattatatttacattatgtaaatatatagagtatatttatatgtaaatatatagaatatatgtaaatatattatttatataaatcttaagatataggtatgggcaattttgattttacaaacttcttcagggttctgtatatccatttgcataaagttttgattgtatgcatttttatatgggacactgacttatttttcatccaataaatggtaaatttctatccattagaggatttacctttgatttcattttggtgatactttaaatcataggtcagctattagaaaaccaattacaaattacaacgtggtaactaaatgatatttactaaagcaaagcatatcaattgatatttttaagttatatgttagcatacgcgcacacacacacacacgcgcacgcgataggatccagattgatgccctaataaagtaacaagttagttaaagatgaagtgaatttataaacataccgttatataaaactgtctagatagaacaaacaaatatcacttgtgatgaaatacttgaaatttagttcaccacatgcactgttgccatcatttttttttatgagaggattcagctattgtatcgagtgtttgcaagcgtgaattcagaatcttggtaggaaaaaggtaaaagacaaattgctatcttctgaaaggaggtgtgaattgttcatatgtgcagattttacattaacgagaaaccttaactttctcaaaagaagaaaggcatttctaacaatgttacgtataacatatttttgttcttctgaaaacttgtgtttcattttcttttaggaaaaaaaaaagatcagrctcttaggccaatttttcagactcttctgtagattacttgagcagatatgaaatcaataagaccttaggtaaacagtatggtacatattttttttaagtctctgatacattgagtctcaaaatatgttgcacattaaccgaagacatgtttgtagaattcatagcacttattatatcttgattatactgaaacatttttaactttgacaattataaatccatcttgcagtttctccaaattcattttattttaattagctatgatttgacatcatagtccattatacacttacttgactaagtctatgctatcagtttttctacaaccaccacttcctatcagtaaataattgaaaggctttattcttataaagcacaattatgtttgcttgatcagtagtcttcaactatatctgctcatgtgtcccctaaaataattgagaaaaatagtataaaatcaataacttttgaattcaatacattcaagcaatgatgtcattatatatgtggttcatcttcctgacacacgggagatgtttctcttagacctcagtgccagaacagtataatttcagagcaacaatactattttcttggaatataagtgggaagctcacaactattcatatttctctctttgtcaagaaaagttataaggtttaacacaattatgaaagccagaaaacaaatgtatttttgtagcacttttgtagaaactcctggctttatgttactgtctctcactttccaataatgctttttttaaataatrgaatttgttatgtgtttctgcaaattgcatgatatcctttgtgaatgaagtagatactaattaactatttctaaacagaccgctacaatacagtgtgaaaagttttaccataactgaaaatgtgttaataaagaagtggctacaggctgtgtctcatacactgtaattcttttcagtagccttgcatctctmattgattttgcagtactaaggccttcatttcttctgttacattccaatattcttttctcttgttttatctttagcattaatagatatgaagaaaaaaactatcctgtactttaactagattcagacgctatttccttttgttcattaatcctacttaaactctctatagtgtgtattttaaaaaatgtttgtacatgctttttggaaaagtgctatatatccagctaatcatttctatatacagttaaaaagtagaggtaacagtgcttatttctttatttatatatttagaggcggagttttgctcttgttgcctaggctggagtgcaatggcacgatcttggctcactgcaacctccgcctcccaggttcaagygattctcccacctcagcctcccaagtagttgggattacaggtgcctgccaccacacccagtttattttttgtatttttagtagagatggggtttccccacattggccatgctggtctcgaactcctgacgtcaggcgattcacccaccttggcctcccaaagtgctgggattacaggtgtaagccaccatgtccagtcagtgcttattttaaaatgaaacatcaggaacattttgaaaaacatttttgcataaagtatcagggctatgtttttgttcttgataccaattgccagctgattgcattattgtgtttaaaattatcctggggcataaatttatccagagtctgatctaattaatttcaggctcctttgcagatagttttagggaccaatcatctctgagattttttgtgaacacaggagggctcttcttgattttctctttacctgattatctatggtgaatgaatagctgacccacagtttagcttgatactctcatggagctactatcctctcttaatctcacttccaaaatctctattattattcagagtgccttcaagtttaaccttccccacactttattccaaacaagtgagttcctttcrggagagctttggagctctgttcttatggactgcctactccatgggcaaaattcctgtgtctccctgctctgtagttggctcctggacagtggtctacttctctcagagtgatactttggctttacgggcagggtactcggtggagtgataacatctggtcttcctcttatagcttgaaactttcctcttatagcatgaaacttttgccctttgagtgagtagaggcaagggtgatcggggcccgcccattcgttttcttggcttgccatacctggagtagagctttcaccatagaagtggggggtcagacaaaggaataaagcctagacctctcagccattgttkcctggaagagattctgaaacagagatttgggaatgggggctgagaaacactggtgctctgcccttgaagagaagataccacctctcttgactaggaatggacggatagggagccctattgttcttggctgcacccatctggagtggcgcttctctcatgctcagctgtgggtgagctgtgggtgtttgtggctcaaattccacagactcttgctgctcttgctaagatttagcagaatttctaaaataaatgtttcttcctttactgtctgctcttaggacaatttccagatattaccctttttttttttttttggtataaccttcaccacttatggttgttttgctgtggagaaggtccacagattctagattctgccatcattctagaaaccatctctttgctgcctacattattaacatcatttattgtatcttgtttaaatgaatacatatatttatgtgtcagtaattgggccagatactaagaggaaaaagatgactttgtcatgagtgtgccttgcgagaagcacaagtttaaactggaaaaatgtaaacaatattatcatttgtgtaaaatacaaaatgatgtgagtrcataatatcattgtgaaagatatctatgcataacaagataaacactgggtgataactttagtgtggaatactcctttgaagaaatcaaaatatggggatatttatgtttattgkaaataaggtgaaataactttactaatatgttattttctggaaataggtgaaagtctacatcattctatggttcccttattttaacctgtaatgtcagctcaatttctattttatgaaatgcagatatgaattaatcagcttttattttataatagtaagaaaatatatagattttaaacattgttctaatagaaattgctatttttaacaacttaaaatttatttyataaatgtaagcccaaaatatcagcacaaaagaaatgtcaaacttgatttacccattccattctttggaaaacctagattttctatcctacagaatgtaccttcagcacttttctcagtctgttttaaaataacctctgtgactgagcttctaccacagtctcaggaacctgttccataattcatttattgttcagagtcaggaaatcgcttcagatattcaactcaaatttccgttaccattatgaaaataactttcctctattaggatattttatatttatcctattcactgcctctaagtttttcccatgccacacaaacatgtatgtcacaaatatttatatatttgtgtgatttaagatattaaaaatctaaaatacaacatttaaaaaaccgaatctacagtattgggtaatatttttggttatagaaagcaatcacaraattttcacattggactcttttgcatgaggatttagggttcttaatttgataagccagacaaattattatcaatattatttacaaagatgaaaaaaaaacctcaggaaggcccaattgtttgcagtagctataaaaatggcctaaattatcttaaactgcataaacagkttataatattgtgataatatgcagtaactgactctttgtgtattttactactagggctatatttgaagtctagtgctcagatatttgatgaaggctcttacaatattcttgttgagaagatctccatttgggagtgcagacaatgcagtataagctggattatgttatgttgtaaaattttatttttaatgtgtataaatttatgtacttgtatagccatataaggaaattttatttatatttaatttttaackttctgttcttactactgacttgaatgaagacaaagagcatttttattatgtgtgtaaaacatggtccattttgaaaggatattgattatgatggctaaaaactcaagactcaaaataatttttacaagctaaagaaaataaccttaccaatataaataatttgtattaaacattacaaaatatactaaattaaaaggatgagttattaccttttattatttttataacatacatcatactttctgaatatatttcattcttaaatgtatgcctttgttagttctaaacactagaaatgaaggtatttatcaaattgtttatgtcattttcagtgtcttctgtaatatgggattattgtattaaatcacttatttaattcatttataaaaatgttagtaaactgcttattcagaatcagtcatttctgttagaagataaaagtaatggttaaactgaaaggycttttatttttttccactatattgaggtaattttaactattcattgagataagagatattaactaatgactttgatgaaatgaaacaaatgactagttaaggtagactctatagtcaaaaactaaatagatcatttaaattacagaactgctttaaactaatcggatattttattgtaccctgagagtttattataaaaatttagataggcaaaagccccatctggcaaccgtgttactacaagctaagtacagagaatcttgctgccagcagaggcatttcatgcttcatgtctggaaaaaaaaaaaaaaaaaaaaaaaaargctataatttagttgtgtaygcttgttcagatgatttcaagttggtgcttttgatagtgcaagttccagctgctcaggcctatgagtcctcttgtgaaaaattatgaaatcccagccaagttaactgcagtcgtttgatagatctcatgtatattggtaggaattgctgtacgttgctgtctttagagctaatgttgttttaaaataagaactatttaaaatcattaagaagaaaatctgaggcaaatatttgacattttgtatgcattaaatggctctgtcatttttgaaggtattttgctagactaaatgagatgtgcaaaatgcctgttataatatggatcttttggaatttaaaagcatctacccaatttgaaatgtgtactccatgtaggctatagctcctttaatgctgaaaatatcttccccaattaacttaattaactggaaactgtcactgttggcactgcactggcatagccaaatacttaaaaatgtgaaattattcttgctagaataagaagtggcttgaagggtaaccaggaatgtacttaggggctagttaacagtatcaagcctaagagaaatttacatttacagagaaacatcatttactccatcatcatcatgaacagtggtaactgatgtgagatcaggtgaaggagcacgttatttgcaataggaaacatatattgagtgttcttgtgaagtaagaggcatgaagtacgactacagggaatattgtggggtgcaggcagctgagggtaattctttgctttaaaggatttcatgcagagaaaaatgactctagattctgtgccatgcccaaggaagaagctggatttcatcccagtgcttgttcaaaaaataaatgtaaaacgcacaacacgtctactttgaaagcactaaatagaaaaaatttaaaatataaatttaagtacttgaagtgaaatactcaaaagatttcatgtaccattaaatgaaaataatgtagccctacttatgtctcaatagaatctcaattgtaggagaaataaaattatatgagtaaagaaaatgagatgtgaaataggtagtaaatggtgaatattcattttaaactgtatctttttataaattatttgattataggggattctcttttactttcttcttctatgattactttttgtaatatctataactagaatgccaatgattgctgagtgttaaaagaaattcaracatatgattaatgtttggagtaaagagtaattaatgcccataagcattttttcaattttaaattttagctaagtacagttcaacaatatttatgtagcatctctaatgtacctgcactacactctaccttcacaaaaatgaatcgagcatagttgtggtgtgtggtgagtgtccagcatactgtggcaccacaaagaaggaaaacagttcaaactgacagtttagaggaaacttcctgcaacagctgccacattaaagatgaaatagatgaataaaaaataaataagttaaatgattaattaaatgacctaaaacgtttaaagcattttgccacacattatttcttttttttttttttcatcggactcttatgggaattccagatgcttcacaggatatttttctcattttgcaaatgagaaaattgatagtaatgcagtgaacactcttgtctaatgttcatataatccagtgtacaactagtgtattaaagagcataactcaaagccaggtaataatcttgctctaagtatattctccctccttcccatcccccatcaatctgcttgttaaactcgataaaagctgtcatgtaataggcagtaagtcagctgcctattgacttgtcatacaggtaagatcttttggtatgatggttttggtgcatatttcctatctgtggagactgtcactgtttagagtttggcatttaattttcacaagatactgcatagttatctcagagtttataaagtacctttaaaacatggtttatgcagataagttgttattactgtttttcccaggccgatttcttatgtttaatactcagtgtagttgrgcagctcattaaagccaactggacaaggtcctatgaaactaggccactaggcagtttccagggtagcaaagtatagttcctttccaatgagtaaagcaataggtgcagatcgtgaaaggaaatatytgggccatgtcctgttcacctctcaggttgcttgctcagctgtaagctttggtgcaatgctatacagattcaacatatattctcktctatcctttattactccaaactcttatggttactaaggcactcattttataacacaatgggatataaaataaataagaattatttgccagaartaattcctgccttaaattggacaactcagatgaattctaaatgcttatttttgtgagaaaatagtatttgtccaaataaaaaattaagatttaccatttaattaatgtatattcaatattctaattaatcaatcctcctctttttctatttttgtctccttccaaacaaatttttatatttaatttagcactgagtagtcatacataatatttaattggcagactacctttatttttaaaggcaaatattattcatttaacacattctctttgtttaaatgtcaactactcatctcccagttagttatcttgcttaccttcatcttgaatatttccattttcagatttcttaatcttatgcaacttacttcataaagtcctaattcatgtgttggattaaggagaaaacatgaataaattaatttttgaacataaataatatgtatattattatttttgtcaccacataatgccttctattgattaagttcccaatacctatatttttgtattgaatccaggtccagtttaaaaaactgaactcttttattttcaatagagaaaatacttacatatggaagatattctgtctttatcagctctgcttgatacataattgactaatgttagaaatgttttcaaaggaagaattcctactgcaaatatccatggcttaataaatctggcatgtattgttcatatacagccggttaattggtgtcctgacacatagcttctgcataattccttcaggtgttagttcattgtccagatgatttaatatctttgagtatcattcggtctcatccytactttaaaataactggaattattagatctgctactagatgatgctataggagatatttacatagaataatatatgttactgtatcacaaatttgtgttttaaaaatgtttgtgataactgtagttcaatgtaattgggtgttttttgcaaccctacacattttcactggaatgcccaagggatctatggaacaaagaaaggtcaagaacccctattttaaaattgccaataacaagctaacrttcacacatcacccccaattcattcttatccttaactatttttttaattatgcttaatgcctatggtttccctacagaagagaaacagaaaacaacagtttttttcttaatatgtgaatagaatgtacttctatatttattcagtctttacttccaaatatgctaattactaagcttaataagtaattgcatagttttatctgaatgaattttagggcattaaataattcacacattttaaaatatactggctttaatatttaaatcttgaatacactggttttgattttgtcctatgttaaagatgtcagtattgataatgaactcctgaaagttcaatattgtgattttcaaagtgtgctcatcagctcctataaaccacaaaatacatagattaaagtaatctctggataccacatctataaaacatggtcttgtggtcttattagcaaagtgctagacaaagtagcgatwtgaagtttctttcgactctgagaacaggtattatattctatataatgccaacatatatgtatgtataataaggatgaatatttatatttattcttaatatatcacttttagtatgatacatatttttacacaaacaaattgaaattgaatttgaagtcttccagtggaacgtacctaacatattcaaataaagtaaaatctcaagtcctggtaagtgtttcttcatccccatcaccaactccattactggtatttggtattaggtacatatccactcctcttctggcttctggctctgggacatacccagctggcataattggtagtgtggagaarggagacaaatagtcttcctacaaaccagaagaggttcttaagaggcattccacctttccaaccactgtgacattgagatggcttacagtaatctcatgctcagttaaaaatgacaaaaatatttctcaacactaaaatgattctcaaagccttctcatttcttgtatatacaaagactcagagacttgcatacacagataaatttatcatctcttacagaatcttctcaactgatattcttgctttttgatttctatcagaaacaaccatttcccttgctattattgattagttataaaatgccatcctttcaccatrtagtccagatactattaataacttcttgttggctccaggacaaattcaacattagtagcatagttatcaaatccttggtagtaatgactatgaagagcaccaataaatagcatgcttcttccctatacaggttctaaaaaattaaaatatctgaaaaggtcttaataaaatgtgacttttattaatgataaagatgaagttggaagatacagcttattaagagggcaaaattgccctgttaattgaatcagagaatcaggcagatttagccaatatgacacagggtatttttgtcctttgggagaaaaaattccacatcatcaaaataaactagtaagtgaataagaaaataagtaagtaagtaagtaaataaatattttaaagccttaaaagacataacatcacattctgaatttactgccaattttaagaagtctttatttttatagaggatttgccataaatacatacaatttttcctttaaattaatgctaaactrttgtttcaatgaagtgttattgagtgcttactatgttcaaagcattagcctaggttttaatggagaaacaaagaccaggaacatctctgtcctcgcttaattcataatctagtgggtaagatgaacacataaataaaacccacaataacccaaaacctcttgaattatgctaaatatcagaaatgctattacaggttaatgatgtgctacaccaataggtgggaagaaaagttaattttctgttcagcaacagatcctgcttaaaagaaatatgttaaaataaattataattaagatgaagcctgtttctgtacttatcttgataaacctaacataaagataatatacactgtttattaaaacaaacaaaattattaaaacatatctccagaaatattttgcaacttaaaactttggtaatgatttaattatgacacttcatccgataatgcagtactcataatttttattaaatatacatgatccaataaccattagactctgaaagctcctttgaaactagaccttggctcagaaaaaaaaatacatattaggaatttaacaaaatgttttctgaaaaataacttttcacttctccttaagaaacgtccattactagaatgtgaaagacaaaacaaatattttcattttacagcataagaaagagcaataaccccagtaaattttttcatttccctcagtttcttcattagcagtttctttaccatgtgtaatttaaaaataggaaggtaacctaaggataacaactaatttaatcctgcatttttaaagctgagaaatctggtgctcagagggagtcacagctagtcagtggcagactggagacgtgaccaaactctggagtctcccttgagttcccttcctaggaggcagtggtgctctagggctcagtgtgtttctctgcttgtctttcttttttttttttttttgtcagcagttttaaatttgaatcttaatgtatctggaatgtggtcaaacattattaaatattttgaacggcactgacctgccattaccatatgatgatgttaccagctgagtgataattcagatttggcacatggttatgaggttaacatctcaagatacgacatgtaaactaaggtgtgttttatcccctgattatctccctcctccttctattataaaaccttttgaatggattatttttttttcttcgtactcttttcttaccttttaagttgactttattcaacttctagaacttgtttaagccctcttatttttcaatgaaaatggttttgtttacttatttttagtattattttatatttgggggtacatgtgcatgtttattacatggatatattatgtaatggtgagatttgagcttctagtgtacccatctacaatagtgagcattgtacccaataggtaatttttcaacccttataggtacttttcagtacctattatttctgtctttatgtttatgtgtacccattgtttagcttcacttataggtgagatcatgtggtatttgattttgcgtttgagatattccacttaggataaygactttcatttccatccatgttgctgcaaaggacatgattttcttttttatttctgtgtagtgttccatggggtatatataccacattttcttcatccagtaatcccttgaaggacaggttgattccatgactttggtgttgtgagtagcgctgtgataaacaaattagtgcaggtgtctttatgtatataatgattttttttttcctttgggtagatacacagtagtggagttgctgagtcaaatggaagtyctctttttagttctttgagaaatctccatgccgtttcccatagaggttatgccartttacattcccacctacaatgaaaagtatcccattttctctgcattcataccaacatctgttgytttttgactttttaataatagctgttctgactggtgtaatatgtattttattgtggttttaatttgcatttgtctaacaattagtgatgttgagcattttctcatttttatyggctgcttgcatgtcttactttgagaaatgttggtttatgttctttgcctacttgttaacgggattatttgttttttcttgttgagttattttagttgcttggaaattctggatattactctttagtcagaggcataatttgcaaatattttctcctattctgtagattgtcagtttactctgctgattatttcttttgctgtgcagaagcattttagtttacttaagtcccatctgtctatttctgcttttgttgcttgtgctatcaaggtcttcatcgtaaattatttacctagtccaacacccagaagagtttttcctaggctttcttctaagatttttagtttcaggtcttaccattaagcccttaatccatcttggttaatttttgtgtatggtgagtaacaggggtcaacttttgttcttctgcatatggctagccaattttcccagcaccggtcaggcacggaggctcatacctgtaataccagcactttgggaagccaaagcaagaggattgcttgagcccaaaagttcaagaccagctcaggaaacacagtgaaaccctctctctacaaaaaattttaagaaattaggcaagcatgatgattcatgcctgtggtcccagctrcaaggggagctgagactagagaatcacttgagcctggtaggttgaggctgcagtgagctgtgttttccactgcactccagcctgggcaacagagtgagaccttcaaaaaaattccagcaccattaattgagaagggagtttttgccccattgtttatttttgttgactttgttgaagagcagttagctatagttatgtggctttatttctgggttctttattccatttcattgatctctgtctctttttgtaccaataccatgcagttttggtaactatagccttgaaatataattttaactcaaggaattatatgcctctagcttttttcttttttcttaaaatttctttggccatttgggcacatttttggttccatatgaattttaggattgttttcccaacttctgtgaaaaatggcattggtaattggatatgaatttaattgaatctgtagatttctttgggcagtgtggtcattttaatattgattcttgaaatctttgaggatgggatgtttatccatttgtttatatcatctatgatttctttcagcagtacttcgtagttctccttgtagagattattcacttccttggttaaatatattcctaggtattttattttattgtcagctattgtaaatgagattgagttttgaatttggttggtagcttgaatgttattagtgtacagaaatgctgctgatttttgtatgttgattttgtaccctgaaactttactgtagtcgtttatctagtcaggagtcctttggaggagtcttttgggtttctaggtataagttcatgttgtaagtgaagagagataatttcacttgccgttttccaatatgaatgccttttatttctttctcttacctgattgctctggttaggaattccagtactgtgttgaataggagaggtgaaagtgggcctttttgtctctttycagttcktagggggaaagttttcaacctttccccattcrgtctgatactggctgtgggtttgtgatacatggctgctaatattttgaggtattttctttccatgcctagtttgttgagagtttttatttatgagaggatgttggagtttatcaagtgattttttttatatctattgaggtggttgtatggtttttgtttctaatcttatttatgttgtgaatcacgttcattgatttgtgtatgctgaaccacccttgcatcgtgcagtagaagcaaattgatcaggatgaattatcttttccatgtgttgttagattctgtttgctagtattttggtgaggatttttgcatctgtgtttatcagggatatttttgttgttgttgttgttgttgttgtatccttccctgattttggcatcatggtgatactggatttgcagactgagttaggaaggaatgtttcctcctcaatttttttggaatagtttcagtaagattggtacccgttctttttggttgtaataattttattacaagttcaattttaatgctcattcttgctctttttaaggtttctattccttctttattctatctaggaaggyggtatgtttataagaatgtatccatttctttaagttttctagtttgtgcacatggaaatgttcatagtagtctttcatgatgttttgtatttccgtggtatcaactgcactgttatttttgtcatttttgattgcgcttatttgaattttgtctcttttatctgtagttaatctagcttgtagtctattgattttgcttatcctttcaaaaattaactttcaatttcattaatcttagtatcatttctttattctcaatcttatttaattttgatctgatctttgttactccttgtcttttcttagcttggttttggtttgttcttgttttctgttttcttgaggtgtgacattaaattattaatttgatatctttctttttggtgtagacatttaatgctgtaaattcttagtattgcttttgctgtatcccagaggttttgatatgttgtttctctatttttactcatttcaaaagatgttttgatatccactttaatttccttgttcacccaaaagtaattcaggagcaagttgtttaggttctgtgtacttttttgaattttaagagttcctcttggtgttgatttctcattttagttcaccctgcttcaataaggtacttgatatgattttgattttttaaaatttaccaagacttgctttattgccaggtatatggtcaattttgaaaactgttacacagatgacaaaaatgtttattctgcagttttggggtagaatgctttataaatgtccattaattagttccatttggtctaaagtgcagtttaaatccagaatttctttgttgattttctatctctctatgataatctatctggatatcccccttctacaaccacagctagtgctctcttgaaagcaccaccgcctggctggaggtcaaccaactcaatccattatagcaactcagaagagaacaaccctgctccaaagaaggagaaaacaatagctaattccactgccagtaacaccctggctaaccagaggtcctgagtctgactacrtgacaactttagtgctagcataattagcatttaagaaaaccagtgcactaaacatgaggacacaaaggcatgagaatagtataatggactctggagacttgggtaaaatcgtgggagtggggtgagggataaaatgctacccactgggtgcagtgtacactgtctggtgatgggtgcaccaaaatctcagaaatcaccactaaagaacttatccaaacatcgtaaccaaacatgacgtgttccccaaagaactattaaaattaaaaaagactaaatattgatttaacaaaaaaaaatccagtgagattagtgaagtgttgaaatctccccctaatattgtcttgctgtctcttttcttaagtttcgtaatatttgttttatgaatctgagtgcttgggtatagagtgcgtatgtatctaggatagttaaagcttgttgcattgaatgctttattgttttataatgccagtttagtatttttatactgttgtttgcttaaagtctgttttatctaatataataataggtactgctgtttgctttggttttccatttctgattattgccttgttgatgtttcttttgtatagtattttccaggtgttctctgtctttcttgtatatgatgtctatatctctagcaagatcaagtatttttttttcattattccttcaaatatatttttcaaatttctttttcttattatccctcaggaatgcctgtaagtcataggtttgatcacactacataatcctccaaggctttgttcattaaaaatattttttctctatttttgtatgactggctcatttcaaaagactggtcttcaagttcttaaattatttcttctgccttttctaatctattgtgaaagctttgaactgtattttgaaattcctatagtgaattttccatttacagaaattgttttttaaaaaayatatctgtctcatcctttatattatgaattgattcatttattattttgtgttggttttccactttctcttggatgtcwtgtgctttcttatagtccatgttgtcaattctttatcatttcagaatttatattttggttgggatccattgatatacagcttgcatcatcattggagatattgaaacactttgtctttttgtactgctggagttcttgggctgactctatttcatctgaaaaagcagtcacctgtttttgaaattggtattgatttgataggacttttaaatttattattcttttctcccctgtggatatcactgtagggtatgttatatatgagcgtttggcattgtttctaggagctttcagagagccagtgttctgtttgagttccttggttattatcttgtacagtggctttctcaaattctggttgttgtggcaatgtatttggcgtatgaacccactcacctgctgtgggaatgagagtgtggatgtctcacaaagcttctttcatactctagcatgattcccttctgtcatcagattttttattttgtgttcccatttggtctccagttcagttgtaggcaataaagattgggtaaaccaatgatgagtgaaagcaccctccctgacccctgattggagtagagtagtgtgggaagttcatggtgagatgtgctgaggcccaggtgcgggaggagactacaccagcttgggtgcagacggacacatgatccacttctctatcatgctcctgtataagggcttgccatcttccattcacagagacactgtcctttatcttcagggcatgatgcaactgagttccatgggggtggggggwtggtggggaggggtgtggcggggaacctatctggcagcagtaaaatggccaggggaagaacctcttcagtcagtccaaaacagatagatttgcagctggtctgccctccgatgcaaggacacttctgctgtgtgtagagagggagaggtgagccttgccctctgtgtgagcacaggcagcggacacacttttaatgaatgtgcagctattgtgaataccactgggaaggttgttttcaagtgcagtcatgccagcctccagagggaaaaaccttggctacatccatagcatggacaggggaagagggggtgaccctccttcacctccttttccaggcagccagtgctgcctatcctctgggacaaaacaatgctcccctcttttgaagacttggactttatctgtgtttcctttgtctcaggaggtgctttggcagcttgccctctcattttccataggaatggcacatgccatacactagatctccaggtatcccacagctctccgggacctactagtccctgtgtttgccaaagtcagagtgtgttctagggtgtgtttgtgggagatttagtgatgcagtaacataaaggctgagattccctggtcaaagcagtggcccagaatgggtacacaaccagtatggcacacactgcctcagttcaggctgcctcagttcaggcttgtgcagagtataaccacacgtgtgcaagcaggccatctggtgctctgcccccaagaagttctcaractgccacagtgttgcccagacttgtgagggcagaggggctctctgacaatttggtactcagtaggctgttgcagggtgaaggggccaaagaattacttccacctaccctttttgagggactccaggttccttgcggatcagtctgccatattcttgctaccctccttttctgcaccacagatgcttcttgtgggttttccaactggttttggcactctgccctcagctttccagtagggccgtgattgttcacctatgatctcgtatctgatggaggakaacttgtatctgatctctgtagctagtgattttgaataaaaactacttttgaaaatagtcatgtaccacataaggacatttcagtcaagaatgggctgattatatgacactggtcccattagattataataccatagtttttctgaaacttttattatgattagatatgtttatatacataaatgccatttcttacaatatcctacagtattcagtaaagtaacatgcttgtagtaaagtacaggctggtagtctagttgcgacaggttataccatatagccatgatgtgtagtagtctatcccacctagatttatgtaagtacactctatgmtgttcctagaatgataaaattgcctaatgacacatttgtcagaatgcatactcattgttaagtgatgcatgactgtatttataataaactttgacaaaaatacaagtttgtttggacaacattagagaatcaagacagtgctatcccttagaatattttgcgttgatagaaatgtcctaagacttatattgtccaatacagtagcccctagccccatgtgaatattgagtacttgaaatgtgcagtgaagagactaaatttttattttatttcaattaatttaaattaaaatagttgtctctgactagtacctaccgtagcagacaacaactggatagcgtatttctgaaaattagctgtggcactcatataatcagtaagtcaaggaagcaaaaaaatgacaaactaagagaaactaaagagacttatgttagtctttgtcactcactcagctctcattctcccctttcagtgctattttgatcattctttgtatattttgggtagatgtcctttgtcagatataggttttgcagttatgtcctcactgtcagtggcttgtctttttattcttttagcatggtatttttgtagtgcagaagtttttaattgtgataaagtgcaacttatttcttatttcatggatcatgcttttgttggtatatttacaaactcataatcaaaccaaaaatcatgatgattttaccttactttttgagaagatttttagttttgcatttttatattttagtttatgatgcattttgaattcatttggtaaaacatgtcagatctttatctaggtttattttcttttgcatatgtatgtccaagttctctagcaccatttgtgaaatgactatcttttttccattgaattcatattacttctttgtaaaaaatctgttgaatatatttacatgagtatatttggggttctatatttctttcttttacctatgtgtctcttctgcctaataccagagtgtgttgattattatagatttatagattattacagatttattatagattattatagatttatagattattatgattattatagaagtcaggtagtgtgagtctyactttttttctttaatgttgtgttcctttttgtgggcctttccatgtaatcatttttaaatttccagatgttttactgtaaattgataatttataattatatatatttatggggtacaatgtgatgttatgcttcataagttcaatgggatacgtaagtcaagctagttaacatattactctggtttggatatctctttcaaacctcatgttgaaatttgatccccagtgttttaggtgaggactaatggaaggtgttttggtcaagaatgcagatctgtcatgaatagattaatgtcttccattagagagtgagtgagttctcactctattagttcccaggacagctggttttttttgttttgttttgttttgtttttccatcttttgattcttctcttaccatgtgacctttgcacatgtctactcccctttgccttcgactttgagtggaagcagcctaaggcatcaccataagctgagcagatggtaacaccatgtatcttgtgcagcatacagaacatgaacctaataaacctcttttctttataaattattcatctttaggtatttctttataacaacatgaaatagattaagacaaatatctgttaactaaaacgcatttgttatgttaaaaaattgaaatagctgggcacagtggctcatgmctgtgatcccagcactttgggaggctgaggtgggcagatcacgaggtcagattgagaccatcctggccaacatggtgaaaccycgtctctattaaaaatacaaaaattagctgggcgtagtggcgcgtgcgtgtagtcccagctacttgggaggctgaggcaagagaatcacttgaacctaggaggtggaggttgcagtgagccgagatcatggaactgcactccagcttggcaacagagtgagactacatcacaaaaaaaaaaaaaaaagaaagaaaagaaatatactctcttatgaatttccaaatatgtaatactctataattaaccatatttatcatgaggtgcaatagatattttttaaaacccacatattccttctgttcatctgagattttctaccctttgaccatcaactccaattccctccacgctccaatttttttttcctgtaaaagcactctgttctctgcctctatgagttttatttctatagattccatatgttagagagaacatgtagtaattgtatatctatgcctggcttattttacttagcataatgttctccaatttcatgtagtcaaaaatgacaaaatttatttccttttaagcatgcatattttgtcattgggtatatataccacatttctttattcatttgtgtgttgttgtacacttgggttgattccatgacttgactattgttaatagtgctgcaacatacatgggggtgccgacattcctttgacaaattcaaatcttttggataaatacacagaagtgggattgcttgatcacttgtaattctattttttgkttttttttttctttttttgaggaatctctgtaaagttttccataatagctgtaataatttacattcccaccaagagcgtacaagggttcccttttctccacaaccctgcaacacttgttatcttttaactttttggtagttgccaattctgaaaggtgtgagataatatcttattgtggttttaatttgcatttttcatgattaatgatattgagtattttttatatttctgtttgctatttttatttcttttttgtgagatgtcaattcaactttcttgcccatttttttgtttttgtgctgttgagttctttcaatttcttacatattktagatattaaatccttctcagatgtgtgccttgcacaaattaacagtgtgattttcacactgttaattgtcttctatgctgttcagtagcttttaaatgtgatgtaatcctatttgtctatttttatttggttgcctgtgcttttggggtcaaatccaagaaaaataattggccagctctttcttatgtaattattccgtgatttttttttcttcttttagttgaacaatttctggtcttatgtttaaatcttctatccattttagggtatgagttttgtatacagtattaggtaaggatccaatttcatttttctgcatgtggatattcagcttttccaacactatttattgaagaaacagtttctttccattgagtattcttggcatgtttattgaaaggcaatagatcatacgtgtgtgggttcatttctggtgttttaattatcatagctctgtggtatacagaagtttgtaattatgtagtacaataacttcagctttctttttttaactcatgattaccttggttatttgagggttttattggtttcctatgtaaattaggcttaattgtatttatgtgaaatatgatattagaattttgatagagatcgcattaagtgtttagatcactttgggtagtatgtgcattttaataatattaactcttccaattcatgaacatggaatatgttttcatatatttgtgtcatcaatgtctttcatcaaagtattttaagttttagtatactgatttttcctctccttaattatttcttgatttcttttttagatagtttgttcttagtgtctataaatgctactgatttttgcctgttgaatttgtatcctgtagctttacagtatttacatattatttctaacaatatttttggtggtcatttcctatacgtaagatcatgtcatcagcaaatatcaacaattttacttcttccttttctattcagatgacttttttttttctcttatcttattgctctggcaagggtttagagtactttgtttaatagaggtggtaagagtgagtattattgtcttgttccagatctcagaggaaggayttcaawtattcaccattgaatataaatgttagctgtcagcttcttacatatgggcttcactgttgtgttgaaatgcatgtcttctatacctaatttagtgaggttttggtgatgaaagtttgttgaattttgtcaaatgctttttctacatttaatgaaataatcatatggtttttgttctttattctgttaacatatttattgatgtgtgtgggctgaaccatctttgcatcccatggataaatctcacataatcttggtggatgatacttttagtaagttgttgatttggtttacatttgttttgatgattatttttgcatctgtattcttcaagtatattagcctctaatttgtgcacatgtgtgtctgttttgtccttgttctggctttrgtagcagacagttcttgcctcttaaaaagagtttggatgtgttcatttcttttcaatttttttggaagagtttgagaaagatagatattgtttcttctttaaatgtttcgtagaattcagcagtgaaggcatcatcaggttttctttgctrgatgaactgattcaatctcatttgttattgatatgtttgcattttgtatgtcttcatgattttgtcttttgttgttgttgttgttgttttagtttttatttccaaaggtttgggggagcaggtgtggactagtgagggttctctagagggacagaactaataggatatatatatatatatatatatatayakatakatakagagagagagagagagagagagaragagagagagasagagagrgacagagagagagagagagagagagacagagagagagaggagtttcttaagtattaactcacatggtcacaaggtcccacaataggccgtctgcaagctgaggaagaaggagagccagtctgagtctcaaaattgaaaaactaggagtccgatgttcgagggcagaaagcatcgagcacaggagaaatatgtaggctgagagactaagccagtctagtcttttgacatttttctgctgattttatattctagctggcagctgataagatggtgcccaccctgattaagggtgggtctgccttctccagcccactgactcaaatgttaatctcctttggcaacaacctcacagacacacccaggatcaatactttgcatccttcaatccaatcaagtagacactcagtattaaccatcacaagtccacgccttctcaacgtgaactcatacacatctcctgaggttatacataatcttcaaataaagacaagagtaaggtcataattactcctaacataataccttgtacatccagaaatgcatcaatccggaacccaaatactattacataaagttagcaatacttaaatactgatataaagtcaataaatcttatgtcacatgataaaggagaaagaaaatgaaatgaagatattttcgtagtacaagtatacacaaacatgtttttaacaaaagaaggaggaaatactcatgacaattccagtccttgtttcttcagctggtcatgtgttcgtagttggtattgatgactaccttctcctactacccattctgtattctatttgccttcagcaagtacctcagcaggtcatggtttttttcctggtggagtgacccaaactttcattcttgaagggtctgggacatttgtagtcctgcctggattgggctgttgtagtttcccattgaccttaatcacagggcatggtaatattaagagacaccctgatagatctcctatatatcatgcatattcttccttacctctgttgtagagtagtaaactgatttcatcttgatagtccgggtcaatcaccccagccaacactgtaactcccttcttggcctgttgacctaaaggtaggaggagcccaaagtgtccaggtgccaatgttaacttctagtttaatggaatcattgtgcttcctggtggcagcattcctccctctggaactaagacctctaggccagcaaaacgtaaggtcacgggarcaggaagcaaaaattttgctagtagatcactagaggtgatggtcagtggtcccacttycacttccaccccttgattcctggaccgatgaatcctggctttgggagaaagagcaccatatattggacgctgattcagagtatacacagccttctggagaactttgcctcagccctgcaaagtattgtcacctagttggcattgtaattgtgacttcaaaaggccattccactgttctataaatccaggtgcttcaggatgatgggaaacatggtaagaccagtgaattccttgagcatgagcccactgccacaattttttaggcataaagtgagtgccttggtcagaggcattgctgtgtggaataccatgatggtggataaggcattccatgtgtccagggatggtagccttggcagaagcattgcatgcaggataggcaaacccatatctggagtaagcatctattcyagtgaggacaaacctctgccctttcyatgatggaagaggtccaatataatcaacccaccaccaggtagctggctgatcaccccaagtaatggtgccatatggaaatctcagtgttggtctctgctgctggcaaattaggcactcagcagtcactgtagctaggtcagccttggtgagtggaagtccatgttgctgtgctgagcccacgtataacctcagtacctgccaccatggccactttgttcatgggcccattgggcgataacaggaatggctggggaaagaggctgagtggtgtccacagaacgggtcatcctattgacttgattattaaaatcctcctctgctgaggtcacccattggtgagcactcacatagcatacaaatatcttaacagtttttgatcacttggagaggtccatccacatccctcttccccaaatttctttgtcaccaattttcctatcatgcttcttccatgtccttgaccatccagccaaatcattaatgacagcccatgaatcagcatataattgtacatctggccatttatctttccatgctaagtgcataatcaggtgcactgcttgaagttctgcccactgggaagatttcccttcaccactgtccttcaggaatatcctagaaagaggctgtagtgttgcagctgttcactttcaggtggtgcctgcatatcgtgcagaaccatctgtgaagcakgycctagttttctctttctctgtcaactgatcttagggaacttcccataargccactggtgcaggcttggggagagaaggcagggtggccggagtacagaccatgggcatttgagccacttcctcatgtaacttccttgtgccttcaggacctgttcaagcctgatcacatatataccacttctatttaatgatggaatgctgctgcacacaacccactttatgrctagatgggtcagaaagcacccagttcatgataggcagtacaggtggcatggtgccttgatgacccgtaggcaaacattcagtttccaccaaagcccagtaacaggtctagagctgtctctcaaaaggagaatagttatctgcagaagatggcatggccttgctctaaaatcctagaggactctgctctgatccacctatgggggcctgccaaaggctccagtaagcctccctatctgccactgacacctcaagcaccatgggatctgctggatgatatggcccaagtggcagagcagcttgcacagcagcctagatctgttgcggagccttctccgcctggattccactccaaactggcagcctttcgggtcacttgataaatggcccagagtaacaaagccaaatgacgaatgtgttgcctccaaaatacaaatagacccactgggcgttgtgcctctttcttgcttgtaggaggggccaaatgcagcaacttatctttcaccttaggaggaatatctcaacaggccccacaccactggacccctagaaattactgaggtagaaggtccctgaaattcagttggatttatttcccatcctctggcactcaaatgtctcaccaataagtctagtgtgtttgctgcttcttgctcactggatccaatcagcataatgtcatcaatgtaatggacaagtgtgatatcttgcagaagtgaagtgatcatggtctctctcaataagattatgacacaaagccagagagttgatatacccctgaggtaggacagtaaaggtgcattgctggccttgccagctgaaggccaattgcttctggtgggccttatggacaggaatggagaagaatgcatttgccaaatcagtgtctacataccaggtaccaggagatgtgttaatttgctcaagcaataaaaccacatctggtacaacagctgcaattggagtcaccacctggcttagcttatgataatccactgtcattctccaagagccgtctgtcttctgcacaggccaaataggagagttgaacggggatgtggtgggaatcaccactcctgcatcttttaagtccttgatggtggcactaatctccaccatccctccagagatgcaatattgttttttatttaccatttttctaggtagaggcagctctaatagcttccattttgcctttcccaccataatatccctcactctaccagttagggggccaatgtgggggttctgccagctgctaaatatgtccatgccaattatgcattctggcactggggaaatgaccacaggatgaattcagggacccactggacccactgcaagtcagatctgagctaaaactccattaattacctgatctccacaagtttctactttaaatggaggcccacaatgacgttttgtgtcctctggaatcaatgtcagctcagagccagtgtccagtagtccctgaaatgcctatcatttctctttcaccagaagtctccttggggaaggatggaagaaatattaacagcataaattgtcagtagtgtagtggggtccttccttaaggggaccgggactccccttcattcaaggggtactgggtctgtaaactggatcaagtctggaaattgattgaggggccatgwttctctgtttttataatccaaattggtcttttgtccatttgacctagaagttttctgcttatgtaaattaaggaggaatgcaataggcttcctattaattttaattctaggaacactgtgattaattagctaatgcccaaactctacacaagtcagagtatttttaatgctgctttgcctctgctgtttattacagtagctatgctcaccttgattttgatggttcagtgccaccacttggcttctgctgcctgggatccaattattcccactgtatttaaattttgtagttgagtgactgtggttcccaccgttagatctgacatatggagaagagcaattacagggttttttaaagatgcagatgctgccctcataaacttatttcacaaggcattggtcaagggtatgtcttctagacactcccagccgggatgagtatgtctaaagtgactaacccacttcatcatcccaatctccctaagtcttgggatctcttcctctacattaaaccaagggagatcagacattttcagctcactcagtgtgggacatattttaatccatattttagctaactaagcaaataaactattaggattttttatttttatctatttttattattattgttattattattatactttaagttttagggtacatgtgcacaatgtgcaggtttgttacatatgtatacatgtgccatgatggtgtgctgcacccattaactaactcatcatttatctatttatttttttttgagatagagtctccctctgacacccaggctagagtgcagtggcacaatcccagctcactgcaacttctgcctcccaggtttaagtgattctcctacctcagccccctgagtagctgggattacaggcacccaccatgacacatggctactttttgtatttttagtagagatgatgttttcccatatcggttagtctggtcttgaactcctgacctcaggtgatctgcccgtctcagcctcccaaagtgctgggattacaggtgtgagccaccatgcccggcctattagaatttatttttaacttcccgatctgcaacattaaatgcagagtccctacttagtgggcccaaatcaatcagttcagcctgatccaactcaatgttccatccatcattatctcacacccttaatattcattcccatgcttgttatccagatttctgcttatatatattagaaaactcaagcagttgttttcaagtgtagcatacctcctcatgggtcacactctgaaccttacctctaggagcccgctgggactctattctagttataggtctagaggcaaacaggtattagggttggcttgtgaagataatcaacattatcttgcctggcaactgcctcaggggaggccatgactgttgcctcaggcagaacagggtttatttccttagacaaaggtagaaaggctgatggcagcatgggtcggggaggggatgttgccactactagggatggggaagctgtttcttytggcaaaaaaggtgcatcagtgtttacaaagtcagcgttcccagcttcatcagggtcctcccacacatcctcattccaagttttagggtgccattcttttccaatcaatgccctcactttaacagtagaaacctggtgaggctgtgcatgcacctttcactgcaggtcagccacttgcatgataagagctcgtgtcctgttttccacaatttcagctctttctctataggaggtaagactctcactcagggcaatctaagcagatttgaggcttagtgtctgcttctgaaacagggagttgcaatccctgagttcataattttctttcatcactttgtccactgaactaggagcaaccaaccagcttcattgttttttggttctctacatacagtcaaagatattatgtgcagagtcactaaactccttgcctcacatgagctgtgaatctggaatgtcaaatgcatttagtttgtataactctccaaacagtttacaccaaggactatcagtgttctccatactattagaagtagagtccttagcattttggggtttaatcatattaagcagtcaacttcagaaacccccgaaccaatgaaagaacaccatccttaatattctgtttctctagaaccactcctggtaccaaaatctgtattagtcagtgttctctagaggaaaagaactaataagatagttagatagatataaaggggagtttattacgtattcactcacacactcgcaatgtcccacagtaggccagctgcaagctgaggagcaaggagagcctatccaagtcccaaaactgaagaactcagagtccgatgttcaagggcaggaagcatccagcatgggagaaaaatgtaagctgggaggctaggccagtttattcttttcacatttttctgcctgctttatattctagccacactggcaactgattagatggcacccaccgagattaagtttggttcacctttcccagcccactgactcaaatgttaatctcctttggcaacaccctcacagacacactcagcatcaatactttgcatccttcaatccaatcaagttgacactcagtcaacacttaatcatcacaaggtggtatttggttacatgaataagttatttagtggtgatttgtgagattttggtgcacccatctctggagcagtatacgctgaacccaatttgtagtcttttttccctcaccctcctctcaccctttaccctgcatctccaaagttcattgtatcattcttatgcctttgcatcttcatagcttagctccaacatatgagtgagaacatatgatrtttggttttccattcccgagctacttcactcagaataagtctccagtttcatttaggttgctgcaaatgccgttaatttgttcctttttatgactgagtagtattccatcataaatagacacattgaccaatggaacagaatagagaacccagaaataaacccaaatatttacagccaactgatcctggacaaagcaaataaaaacataaagtgggggaaaggactccctgttcaaaaaatggtgctgggatcaatggcaagccacatgtaagagaaagaaactggatcattgtctgtcaccttatatgaaataaactcaaaatggatcaaggacttaaatctaagacctgaaactataatgtcttcatttaatcttctgaaatttgctgaggcttgttttgtttcataacatatgatttattttggggaatgttccctgcagtctttagaagaatttgtattctgttgttatctgttggttggaagattctatacatgtctgttagatccattttgtctacaatgttttttgaaccaattactcccttattaattttctgtttataagtagagtattgaaagtagggcattgaagtcccaccttgttatttaattgtgatctatctctcttttcagttcttttaatgtttgttgaatatatatttagcttttccaattttgggtgcggtgcatatatatttacaactgatataactttttgatgaattgacctcttatcattatattatgtccctctttgtcttttttttttttttacaattttttacttaaagtctattttttttttaagtataactatgctgtctatcttttgagattcacttgtgtggaatatcttttatattccttcactttcagttatgtgtgccctttatagtgaagtcaatctctttttagtaacaggtaggtattttttttaatccattcagtaactctatttctttttgttgagaaatgtaataaatttacattccaggtaattactgacgagtaaggacttactactgtcactttgttttctgattgttttgtaggttttttttttctttctctcttgcagtctttctttgtggttccatggttttctgtagtggttcatgctttaaatcatgtgtgtaattcctgctttgaatgcaggcattcatgctttgaattcattctactttttttgtttgtgctctactaaagatttttgcttttttattaccatgttgtttactagaacatcctgtacttattgcattctatttcagtctgataagaacttaaattttattgwatacaacaactctggactgttactcctcccttcacagtttatgtttttgatgccagaattggtaacatttttattatgtatcccttgataatttattttcgctatagttgttgttttgcattttaatgcccatactaggaataaaattgcattacacaccttacacacacatcattaaaatcctagagtactctgaaaatgttgttttacttataccattaggttttgtgcttttgtatgttattgttgcaatttaaatattaataactcccattaagattcctgtaaggcaggtctagtgatgttatactcccttagcttttgtttgtctacaaaagttcttatttccccatgactctgaaaagacagttttactggataaagtattcctcattcgcagttttcttttttcttcagcactttgaatatattattcaaatttctcttggcctgtagggtttcttctaagaaatatgttgacagttctattgccattcatttgtgtgaaatgtttgtcttgtttcttgctactctcagaatagtttctttgcttttgatagtttgattattatgtatcttgttgtagtcctctctgggttgaatttgactgagctctgtgcttcccctacctgggagtttacatctatccttagattagggaagtcttcaaccattatttctctaaatatgatttctggctgctcttctctttcttctcctcctgcaactcttattatgcaaagacttgttctagtgaaggtgtctgaatttttaagaggctttctttattcttttttattcttttgtctttttgctcctctgactggattatttcaaattgtctgttttccactcactgatcctttgatttgtttgttctattccgctgtttgagctttctgttgagtttttcagttctggtgtattttttatctctaggattcctatctgattcttttttattgattctatttctttgtcaaactaatcatttttgtgtattgttttccaaactttattacgtttttcatccatatatccttgtactttactgagctttttaaatgagcattattgtgacttctttttcagtcatttcaatgatatttatttcttttggatttactattgtagctttattgtacatttggagatgttatgactccctaattcctcataattcttgtttccttgcattgttgtctgtacatttgtggagacttccctctcttttgtttttaaggttttttgtttgtttgtttgtttttttgtcagggatagatcttaactatttaatatagcctgtgattctggaatggcamtctggtaataaccctggcctggtagagcttgctgtcrgttttccagttggcttggctgctactttagctgtgatgtcaggtggagcttctggttgggctctactatcaggcatagcttctgtctcaggactgcagtgtcctctggtcaggctggtcacagcatatattacctggcwgggcaattctgctctttgcaatctgcagttgggcagggctgcaggctgggctttgagttaggtgcagctgctacttggagggacaaataggaccagagtctatgctcattagaactggaagactgagaatagttttcctgntaggttgaagccatggggtgagcttttggctaagttgagtggctgtttgactttccaggtcaaaccagtgtagcccctttatttctctggaatgtatggaggtagaagtctccctggctcagcaaggtcattgggtgggcttttgtgctgagtggagctactgcataacttcccaggtcaaatcagtttagcctttgtgctttttgtaaaatatacagaggtgggagtcttcctgtcttggtcaatycaagggcrtggacactagctgcctagggacccaaggtaagttaaacttcccaccatatttttgaaggcaactaggtcagttttttaagtgcactgagaagttgacttgtaactctaatctggtgccacaactggcaggaaaacagagcaaccaccaagattcatgcgctagtcactatgacctgcacttccttcctttgtttctgtctgagtctgagtattcttgccattctgttttccctagtgttctccatgaggtgaatttagcatggacttcctggaaagaatgttggaattctagggaagctggatgactgcctgtcattttcttcttcctttgtagaaactgtgggtcaggaaaatcctctctgtctggtattgtgccgacttggggaagggaataaagtggtttagttgaactaagaccattcttcttacccttctaagtcagatttaattctgttctatggaacatatggatgtttcagacatatttccaagtattggaattttcagaaggttattgtggtctgtggaaagttgctaggtgaactttctgttgggggtggggaagtggaacttgagactttctattttgctatcttgctgatgccactatttatttagtcttttgtatcagtattaatgtatatacaatagcgtactgacattttgattggaattgtgttgaatttatagatcaagttgggagtaatttattccacagtgttgtcttctaatccatgaaaacactatttctaaatttatttggatgtttgatttgttttatctgaattttgtagtctaacatatatagattttatacatattatgtaacatttacacctaaatgtttaattttttggtgctattgtaaatttaattgttaaatattaagagtacatttactaaatgtttattgccatattttgagttttgtgtattgtgactttgctatagtcacaatactatagcaccaaatacacaatactatagcactatttgctatagtcatttattggtttcgggaattttttttttctattgtagatacattgtgattttcttcatagacaatatgtcatgtgcaagtaatgacaattttatttctttctttccaatccattaaactgatctttctctttcttgccttattggtctgagatccagtacaatgttgactagaagtggtaggagaggaattccttgccttgattccaatcttgtggaggaaaccttctagtcttttaatgttcattttgttggtttaggtttttgtaaacatttttattcaagtcgaggaatttctacaatagtaattcttgatttctattgtctgaaagattttatggtgaattgctgttggatttcgaaattttatgcattagttaataagttaatatgtgaatttttttggcctgcttatgtggtggatttcattcatgtttcaaatgttgaatcggccatacatacctagattaaatgtgtgctacatgtttatttattatattttttttgtgatggatagattgaaataatcttttttattataaataaatttaagtaatctaggataaaaaatagcttcaatttttattcaaattgggtttagattgctgttttagtaccattttgtcraggatttctgtgtctatcttcataagaggtattggtccataatttttctttttgtactattttttctggtttggtattaaggtaatgctggcatcataaaatattttaggaagtatttcctctgcttcttctttctggaaaaattgtgaggaattggtattcttttttcttaactatttggtagaattcaccaatgaaactactgggcctggtgctttctttgttggaagtataattattgattcaacttctacaacaggtataggattattcaggttatgtatttatccttgtgtattttggtagttttgtgtgttttgatagttttgtgtgttttgatagtttgtgtatttcaagaagtttttttcattgtaactaagttataaacttgatagatgtagccttgttcatactatttctttattgtccttttgatgtttataacatcagtagaactaatgattttctcaaactacagatctaagtagtgcaagaaacactaacaggataaatactaaaagtgtacatttagtcacttcgtattcaaactgtggaaaactaaagacaaattgaaaatcttgaaggcatccaggggtggggggtaaatgaaaaggtacctcacctctacaggaacatggataagaaatacagcaactttctcaatgctaactatgtgaacaagaagagaatggaatggattattgaagtatagaaggaaaaatgaataatttcatatctaataaaattatctttcaaaactgaagaataaacatttttaaacaaaaagctgaaggaaattttttctagcagacttgtccataagaaattttgtaatctatagaaacttctgagatcaaggaacttggaaatgggactatggtgaacagaaacacagagatgcataggtatgctaccatgatgtcagcattgagaaagtatttttttgttcatgtggacatagtgtgtatttctataaagttatatctaaaactgttcaagtaatgtttccttgttgatgctactattatggttcagtctagggtgaccctcaaatatttgcaggatggggatcaagatgacaaaatagacactcctattatttgtctaaatatttcctatttataaaatcaatagaaaattattaaatatatattagacccttttaaaaaggcacactgaataacatggctacacactcaataacatggctaaaattagaatgaatgataatatcttgccctgtgaaaggtgtgtggagcagctggaactctgacacatttctagtgaaaaagtgccttagagaacggtttgtcatttcttataaagttaagaaatgtactaccatttaatccagaaaatgactattgatactctcaaaatatagatgactcttaaaaaacactatgctgagggaagggaatcaggcacaaaaggctgtataattctatgtgtacaaatgcgagaagaaaaaaatataacttatagtgacaaaaggcatatatcagcaggtctgagaatttgcgtgggcttcacacagaaggagcacaaggattcctttagagtacaatgcatattttctacattttaattggagcagtgtttacatgggtatatacatttgtctaaactcattgaactgcaaacaaaaaatattttttattttattgcatttgaataatactttaaataaaggtagtttgaaaaaatgtttcttaactaagagggccaagaattagcattaaattagtgacagatctgggttttatattttcccctacattgcttgaaggtgcacataaatagaatctacatcattatattttaaaagagatttaatcattcagatgagaccaatctggtttccatggatgataaggaagctgtatatctgttatacagatgtgattaaaaaaagaagttaaaaagagagagatatgtccttaggtttctagccaaaaggaatatgttcatagtctttgaacaatggattcagaatttgaatcgagtatatttcctattttatattaaattactctgatgtagcaatgtttgctgttttatattttgttatagatctgcgtacaacaaataatattgcaaataaagccagtattaagtggacttcatttcctacagaaataattatagttattaaaaaatgacttcttttcattagatgagatattttgattttttgatgcctagaccacctgttttctattctaaccaagaaaagtcatggaattagaaagtagtaaaatatatacactattcttgtaatattacatacctctcacttgtagggaaagtttaattaattttaatagatatggattctatgatttaatatgaaaaataatcagtttggtattagagacattttaaatcaatgaccatgaggttaagttaaatcgattaagaatatattgtgctctgaaaattcttcaatgaaatgtgatgcccttaaattaattttaaatgtataccatagttttgattagatgagattctgaattgagttttagattgctgtagaacaaataatgaaagtaactacatcaaaaggaatactacataagcctttctggagagattttgaacatttagtggtaaatattaataacaaactctgagggtaggctgcctgggtttcattagaatgtcacttagtaactgggaaagcttggaagatgagtgagcacaaggggctttctcttttatcacactgagatgattataaataatgcccatcccatagacttgttatgtagcttaaatgagttaatatatggaacattttagaacagtgcctagcacatgagcacagcataagtgttacctctttcgttattgtatatgttggatgggaacacaactggtcattgaaattttctagtggtactagcgagaaaggatatcagagaagaaaatgaaaacttttggtaggtgaggtagagctatggaatatgttaatatttaggctaagatgcaagaaataaaggtaaaggttttgtcagttttcttactagcatactccaagaatcacaaatagaggcaggcaaatagtagtcaacaaatacttgttgaattgaattgatctttcccaaaacttaatgttcagttatatctgaatagttataattaaatgtgtaatttacataaaaatagaacttggaactatttactgaaaggctactgcaaacttaaaaggaaattatgaattagataatctgcatgtacaaaaacgcaaaaaagtggagcaaagaggaggtgacaataagtcattctcattagatgggaaaaaatagaaagggatggaaaaactctaaggaaaaagattttttgtcaatcttaatgaattaactgttaaacttgacgaagtttggtttcatcttccctgtttcctttttgtaatgtgaatcactaaaagatgaccagtaagaatggaggttggtaaataactacaggaaaactaaattttataactgtgctttggacccccactcatagcttgctttaaagtcccaggaaaaaatctttttataagagtagaatgccttcatttaatgacctcagattctttcttacaaagggtacaatctaccttctgtaatacctcagcctggggatccatgactgtttttcagtgggtgaatatccattcaggagggagcacatgaggtctgttaatagccaaaacaatagtaagttgctactatcatgtggttctgtttagttgggtgtggttactgaagacacaaagccaatttattgcatcactctcccttccctgctctttcatcaatctactttttcccaagaccacataattttacttttggaattatcataaatgattactaaaatcatggagatgaatttgcaagactgaattgcaaggtaaactcaactttattttgtaactaaaggacagctagggtaaaaaaaaaatactggtgccaaacaattctatattcaaaacatgtttgtgcattagaaataaattaatgggccaggcgcggttgctcacgcctgtaatcccagcactttygaaggccgaggcgggcagatcacgaggtcaggggatggagaccatcctggctaacatggtgaaaccccgtctctactaaaaatacaaaaaatcagctgggcgtggtggtgggcgccggtagtcccagccaccagggaggctgaggcaggagaatggcrtgaacccgggaggcggagcttgcagtgagccgagatcgcgccattgcactccagcccggacgacagagcgagactccgtctcaaaaaaacaaaaaaaaaaaacaaaaaaaagaaagaaaagaagaaataaattaaagactggtaaatccacaatcttgagattttgtgattttctaattctgtaagatgtatatgtatgtggtttttgaagaatgcaaggtaatgtgggcttaacatgcaatgcatgtaccaatggaggttgacttttttttattcacttgggggtctcccatatgggagtgcatgaaataccacagtacatgggaaaaaagaggccagagtgaagaaatagcgatatgaggcaaaaaaacaatatctgagggacaataatgtttttattatgctgcaatggaataagaacccatatttgatcaataagcaatcttaaaggtcatttctaaaagaatactcagctgcagcttaaaagataatttttaattactatttttacgtctctggactataaaatttaaaaaaaagtttcatattagtttagtgatgcaaggagaaaatattmaccgaaaatttaacaatataatgatatatattagagttttccctccccagtagcatgaataaagagccactaagcataaattgcaatggtacctaatgggtagtattaacccataatataaatagatattaaagctgttttaaaaagtgaccactgatacgtatttctgtagagatcttaactgatttctagacgttggaaggctactgtgccataataaactacttttttcttgcttgaataaattcacactaaacattcctcagaaggttcatagttatcttgaaagtcaaacattattgcagaatcttcagaagtaaattaaaaccacattgattttgtttaaagtagcacaggatttaaactagcagtgtttatgtaaggaaaattaagtacctccataagtagttgtgaagaggtgaagaggaaatatcaaatattataaaacaaaaaaaggagagtcaataaagatattttagaccttctaaaaatataggaagaagtttgggtatgtgtgtgtagatatggatatatatggtcatacatatagtcatatatatatccatatccacacacacacgtgtgtgtgtgtggatatggatatatgtgtatatgtgcatatatgtatatgggtatatatatccatatacacacacagaaacttttagatttgcatatatttctgcatacatatgcagaaatataaacctgcattcatatatgtatatacataaacatatgatatgtttattgcatataatcaggtaaaattttaaggattttaagaggaaactataaatagggcaagtttattacttatccttagagcactgtgttatttcatattggtttacaattctataatgtaatcttttctacaaaagtaagtacacacgatatgcccttgaccttatgatgtaaccgaaattattttattaaagcaaggcttacataaaaaaggccagggtatgtttgacaatgttctatataggtctgatgagttgtgagaaagagtatgttcatttaaaggtgtacctactggtaatttagctttgtgttgatgtttataacagcaattaagttttggaactagcatatttctttggcatactcagtaaacacttattaaataagtgttgacttattgttttgaattttttagttcctagaatatttaaatacttgaaaaaggatcaggaatagtatatgaccaatttcttaatttttaatggcatgcttgcattatttagttagcacattcaatttaattattttgattattaaagtaggttttccttcttatggtgtattattagtatcctggttctttttattagtattaactaacagaaaatgtccagaggcaatgaaaaacgcaaaacccagtgtaaattaataatgaacagcaagatttataatgattgtgagtaaatacaaagatcagcagctggtttatacagatggtcaataaaatgttggaatgtccaaaacataaacataaggggtgatggtaggaggcgggtagtgattagatatgtgatcactgaggttaactgttagttttggtagaacatggagcttttttttcttccactagaaatttccttcatgaaaaaaattatcaaaatgctccaattcaaattacaatgcctcttacagcatgtatacctcagtttattttgatagcctgaaatggctgctagagcatctgaaaaatatctgatttaaaaatcaagtaatcatttaggtcataagacatttaggtccattatttgacagctaaattgaataattgatataatttcatatttctgaatttactggtaaaatatgtgggcttcctctcagaattacatctagtcatttggaaatgcaaatcttacaaatatttattagccttattttattgtttttttagcatcacagagatcagtgatattttaaccctacctcaagcaatatattctgattaatatataaaattaaacaatcaaattgtacttttaggattccactatatgtgcctcaccatcctaaactaccttttatggtttttgtatccccgccatcccaattaccacacacaccagagtacacgcatagatacagtaccttagcaaaccatattctatgaaaactgacaaagtgattatcaggaaagaaagcaaagtatgctggtcatttgaactttatccctattttggccctcagaaatgtcatgcagttaattttttcttcttcttgatattgtgccagtaataataatcagtaagaaagtcaaccccatgcccagcatgaataggtgagtactaaaataaaataatacctatataacaatcaatgcaatgtaacagcgaaatgtcttgagacatgtaaaaatgtgtgttatcatcactttacctatagcaattttcaaagtatggggtttgcaacccaggaaatgtggaagatgcttcactgaagtgggaaaaatgaaacacttttattttatttttatatccttatatattatatataatacgtaaagatacacatcatctttatatttatctttatattttaccttttaattttctatttttgagttaaagtgatacctatgttaattcccagcaaacatgattcattacaaattcatactcaaacatttttaattgattaatgaacatggggcctgttgcgagaggactgttaatgtactcctccatgagatctcctgatcatcaactttccaatcatgttctttgcagttcccttaccagctggcgaacctgttagctactgctcatggtttagttcaggttcctacctcaagccatctctcccttcacacagtgctcagtcaaatttcccctctaaatttctgcctgatggaacgatttcctttcactcactgacttgcaggaccatgcatcagtagggttataaagaagcaactgctagcagttgctagcatatcggtgaattcttatttaatctaagcttgcaatttttcttcctttattaactggtcataaggtactccctgtgaaattatagttgtggttgagagagccaaccttagcaaccccacagagaagaactatggaaataaatgccttgacctcattcatcttctgtctcctaatactccatcattgccttaccaaccaggagtcaaagggaaagggaccctggctggtatggacatagaggtcagcaacccgaagcagagagctggagatggtgcagtcaggcctgtggagccaaataaatagcattcagcacaaccgccctcaacaaagtttcacagtccagcattagatttaattttataaattaaaatactttagagtatttgaggtgatccatttttctcttcacacttagtccagtattattttattgataattcgtaattgcaaattttgtgaaagatatatatattttttacttccaaaaaggacttgttagagcctgctaatacttgcctcatgctttctgtgactaaattaatgtttggagctctgttagatattttatgaaggtttataataaataaaatgttacatccagaaattattttaaaaatatatgtccacttcctaactagatgcatagtcaatgaatgcagtactcttttctttatgacaaaagtgagtatatttttcaaacatgatgaatccagcatgctgctcaaagcttactattttctatctgcggantaactcacaatgaatattggattatgtaaacagcttctgtaaaatggcccttgttttacttgagatgtcctcttccaaagggcttctcaaaacatctggcagccagattggtgcttttgtttccaaagaattcatggttatttcaaaaaaaaattttttttggcaaaatgggaagaatggggaagataaggatatttcctgtataaagctgaaactaaggccattactggagccattgcaagataagggccttttaaatattttttattgaggaagctcattcttaatacagaagaaaataatttcatatttcagcataattttattatcttagtgaacactttaaaagttgggtcaatggtttccaggaaacatttgtgactgtaacatgtgccaaacaacctcttattgtatataagaagcgtatgagcttaatgtgtattagtagaatatattataaggatgattgtgaaaggattggcaaacatttttatagtaatataggagtatgctttttcctaaaaaggaaacaaggaccttgctacttattttttctcagctactaaatattttccttttctgtaaattgtaatgaatttcctgtgaggaacttatatcctagaacaaatcgtattcctttataggtgctcctctgccygcttctcatcttatgtccattaagaaactgtctcttcatggaactctgatcctttctttttcattccccaacatctactgactccactttgtacctgtcactataaaagccaggttatattcattttcactgaagccagatttttcgttaatacctagctaaaattaccctagtgggtgtattagtcagggttctttagaaggacagcgttaataggatagatgcatatataaaaagggagtttattaaggaatattgattcacgtgatcagaaggtgaagtcccacaataggctgtctgtaagctgaggrgcaaggaagccagtccragtcccaamacctcaaaagtagggaagccaacagtgcagccttcagtctgtggccaaaggcctgagagcctcttgcaarccagtgatgtaagtccaagagcccaaaagctgaagagcttggagtaccatgttcgagggcagaaagcatccagtacaggagaaagatgaaggctagaagactcagccagtatagtccttccacatttctctgcctgcttttacctaaccaygctggcagctgattaaattgtgcccacccagattgagggtgggtctgcctttcccagtccacggattcaaaggttaatctcctttggccacaccctcacagacacacccaggaacaataatttgcatccttcatccaaacaaatcaagttgacactcaatattaaccatcatagtaggtaatgtactgatttagaaaatatagataatgcaaatgaaagatgtaaaaggccctttaattaaatgaaccactgctaatcttcattgctgatatatgcatatacttcatttaacttttgtttttccaaaaataggcttattttataacattgttttataatcctttttttttacttagtataacatgaacatctcccacatcattaaatattcttctatgcatcattttaatcactgcatagttttcttatatgaatgcaacacaatttatgcagtactgtatataagatatttgtgggggtgatgatatgtacacttataatgggatccatgcacaaacacacatgcatatacaagctactttaatcatgtatgcagggctgggcrcagtagctcatgcctgtaattccagcactttgggagactgaggcaggtgggtcacctgaggtcaggagttcaagaccaagctggccaacttggtgaaacatgaaaaaataacatgaaaaaataaaaaaaaaaattagctgggcgtgcttgtgcacacctgtaatcccagctacttgggagactaaggcagaagaattgcttgaaccagggaggcagagcttgcagtgggccaagatcacgccatkgcactccagcctgggtgacagggcaagactctgtctcaaaaaaaaaaaaaaaatcatgtatgcaggtaaatctttggacaaatctatatatgttttagaatatatttttaaaaggaatttgtgagtcataagttacaagctatgattcacttgcttgtatagaatagtatgggaaggtgtgatgtgggcatccactgtagtgcctattggctttggcatataaccttccatctaaactaaacggtgaaattatttaaatatcttatttaggaagagattgtgagcaagaaaggcagaataagtgatccatgattgtacagcaaatagctgacaatatttaataagccccagtttgtgttgaggtattgttgagactcctttgtagtagttatacaaaatattatttttattaaaagttactattggggcattgaaataaattaatcatgggctttttaaatttaaatggtgatttgctaaatctctacttatgatctaatttgtgatctaattaaacccattaagtccatagtgtccacacattttcattgtgagttgctatgattaaagatttttgagcttgtattaacacatatcaatttatttataatgtctatacatatagtaatctcaactcaattcatctaactttttttcagtaacataacagaccattwtatatatatatatatatatatatatctgagatggggaaaacccacgttaaaaacctctattctaattacttttttatcagtcttttgataatagaactagattgtctacaaattgccttctactttaaaaaaattattcactgattgaatgcacagtggcaagtactgggatgagccaaaattgatgcacaatgcttcggggagkttcatagactaacggaggaatgaaataattatattaataaaaataacactgacaagtataacaaatagacccaaaattctaatggtttagcaaaataaagttgttgttttgttttgtttttcatgtaaattttgcaatggatatttctcatgagcaaatggctctcttccaagcagtgattcagacatctaggttactgttggtagtgtcractgctgttttccacacatggcttccaaagttgctacagcaggggaaagtacatggagaaccacacacgggaagtttttatgagcctggcttgaattggcacatatcatttctattctcggttaaggaccacacctaactgcagggcaggctggaaaatgttgcatagctatgtgtccaagaggaacaacaactacattagttcaatagttagaatctgtgtgataacatgcaaaaaatggaattgcaacattatgaaaagtataatggaatgatgtaaaagagctataaaattatgaaagagagttatcttacctgaaagttgaaattggtcttcagagatgaacaaggattatttgagtgatcaraggttgaaggaactttctggcaaaagaaatatacagaaagtcaaagagatgagaaaaggaataattctaatacagcwtggttaattttcaattcacccattaaatttccactactttttcagaaggtattttcaggcaaatttacaaagatgtatacataaggaagaatattaattgcattgctgtttataatagatgtgattgaaaccaacataaatattcaaagaaaaagcattggttaaataaatgatggtatatccaaactttggaatattttgcacccattagaaaataagtatggattcacatatttatttggaaaggtttccacaaatgttttttaaatgataaaaattagcatgtacaggctgcgcatggtggctaacgcctgtaatcccgacagtctgggaggcctaggtggaaagatcacctggggtcaggagttcgagacccgcctggccaacatggcaaaacccagtgtctaataaaaatacaaaaattagctggtgacgggcacctgtaattccagctactgaagaggctgaggcacaagaatcgcttgaacccaggaggtggaggytgcagtgagctgagatcgcaccactgcactccagcctgggtaacaaagggagactccgtctcaaaaaacaaacaaacaacaaattggcatgtacaataatgttgaatgaaattataaaattcagcatatatgaatggtcctattttaaatacatatgtatgtttatgtacagattattgctgactgttcattcaagcagtagtttacttgatatttcactgtttttctatagtggcttcctcctttgctttcttccttcctgcctgcctgccttcctgcctaccttcatccttgtaaatgagcatgcattatttttatcataaaaataatatattttgagtaaaaaaaaatgttggtgatcagtgttctcttgtttctgtggataatctctcttagctagctgatgtaaaatgctaccttattgattatctaatagatgacacctttctgagaagtagtagctaatatatgctagacttgatgcagccggggcttgctatttacaactttctacataagaaatgaaaaacaaatcttactgtcagatgtgtcagatttataaaagttgtatatagtttattttcaaagggatgctaaatgaattgctacttgtcatacattaaatagaataaatttagttgtttaatttataggttaactatcatattgatatgtgaagtctatttttgtttctaagakaaatgggccaaagcaagtatatactgaatccccttattttattaagaattaaccctgagccaygtgtgatggtgggttcttgtagtgtcagctactcaaggaggctaaggagggaggatcccttgagcccagaagttcaaggttgtagtgagctgtgaccgtgaaactacacttcagtctaggtgacatagagaaaaccccatctcttttaaaacaatgaaaaaagcaattactcaaataattatccttgataaactagagcctttggactggcaaaagagcatgatctgggtaatggtgagtggagggtaaagtggtttttgtggtggggggtggtggaaaaaccagtatggttttcttatcttctgagtcatctataaacagataattgattgacaagaccaaaagcattgttttagggaaactgatttattggtagcagagtatgaatattcaaatatgagagggactaaaagtcagtgtttctaatttattacaattgtaaaattgaaagtaatgaaagtgaaagatctacaatgccaatgaaaagaaagattttaaaggaaaatatacagaaagtaacaactgagtagatctaagactagaaatacaatttgaaagatttttttgacaagcaaggcatatgggatattattcagattttgattcaatgttatgcttgtaccattattcatcacatattactatgttctctaacagaataaaattattactttaaaatcaatcaacttgaaatgttttttgttgtttgtttttgcttcaagctttttcctagatatagactagttcatttctcttttttcaaagagacactgcccactaataaaggggtaattctgcaaataagaaaatgttcacaatgtaatatacataagcaaataatgcaattgataaatagtgttctttttggtagatttatcagttgttttgtttataatatgatcatcttctttaacactgggaattctaagattaaaataaatgtaaattaaattttttaagtaggttctgtgttagagaaaatgaaaggtataaaatgattctggttttatcatatttctaaaagctttataatgtcattttgagtcaaactaattatttttttaaataatttcactatataattaggaagaaaatagctcatagcataataaattaatctctttttgaagtctacgccagctttggtatttgaacatttcatccatattcaaatcaacaataaaaaaaccacaatgtagatttgcttgccttctgcattacatttgcctattagagtagataaatagcacacatatttagatgacaagtgtttttttttttcctctgactatggggaagcatgatattttgtgagkacatgagtctctttgtgtgtgtgctatgtaaaggaaatcaacaggtgagaaaaatgtatagaaactgatatttaaaggtgcttaagaccagtgataagtcacaacacccaactgcttattctttcccatttgttatttatgctatttgaagaattagaaaagtgttttcttctggtaagatgccttcctccaggtaaaagccagaaaaagtaaaaggctcgttccccactataactacttagcattctttttgcttgagcaaagtgaaaaacaccaataggcctgcttatacacaggcaaaacacacacacacacacacacacacattttaaaaatgtcaaatatatattcattagaagctgtaacagaagaatgtatttaactctggggagaagacgcttaacctgatattctttaagttgttacctattctccactaagaaactgagaataattaggagaatgactacatgttgttgcaagtagtcctaggtatacggacactgtttatgaccattttaatttcattgattatgataccaaaacatggcacaattactcctgctaccactgacaaaactataacttacataatgtgaaaataaaactgtcatgcctttgaatatattgcaaatatcaaatacttctgtgtgctttaaattgaccttcatagcttaaggtgttagagttgagcccatgtcttttccacagagcgaaattttaatcctatctgcttcctagtcttggaagcattgtgttgattatggtgactttctctgcagcatgtctttttatcagtttacagacggtgaaagggatcagaacatgcatccccaaatatgccactttgtcatatgggttattttaagctgcaggctctttcttaagaaagagcacatgcaggaagctgtttctgatctccctgtttctgcctaaaagaaggtcacaaagtttcccatgatacaaatccccccaccccttcccactgtattagaaagcaaaaattgttctcgtcaccagaagttakgagtcaacactggaatggacctatgcaaacaagcttactaaaataaccctaatctcctcatagttttccccatacatttcctagttacaaacccacaatttactgcccctagctccctacctaaatctcctttgtattatcacttactgacaatttattattctttgtttaaagtgatatataagcttttgggcctaaaaggttctttgaccttcattttccttctgaagactcctgtgtacacataaaaatacatttgtatgctcttctcctattaatctgtattatgccagtttaattcttatatcaccacagaatgtaagaggataaagaaggttttgttcccctacaaagatattgtaaacaactgtaaacagggaatttctttcttaatttccaaaaattatttttaaaaatgtaccccaaattatttaaccattcaaaagaatcacaaattttcaaaatgttaagaatcagaatattttttataccagggaaaaagtatctcttttttatggaattaaagttacagtccaagatatgttaaaaaaaaaaaaaaaacctaaactgaatatttatggttaataggagcgcccatgtcacctgtttatgttcttatttcagaattagaaagactcacaaagaagccacatataaattcatttaatactttatgtagactaaaaaatttttttaatcttacaaatgaaagataccttaatgtcattgtctcaccgacatcacaaattcatccaaagccaaatccaataacgtcatctgagtttagggatattacatatactaacacctaaagaaaattatttttattggaattttatttcttaaatttagaaaaatacaccttctcataaaatttctgccattgtttctatttttgctttttaaagtgaatgataatctttgtaaactttattttgatgacaactttttaaatagtttgaaattgaatacatatttttttctatattcaatgtttccagttctaactatttttatatatgtgagaggatttcaaggccaatcacttttttttacccatatctaaaggtccttagagatgcctattctcttatatggtttgactcatgccattacaaagtcatcaactggatggtcaactgtgtattcatgctaataataccagttttgctgttttgtggctatgatggttggctcagagcaaaatttgctggatgtgttctatcctagtttttaccatattcatacattattttagaatttatgtttttaatgaaatgttctaacttaaaaattattttcatatgcattatagtccttattttttttcagtatttcaaggtatgctgtgcctaaatatgtgccttttaatttatatggaaattaaactcagtaagattaatgtgttaggaactataatatagcagaacattggaagagtcgagacattggaagagtcgagaccagaaccacattcctttcactttaacctaatttaatatcactctgaagagtaacttcaggatgcatttgggccaactggcactttgtcttattactatatattagcatgcatacaggtatgtgtaggcaacacacacacacacacacacacacacacacaccccttgaaacgtatactttagatctagaagggactttagtgtagtgataacttgggagaagtggcgagaaaattagcctatatatcaaatcctgcgttctcttcacgaatattcaagcccagaatattattgtgaagtttcaattatagagcacatagtatccaaatttcaacttgacatttgaagttatgtgtcaccactatgaagcttcttttgacacaattcaaaatgtttagttttgtttgcctttataaagatgtaatggcagtagatatgtgaaatatcaaaacatttaattggatgtgaaaataaattaatcttagtattctttaaagttcttttattttgcattattttgtctgcctagtgttcaacttcagttttctctaatagtgtatgaaatatatgacagaagttttaagattgggtattttgtacatttagaattattgtcttaatgtttagtcatcatataatttatctaaacttggaagataatacgcagaattgatgtttttctttagcagagtgtgtggtttataatcagtaaaatcttgatcattatattataaaacctgtatgtaaataatatgcttcagaatctaatcagacacacaagtttatttattcagttcattatctgtgtgtttgtatgtatgtctgtatctctgtatgtcttacagctgttatttcaagaaaccaagaagggccaggagawatgggaaaagctgtgttgattcctaaagatgaccaggagaaaatgaaagagctgtttaaaatcaatcagtttaaccttatggccagtgatttgattgcccttaatagaagtctgccagatgtaagattagaagggtaagtttgcatttgttatataatcttttatattcataatcacyatatttcagaatctcagaacttgagctaactcagattatatcaattctagcaatgtgtggttctgagtacctatcacatagcaggaatttattgtgcatgcatatgctgaaaaaggcgaactattttcttccctggcaaagaaaaatacgttacttgcaaagatgctgcaaaatactcaggccaaacaggtttttctatgtgagatgttttttgttgttgtcattttgttgtgctttctttatcgtaccagattcagagcaaatatgctctttagtagattacagtcgtatattgcttaacactgcagaaatgttctggaaaatatgtcattaggcaattttgtcattgtgtaagcatcataggtgtacttacacaaacctatatggtatagactactacatttctaggttatataatgtagcctattgtttctaggctgtaactctgtacagcattttactgtactgaacactagagataaatgtaacattatgttaagtatttttgtatctaaacatagaaaaggtatagtaaaaacacggtgtaacagataaaaatttgtatacttgtataggtcatgtaacatgaatggagcttgcaggactgaaagttgctctgggtgagtcagtgagtgtgtagtgaatgtgaaggcttagggcatwactgtacgctacttgtagactttataaacactatacacttaggttatactaaatttctttttaaaatttctktcttcagtaatgaattaaccttacattactgtgatatttttacttcataaagtcttgaatttttttcacttttaaactgtttagtattaatacttaccttaaaacacaagcatactatacagctgtaaaaaatattttctttctttatatccttattctattagtttttttccatttttaatgtgattttcaattttttcttttaaaaacgaagacacaaacatacacattagcctaggtctattcggggtcaggatcatcaaacatcactaggcaataggaatctttctgattcattataatcttatgagactctcatcatatatgtgatctgtcattgggtaatgcatggctgtatttgccttactgcataaaaaggtccatatactttgcttataaaaagtatacctgcattgcttttccagcacaaaaatagctcattgtctatatgactctttcaccctataaaagtggtttattatggtttccagcaatttatactgctgtttataattagaatgcttaattatcagctatggaagaaatatgcacttggaaataatattgcacgaaaaatgatgttgaaaaattcaacttttatgtgattaactgtaagctatgctctagatagttgaacatattttaaacagatgtaataaaatgaaagtatttagtggcagaattgtaattctaatatatggtcctcgtaaaacaaactcttggcattaataaaagatgtgtcttgagattttagaaaatctccaggtttacaaatatactgcaggacacacttccatgtaaatagaaattgttcttttaagcacttagtgatttttctctacatgcaatagaacataattaatgcaaataaaatttgccacctctagtgggctacattacactactgtgtcatgatattagcatcatatttactaactcttatttttttctttctgaattacttcatataatatgaaaaccttggctgggcttggtggctcatgcctgtaatcctagcactttrggaggccaaggcaggcggatcaccttaggtcaggagtttgagagcagcctgaccaatatggtaaaaccccatctccactaaaaatacaaaattagccaggcgtggtgttgcatgcctgtaatcccagctactcaggaggctgaggcakgagaattgcttgaacctgagaggcagaagttggagtgagccgagattttgccattgcactccagcctgggcaacaagagcgaaactctgtctcaaaaaaaaaaaaaaaaaaaaaaaagaaaggwaaagaaaaaagaaaaccctgttgagattccagggcttgtaattgtcagaggtttatttggtatcttagcaactgctttgtgacaaccattgtatacttttgaaatgtctctctcaacaaaatcacaagtaattacatattgtggacatttttggcccctggggaatagttcaacatttaatattaaatttgtgcattgcaaattattatgtaaaaataattttacatgtagtcctgtgcatatgtgtgtgtgtgtgtgtrtatatatatatatatttgtttgtatatagatacatttaaaagtacatacaataagcatatacaaaaaatatatacaataaacagtcttcgaagcaattttgagcattttagatgctaagtttataatgtttaaacattgcatttattactttgttttatatgctgtagtatgctgtagtgcaatggtccccaaccttttggcactggggaccagttttgtggaagacaatttttttacasatttggaggtggtggattgggggttgggggtgatttcaagacgaaactgttctaactcagttgatcaggcattagattctcataaggagcacacagcctagatccttcgcatgcgcagttcacaatagggtttgtgctcttatgaaaatctaatgcagtggctgatctgacaggacactgagttcaggtgataatgcttgctctcaggcagctcacctcctgctgtgtggctgggttcctataacaggccaggaccagtactggttttcagccccaggaacctctgctgtagtgtgataaaatgagtggctatgatacttatatattccagaaaactaggtaaacactatttcaagtttttaaaaaatctcgactttcaactgtcagaatacaaataaatcagaaccatgaattaaaaaaaaaataagtcttcactgagctaatgtttaaaatattcatagccagtgatttttttttttcttttaagaatctctgccaggcacggtggctcacacctgtaatcccagcactttgggtgggaggctgaggcgggcagatcacctgaagtcacgggtttgagaccaacctggccaacatggtgaaaccccgtctctactacaaatacaaaaattagccaggtgtggtggcccatgcctgtaatcccagctactcaggaggctgaggcaggagaatcacttgaacccaggaggcagaggttgcagtgagccgtgattgtgccactgcactccagcctgggtgacagagtgagactchgtctcmaaaaaaaaaaaaaaaaaaaaaaaagaatctcttagctctagtttgttgtcttactctaagaaaaaaaggatcccttggcatactaagtttatgagtaagtcttaaactgtggagcaatccaacattttaaatgaataattcaagttgcttagcatgtaaagtacataaaatcctgtatatactgtggttattattgcttgaattttcatgttttacaaatagtctctgaaataatattaatgaaaaaacttttcattttatttttatataaaactacagtatatgttataagtaagaaaacagtaataccatccaaaattcctagacaagtcacagtgtatgaggtttaccagggacatttgcaagtcatcttgaatgactcaattgtagaactgcctgggaacaactaatgttgaaaaacttaccatgagtcacatatccaaactgttatttaaaagatgtagaaatgttaatactcatttgatctagaaaatatttttataatttgattatatgccagttacagttcagtttttggataattatatcttaaaaagatatagatacattaagctagcacaagtgatgactgatgtaaagatgtaaaaagaataggattctaaaataattaatttacgaagaagctgaatttattttagtggaaaacttgagttgatacttagaaagtgtctgagtcatccaaaatgtgaattcattcaaatatctaatcatattttactgcgttatacctttaaactattttggctaaattcagaaaattgtccaaaaagtttaatgttatgtttgacgctaatatcaatttacaaatattggaaaacgtattcggggaataaatctaagcatatatgctatgtttacacagagaacagactaggtaaaaatagtttttcttggaggcagttgtgaataaccatcaggacaaattgaagttctgttctgtaatatctatccctaggaatgtttaaatatttataaaaatttacttaaagtatttaatattttaatacacgcaacacatttgtatgtaatcctaatttttttgatagaagatgctagttacaaagaaattatgttacttttatattttaagtacaattaagggcagatgccttatgaaatgttttaccttcttgaaggcccttcattcctgggatatttatgtagttctctctctctctctmtctctmtctatctatctatctatctatctatctatatatmtatatatatatatatacacacactaaaaatttacatataaatttatatataaattttatttatatgtataaataaaattttagacagctgtaaccagccctctctctcctttgcccattcccccacaaataaaatttttaaagtaaatatcttaatagcctatctgattcagaatgttgagaaaaatgactattaactaatggctcagcattagagatttgttagcatgtttctcatcaattatggggctaagatttgtaaatttgtatattttggatttcagaagagcagggtttaaatgcttctgttgtcagaaagtaaataaatagatgccattttgtttggcttttaacctaaagtcctttagcatttacttgaattcagtcatttaataacacttcaagggctggtattgagtgtttttgaaggttataatgcagctagcatttaaatatttttcatcaggaaaaaattgagaaaataggaaatttattttagctttttatatcctaggccaaataactgcttcttacatatgcacactttcaagtcaataaagaggaaaagactctagcagccttacattattagtggaagaggagctgtagcatacaaattttgaataagttgctctcaaaggacaaagaatttatttactacataaagtaggaataagacatagtatatattttttctgtgctcaatctcgtgagtacgtgctcatttataaggtttgcctttcccatgaattaaaatatgataaatgtagcattgattgcacaaaggagaaatagaaaatgagaatattaattggatttccaatctctgttccacatcttttctttttaatttgagaattattgcaacatttatatgctggtaaaaatcttccctgtgaagatactaataatttctttaataatttgatttatgtaatgtgctcatgtgtagaattaatttcactatccaaattaaaagtggtatgttagaatgcctgtatgtttacatatgcacaatgtatgtgtgtgtgtgtatatatatatatatacacacacacacacgcatacacatacacacacatatatacatacacacttgaggaatgtggatataagtattattatcatttgggggataataacactgttacactgtaagtttcctttcaaataagaaagtagagtaacacatgtctaggcatgttctcagagacacatttaagtacgttgtatgcagaaaacatgccacataacctttatttacacttgaactacccctccatagtttcattatgtaatttaattttctgacactactaccttcaacttctaaaaaaaagtggtattatatacataacataaaattgacaattttaactattttaaagcacatagctgagtaatgttaagtataaaggacatcagaatatgctaccctaaaatatgcgaatttagcataaagatccttttgagctgaaggcaattaaggaaaagcaggcacaggaaacctctctactcttccccatctacctaaaagtagggcatacatttgacttataaaagcatcccccactctcataccaggaggagaagagcaacctttattagcagaaatagaaatgctgtcargataagccagcataaacaaatctcactaaataacctttattatccattagtttccctcctgcattacagagtttcccaccttagaagccccaaacccttttcctttgtcttgccacttctccacaatttatcacccttttttaaaacgtcatataaacccactgagtgtcactacttgtttgggtcttcacttcttttctatgaaggtctccgttcatgtgaaaatcaaatgattataatcaaataaaatgtgtatgccttttttccggttaatctgttttttgttagtttaattcacaagccccagttatagaacctaagaatgtagaggaaaggtttttctcttccctgtaagtgaatttacattgttgtgcaatgaatctttagcattattttcattttgtaaaactgaaactctatagccgttaaacaggaactccacatttctccagcccctaccaaccaccattctatgttctgactttctaaagttggtattttcagcatttatcgggacctaattgtgtaccaatgaaaactaaaatatacggttttacattagagaatggaatgamtatatacatatatatgtatttgaatggaatatatatatttgaatggaatatatatatatatttgaatggaattttatatatatatatatatatawctcctagtatgtggcagtgtgaatttagaagtgccattgtatcaaggcatgatgaaggacagttttacaggaaggtgtatttggaaccaagctttgtaagatgaatttgtgtagaatcaggctgacacagaaaggagacagcagaaaggagagtgtagacaagcaagccagttctggttagaggagggccaatgaaactctttgctaggaatgtgcatcataggtaaacaggtatggagcctggctactattttatttatacacttaataattcatatattcaagtttaccaaatacctatttgtttgtttgtttttgcaaattctaattgagaaagcagaaaatctaattttcactttctaaatctacctggtaatcatatttttacttatgtttttcctacttgagttatgtaggcctgaaagggtttttaaaatattatccactatcatggttgttaatgtgttcttatatttctttctttttttttttgctgggattttgcttttattttttatttttattattattatactttaagttttagggtacatgtacacaatgtgcaggttagttacatatgtatacatgtgccatgctgggtgtgctgcacccattaattcgtcatttaacgttaggtatatctcctaatgctatccctccaccctccaccttcccccctccccacaacagtccccagagtgtgatgttcccctttctgtrtccatgtgttctcattgttcagttcccacctatgagtgagaatatgcagtgtttggttttttgttcttgtgatagtttactgagaatgatgatttccaatttcatccatgtccctacaaaggacatgaactcatcattttttatggctgcatagtattccatggtgtatatgtgccacattttcttaatccagtctatcattgttggacatttgggttggttccaagtctttgctattgtgaatagtgccgcaataaacatacatgtgcacgtgtctttatagcagcatgatttatagtcctttgggtatataaccagtaatgggatggctgagtcaaatggtatttctagttctagatccctgaggaatcrccacactgacttccacaatggttgaactagtttacagtcccaccaacagtgtaaaaatgttcctatttctccacatcctctccagcacctgttgtttcctgactttttaatgattgccattctaactggtgtgagatggtatctcattgtggttttgatttgcatttctctgatagccagtgatggtgagcattttttcatgtgtcttttggctgcataaatgtcttcttttgagaagtgtctgttcatgtccttcgcccagtttttgatggggttgttttgtttttttcttgtaaatttgtttgagttcattgtagattgtggatattagccctttgtcagatgagtaggttgtgaaaattttctcccattttgtaggttgcctgttcactctgatggtagtttcttttgctgtgcagaagctcttgagtttaattagataccatttgtcagttttggcttttgttgccattgcttttggtgttttagacatgaagtccctgcccatgcctatgtgctgaatggtaatgcctaggttttcttctagggtttttatggttttaggtctaaagtttaagtctttaatccatcttgcattaatttttgtataaggtgtaaggaagggatccagtttcagctttctacatatggctagccagttttcccagcaccatttattaaatagggaatcctttccccattgcttatttttctcaggtttatcaaagatcagatagttgtagatatgcggcgttatttctgagggctctgttctattccattgatctatatctctgttttgataccagtaccatgctgttttcgttacagtagccttgtagtatagtttgaagtcaggtagcgtgatgcctccagctttgttcttttggcttaggattgacttggtggtgcgggctcttttttgcttccatatgaactttaagtagttttttccaattctgtgaagaaagtcattggtagcttgatggggatggcattgaatctataaattaccttgggcagtatggccattttcatggtattgattcttcctacccatgagcatggaatgttcttccatttctttgtatcctcttttatttccttgagcagtggtttatggttctccttgaagaggtccttcacgtcccttgtaagttggattcctaggtattttattctgtttgaagcaattgtgaatgggagttcactcatgatttggctctctgtttgtctgttattggtgtataagaatgctcatgatttttgtacattgattttgtatcctgagactttgctgaagttgcttatcagcttaaggagattttgggctgaaacaatagagttttctggatatacagtcatgtcatctgcaaacagggacaatttgacttcctcttttcctaattgaataccctttatttccttctcctgcctgatttccctggccagaacgtccaacactatgttgaataggagtggtgagagagggcatccctgtcttgtgcccgttttcaaagggaatgcttccagtttttgcccattcagtatgatattcgctgtgggtttgtcatagatagctcttattattttgagatacgtcccatcaatacctaatttattgagagttaatagcatgaagagttgttgaattttgtcaaaggccttttcggcatctattgagataatcatgtggtttttgtctttggttctgtttatatactggattacatttattgatttgtgtatattgaaccagccttgcatcccagggatgaagcccacttgatcatggtggataagctttttgatgtgctgctggattcggtttgccagtattttattgaggatttttgcttcaatgttcatcaaggatattggtctaaaattctcttttttggttgtgtctctgcccggctttggttatcaggatgatgctggcctcataaaatgagttagggaggattccctctttgtctgttgattggaatagtttcagaaggaatggtaccagttcctccttgtacctctggtagaattcggctgtgaatccatctggtcctggactctttttggttggtaagctattgattattgccacaatttcagagcctgttattggtctattcagagattcaacttcttcccggtttagtcttgggagagtgtttgtgtcgaggaatttatccatttcttctagattttctagtttatttgcatagaggtgtttgtagtattctcagatggtagtttgtttttctgtgggatcggtggtgatatccgctttatcattttttattgcgtstatttgattcttctctcttttcttctttattagtcttgctagcggtctatcaattttggtgatcctttcaaaaaaccagctcctggattcattaattttttgaagggttttttgtgtctctatttccttcagttccgctctgattttagttattacttgccttctgttagcttttgaatgtgtttgcccttgcttttctagttcttttaattgtgatgttagggggtcaattttggatctttcctgctttctcttatgggcatttagtgctataaatttccctctacacagtgcttcgaatgcgtcccagagattctggtatgttgtgtctttgttcttgttggtttcaaagaacatctttatttctgccttcatttctttatgtatccagtagtcattcaggagcaggttgttcagtttccatgtagttgagcagttttgagtgcgttttttaatcctcagttctaattagattgcactgtggtctgagagacagtttgttataatttctgttcttttacatttgctgaggagagctttacttccaagtatgtggtcaattttggaataggtgtggtgcagtgctgaaaaaaatgtatattctgttgatttggcrtggagagttctgtagatgtctattaggtccgcttggtgcagagctgagttcaattcctgggtatccttgttaactttctgtctcgttgatctgtctaatgttgacagtggggtgttaaagtctcccactattattgtgtgggagtctaagtctcttcgtaagtcactcaggacttgctttatgaaactgggtgctcctgtattgggtgcatatatatttaggatagttagctcttcttgttgaattgaaccctttacyattatgtaatgtccttctttgtctcttttgatctttgttggtttaaagtctgttttatcagggactaggattgcaatccctgcctttttttgttttccatttgcttggtagatcttcctccatccttttattttgagcctatgtgtgtgtctgcatgtgagatgggtttcctgaatacagcacactgatgggtcttgactctttatccaatttgccagtctgtgtcttttaattggagcatttagcccatttacatttaaggctaatattgttatgtgtgaatttkatcctgtcattttgatgttagctggttattttgctcgttagttgatgcagtttcttcctagcctcaatggtctttacaatttggcatgtttttgcagtggctggtaccggttgttcctttccatgttcagtgcctccttcaggagctcttttagggcaggcctggtggtgacaaaatctctcagcatttgcttgtctgtaaagtattttatttgtccttcacttctgaagcttagtttggctggatatgaaattctgggttgaaaattcttttctttaagaatgttgaatattggcccccactctcttctggcttgtagagtttctgccgagagatccgctgttagtctgatgggcttccctttgtgggtaacccgacctttctctctggctgcccttaacattttttccttcatttcagctttggtgaatctgacaattatgtgtcttggagtagctcttcttgaggagtatctttgtggcgttctctgtatttcctgaatccaaatgttggcctgccttgctagattggggaagttctcctggataatatcctgcagagtgttttccaacttggttccattcaccccgtcactttcaggtacaccaatcaaacgtaggtttggtcttttcacatagtcccatatttcttggaggctttgttcatttctttttattcttttttctctaaacttcccctctcgcttcatttcattcatttcatcttccatcactgatactctttcttccagttgatcgcatcggctcctgacgcttctgcattcttcatgtagttctggagccttggctttcagctccatcagctcatttaagcacttctctgtattggttattctagttctacatttgtctaaatttttttcaaagttttcaacttctttgcctttggtttgaatttcctcctgtaggttggagtagtttgatcgtctgaagccttcttctctcaactcatcaaagtcattctccgtccagctttgttccattgctggtgaggagctgcgttcctttggaggaggagaggcgctctgctttttagagtttccagtttttctgctctgttttttccccatctttgtggttttatctacttctggtctttgatgatggtgacgtacagatgggtttttggtgtggatgtcctttctgtttgttagttttccttctaacagataggacccttagctgcaggtctgttggagtttgctagaggtccactccagaccctctttgcctgggtaacagcagcgatggctgcagaacagtggattttcatgaaccgcgaatgctgctgtctgatcattcctctggaagtgtctcagaggagtacctggccatgtgaggtgtcagtctgcccctactggggggtgcctcccagttaggctgctcgggggtcaggggtcagggacccacttgaggaggcagtctgcccattctcagatctctagctgcatgctgagagagccactgctctcttcaaagctgtcagacagggacatttaagtctgcagagtttactggtgtctttttgtttgtctgtgcccagcccccagaggtggagcctacagaggcaggcaggmctccttgagctgtggtgggctccacccatttcgagcttcctggctgctttgtttacctaagcaagcctgggcaatggcgggcgcccctcccccagcstggctgccactttgcagtttgatctcagactgctgtgctagcaatcagcgagactccgtgggcatagaaccctccgagccaggtgcaggatataatctcctggtgtgccgttttttaagcccattggaaaagcgcagtattagggcgggagtgacccgattttccaggtgccatctgtcacccctttctttgactaggaaagggaactccctgaccccttgcgcttcmcgagtgaggcaatgccttgccctgcttcggctcacgcaggatgcgctgcacccactgtcctgcgtccattgtctggcactccctagtgagatgaacccggtacctcagatggaaatgcagaaatcacccatcttytgtgttgctcacrctgggagctgtagaccagagctgttcctattcggccatcttggctgcttcagtgtgttcttatatttctaatattttgttttgttccctatatttttgttccatgtgacttaaggcagaaatactcaattatttaaacctcagcaaaaattagagttcacagcaattaaatctgatagttttttccaaaaaaataagaaaatttaataaagaaaaagtaatttttaaaatgcagaaggtttggataaccaaggaatggaaaatgatgatacagttcagacagaaggtatgtgaggcctgtgagaggagaaaacaactcaattagaaagttgttaactatccatccaagctcattggcctgcagaggatgatgaagaatcttaaaaacaattttatttagacatgtgataatagtcaacaaggagattttagaacaaaaacatgatgtgatggaaatgatatttaggaagcgttattcttgcagtattatataaaaggtattatagataagagaagcctgaatttaataagattccctattgactattatagtcacatagatctgattggataaggaacttgtccaggacaatggcctaagaaacataaagcaatatgtagtaattaattaaaatgaagagaaaggaaaaacaccaaacttaagatagcttcaggagggatggcatgcggttgaattttcaactttatttgtatgtgtaagtatttgtgtatgtgcatttataggaaagacagaaaggaactgtaagtaaaaattatcctaagtatattttcaactgattttccagaataggtgacttactagatataagggaagtcaaaatatgactttaatgtttcaaattgggtgactaggagatttgtggttttgctgattgtttatgtttgtgtgtgtgtgtgtgtgtgtgtgtataaacatacatatacaaagagaaacacataaatgccacttttaatatggatagtagaattaattttgcacataagaacattagataaatcaaaatattatggaaactattattgttatcttcagaggcaagattttttaccagcttatgaaagctatagtaattctcaacttgaaaataaaagatgtgtaccagagatcagaaattcaattaatattctcacttctatttcatctttatgaaatcaatgctgcctttatctgtatattattaaaataattgtgcaaaatataatttttaaaaacagccatttgaaagtcagtctttgtggttaaaatgtgtatttttttattcgtctcatggaagaaatctaatttaaaaagcaaagatttgttttagtaaacatttgcagattgattcaatttaagaaagcagatagttttgttattgctagaaaaatcctatgtggaggaatatttgacttctgtattaaattacttctcactattttttgccccagatgttttctgtgcacataccagtttcttaagggaagggtaaattgttctaatgccagcttacaatagtattttgctgagggaaaatgtgattttatagttaaatagcttaactcatgatagtaagacatagttttgttgacatgagagatgttagcatctgtctaaaaattctcattgtatattataattaatattctcatcagcttgcaaagtctccctgtagaagccagtatactttctgtatggtaattgctgtttaaattagaaaatttatatttggactttgaattttaatatttaatgttgctatgtaattttgttcattaagaatattgaaaacaaggcccaaaataagttgcattttgttacattccaagtccaacttgaaataaatggagcatattaatggttatacttttaggataaaactatatatggacaaatatattttctacatatatttatgtattgcataatacatatatattcgacgtatatttatgtattgcatttatagtgtcttattttattttttccctaacataaagcattctttctattattttttatgtcttttatttgtgagttatactgtagatacagatagagacattttcactaaaatgtcataggagactttctggttatatttgaccagatagttaattttctaagatagtgttctatcttcaaatagaaatggaaagatcaaatagaatgtgattgttttatcatcatactatataaaatggcgttgaatttcaccatataaattcttaagtaaaattcacattttatattcatccagtgtctcatttctaagctatattttataagaaatttaaaagcaagtgtagcacrtagttcctatccttgataagcttacrtagcatagtgattaggaagatatattttcccccatgacacagtttaaacacatgaattaataaattatgtgataatagtaaatgtagctaaatatcaatatttattgaatttttagtatgtatcagctatatattaagtagttgaactgaattatgacctggaattttcaatcaaagcccagtgaagtatatcatatgctttaatgtatttgtttatagattaggaaacatacttagaaaggttaaggaacttcctcagggtcatgcagctgacatttgaagtaaggctgtctaattctgagtatttgctctcaaccactacagaacaccaaagaatataaaaggggaaaagacaagatagagagttacattactaggaacttcatggaaaagatgaggcatgggttggcccttgaataaagtctggaacttatatagatataagggagaacacaaaggttccaaatggaaagacaaaagtcctttattattccatctcctcatgcacagaatagaatgattaaatagtgtgttgaagagactgatctaatatattaatgagtttatttgggagacggttcatacagtcatgctgacttgtcttaagttaaatacttaaatcactactctgaggcaggcttcaatgctgtccatcagtcatacgatatttcccttgtctatcctgttttccacttcgtaaattattattttataaattcatcactcccctccctcacacctataatacttcctctcaaccctcattctcattatcttaccttctgtttcactgagaaaaatagatgcaaagaaaactccccctagtctcaccatggcatctacccatctacccatttacttgaatttgtagccctttactctgctttctccactgttactatgaatacatcgtccatgtttccagttacaaccagcccatcctctaggtgtcctttcctcttacctcttaactgcttaagcacaagtgcactgttccaacaattctacccactttttttaagagatggggtctcactatgtcgcccaggctggatttaaactcctgggctcaagcaatcctcctacctcagcctcctaaataactgggactacagaatcctgcttacttctttaatcagttttctctcttcggttattcttaccagaatgcaaagatgctgtttatcctcccttaaaaacaaatgtataaacaaaatacttctctagcgaatgcttatcgtggatttgttcatttttcttttcttattccaaaaagttcttgaaagagttggctgtcactctcttgagccatctccgtaccaccattttgttttgaattccctgcaattgacttttatccccacaatacagcaaaattgctattgcygaggtcactaatgattgctatggtgctatatttaacagtcaattttcagttctcatattgacttgccagcataatttgacatggttgattatgatctcctttttgaaataaatttttcacttggcttttaagtcactacactggaatataattttctcctacttttctggtgattccttcccttcattatttgctgataccttttcaccctaaccccaagcgtagatatgtcctaagggtaaggcctaagggtaatgagctggctgattttctgtggcagtcattcccgtggtaatttcatgtagtgtgtcaatgttcaatatcatttaatctgcagcccagacttctcccctgatatcgagaattgaacatctcatggtattctggatatcttcccttgactatccaacactcatctaaatcttaagcaccagatagtcccaaactcagcaccagatagtccccacaaagcctcgtattttcaggaagttaatcctcttagaaaacagaaactccattctttcatttgctcaggccaaaccaggaagtctcattgcaccatctctttctcttactatcaacatctgactcatcatctcattaaaaatattaactcttatcatcatcttccctgctactattaatattttagtctaagctgcttatatttttacctgaatcattgtagcaatctactaagtgtttttgtttgttttggttttgtttttatttgttgttgttgttatgtttaattttctttagcacccttccatctctgatcaacataatagtcacagtgtgcctattaaaatataaagtcctgttaaattgtaaatcagttttgtgcttatttctctcactgcaaggtacaggtgaaccataccaagaacaattctactttaggacctttttacttcctattctctctgcctggaggtttctcctgaatatccacatggttttgctcccttaccttcaatctctttaattatgcctgaggttgcaatttttttgaatttgaaaaatcagaccttggcaatgaccttgagcagtaggatataaataactcccacatgctgagcattccaataatggaacagtagtcataaatgggttaacccatttatcatctctctaaattcttctttggccacattatataaaattactccaacccgtgacactttctactcccttattctggtatatttttctgctttgtactactgactacctaatataatgaatgttgttttacttacttcttttctttattatgaataaggaaataaaacatatttcttttctcactaaacataagttcatttaatgcagtggtcttttttattatttattttatttatttatttattcatttatttatttatttctgagacagcctcactctgttgcccaggctggaatgcaatggcactatcttggctcacagcaacctcctcctcctaggtttaagaaattctcctgcctcagcatcccaagtagctgggattacaggcacatgccaccatgccaggctaatttttgtatttttagtagagatgaggtttcaccatgttggycagrctggtctcgaactcctgacctcaagtgatccacccacctcagcctcctaaagtgctgggattacaggcatgagacaccgtgcctggccaattgcagaggtctttctaggggactttcatctgtatggtgggcactcaataaatatttgttgggtgaatttataaattaataaatgatgatatatattctgattgcacacagaagatgtgacaggcagaaaaacttgactttgattttgtaatcaaaagtaaacttaataggtttttagagacatrctaagatgatgaaagaggtatagatctgtattgggatgagttagtgtttttttaatctatttttttcccagcaggacagtttagcctggagcagaataagaaaaaaagagaaattgaaaatagtctaatgttggggattactacagtgtgcactataacaaatcagagtgtaattgaggtagtcggaatttaatgatagctaagagaagactaacacattattacaattaaagttggaagtcctttttatagcttccatttattgagcaactaccgagtgccctagatgctaagtcttctaccttaaatcttcctcttcaatccttaaattatgcttagaaagtaaattgcattattcccattttataattaagggaactgagggaagaagagatacttttatttgggctgaactattggaaatgctttctcctgtactttcctctaaatttgttgccagacttctcttcccagcctttatttgatttatctgaggtttttggccattttcagctattttaaaagtctcatttttagatactatggtgcagcctagtttttggctaatactggttggccttcatactctccaatgcggcatgcatttatattttcattttttgtgagaagcattttggagactactttactgtaaaattcccagcagaccaatgactcccayctgatttctttcagtctctctcagttcctgcttcagacagaacaccacgcaagaacttgcttctgaggctctcttaccttatcagacagccctatagaggagagacttgagtgcaataattcttaccatatccacttccctgtagaattcatgactccttaccacatccaaatttgcaaaggtacttcttcaaccactgacttttccctactcagcccttataatctttttcaagatgattcctgccttacatgtctccaaacattaaaaaaaaccaagtcatgttactatcccatcacattctgtcataacccaaggcattacttcagattataattttatggccattaaacatttttgcaagagtgagatgctgatctcttaaaagcagttacaacctctgaaaatacatgttttaagattcccatcacttggcttaagagataagaagcacacttcttcccttccctagaagtagaaaataccatcatgtacctaacgcctttaaattcccttacttcattgaactgttcttcaaatttcttatcttctcccacataaattagagatgtatgatagattcactgttacaatatcagtactgctatmtttccaatggcttcttttagaatttgggggtaacttatcattggctagcctcacttttcgtacttgctaaaattccaggaaggtgaatttttcttatctctatgcttaccacatttatctgttaccgcacagtatacaagcctcaaagtcaggaattgaacaaatctctctgactccaaagttttactctttcttctgcttcctacttgagtttcttgagagggtaaaagacactgaaatatgcatgcgataaggaggaaatggtcaggatactaagatkataaatgtgagcataaatctgtgaaatgctgcagtgttcttggttcaacaactgtattcccattgtctaataaatgcattctatattattaatgaatattctgctagaatgtatatttcttcatttaagagatctaaaagttcatgacaattgcatcaagatgattgaagcagtctggagtagaaaaaaaaaataaatgtgagtcccacactggtatcattttagggagttcagaattggtatgcattgtggtaggagtagggacaggagagaacaacaggaatgattacgtgggtggctgagacagatggtgtggacttcaaataaagaaacccagaaggtggtggataaataatgatgagagtagcatcggagagtaaggaaaaattggacagttctatctcaagaactcaaggaataaaggatgaaatcagacttttaaatgtttactacctttaattatttaaatgatgtgacaacaaataacacttggaaaatcatttttcaatgtttttgttataacctcttataaacaagaggattagtttataggaaaagacaaggctgagcaacataacaaaatcaagtgtattttttttktttgttttcagacggtctcgctctgttgcccaggctagagtacagtggagcgatctcagctcactgcaagctccacctcccgggttcacaccattctcctgcctcagccacccgagtagctgggactacaggtgcccrccaccacrcccagctawtttttttgtatttttagtagagatggggtttcactgygttagccaggatggtcttgatctcctgaccttgtgatccgcccgtctcggcctcccaaagtggtgggattacaggcttgagccaccgtgccaggcacaagtgtatttttttcttttgaaaaattatattgtgattttacattctaacataaatactctatatcagaaataaacaaccactagaatgagaaacagaatgtcattacactggaatgtggtaaaaaagaaattgttgttgataaaagaaccaccaacttgtgtatgtggggaaatatctgtttaactgttaaagttttgtgttatgtagaattcttaaataacataataattttttaaaagtcactgagtgcctttcatcaacagttttgataatctgagagcctattcacctgtgaatgattttaaccaaagtaaattgcttcaactctgtgcttaatagatggtgtcagaagattgtggcccagaaaacaggatgctgaaagacatgagatgtacatgagatacacatgtttcagtcatagcctgagtatggtagatgtagtctaggagaacttggctgggaacacaacaccatgtcttcatattcatttcgaatgagatgggggtagacaragatagggtcttcctaaagaagtatattagtttgtttttatatatgcattatttgtgtcttataaagaacagtgttagataaagagacagagttaaatactgtaagatttttattctcactgtgcttaaaaatagcaaccaaaaatatttgttggcagaattaatcatattattgtcagttttaccattataaaacagtactaactagagtgttagtttggtgccacttttaaacatatgaatgtattttacaccttcttttttgtgtagatgaggtaatggaagtccacagtagtgagccgagttttccaaagtcacttatgaaaaagaacaaaactctgtctcaacccacattctttttttttattttatttttctatttttttttttatattttttattatactttaagttttagggtacatgtgcacaatgtgcaggttagttacatacgtatacatgtgccatgttggtgtgttgcacccattaactctttatttaacattaggtatatctcctaatgctatccctcccccctccccccaccccacaacaggccctggtgtgtgatgttccccttcctgggtccatgtgttctcattgttcaattcccatctatgagtgagaacgtgcggtgtttggttttttgtccttgcgatagaaggaaatagagacacaaaaaacccttcaaaaaatcaatgaatccaggagctggttttttgcaaagatcaacaaaattgatagaccactagcaagactaataaagaagaaaagagagaagaatcaaatagatgcaataaaaaatgataaaggggatatcaccaccgatcccacagaaatacaaactaccatcagagaatactataaacacctctatgcaaataaactagaaaatctcaacccacattctttagtacggtgttctgttacccatctcactgctgttgtctgtttgactgactgtggcagttgtgctgattggagcagttttctatttggcctacagtagcgaggatggctgtgtgtcctttcatattctttagcrtaatcagaatcatatctgtacagtaacaagcccgaagctatcttaggacagggatagtgaatatagatgaacaccctaagaaataagttaataacaatgggaagttagtagaaatggtggagtttaagtaggagcacatagaaatatctgtcrtaaactgggttttaaaaaaagtggacaagaattcaggataacatttctaaaaatagcttctctgtcataagctgttttcctcagttctcactctgtatttcataggtcttagtttttttgtttataaaataatagtattgactttgatatcatccaagatttcttctagctgtaggatttcatcttaaaatgaagatgtcttaagatataaactcttcctaattaagattactgaaccatttggcatgccaaatagtgcaaagctttatatcatactgaatcacagatgctgaagtatttataaaacattttagtaggcatcaatgtaggcatagtgtaggcattacatagaattattctaatgtcccaacatatgagacaggaaaaaatagttaagaatagagcatggaaaaaaaaggggtgaatctagraattcacaatctttatcaggaaaaactggtaataggggtaaattaccatatagatgatcacccaaaaggtgatctttgggcaattaattgcttaaatataagtgaaatatccatagatcatctatagcattctatttctgtgtaacattaattatatttgaaatttggagttatagcttaaattcttcaaatatttataagatttcaacaactagatatattttttgacaagaggtaatagaagcatgagatacttgtccttcaaggaaagatacgacagatttattacaacacacacaaaatctaaacttggtatccagagaaacaacatatataggatgtgagattcaggagaacaaactctgttgactaaacagagaattgttatgttaagttaaaaggttttttcaattatctactcaaaaagtttatttagctttaatattgaaaagttctttgtaaggaacataagaaaacgtgacgtggcagcctcaaatactagaaatttaaatttagaacttgattatagaatgaatatttgaatttgagcacacacatgtgcacaatctatacaaatttagaattcagaaaatcaaaaaatcgaccaggtttataaaaactaaaaaacaagtttttggtttataataagtcttaagtttaaggaggacagcagttgggtcttgtttttctttccccctttaatacattctaatatctagcaaagtatctgaaaaacagtctttactgaataacgatatctttaatacgttaagaaacacactgtttgaaaaactgaaatcaaagtgaaactctaacacaaaatgaaaaatgtgtctactgtcccaagagtgttccaaaaacatttcaaaggagaaaagcacagggaaatagtaagatgctactttctcatttttaagtgagtgttaatgtgagagaaaaatcaacaaaaatatttctctaaagaatagaataatataatctaacaggggtcaattagaagactgatatttttccttggggaacttttacctccttcactgtcttttaagacaaaattcatcaataatttgaaggaaccatcctgtttgtctgttttcctttgaggaaagtcctttctgtttaaagtttcttttttttaatttttcttgttttcttcacacattaggtaattatcaccattttcagagattggtaattaactgagacatatgtacatgcttacgcttacagcctcattatattatcaaaatacaaataaagttagttttagaaaggatgaaccattgatttgggaatttaatcatcttaagatgtgcttgaattgtttattaacattttattatttgtgtttatattaaaaattagttttcattaatatttagaattcttgcaatttaacttaataggaatagatgcagcataacattctgattcctcatagtgaaagaatttaaaggatattctggatctttctgttagaagaagaggaaatctaaaagaaggattaccaaagggcactgattgtagttttgagctggagaaagtgaaattagaccaagatctggactccaagctgagaagaaaattacacgaagagaaagctattagctgaactcagtagaaaggatatcactgggtcaaactccacaggtggaaaagattttcgattgattaccagttcaagagagtattgaacagagtcactttttgcttgacatctttgggcacaaggtgtttattatttaaagctctgtgtaagaagtttgggtgtcatgatctgtgtctggtacactggtcagtttttcttaaggtctcacrtgtctaaacaaaataactttttatttgttccaaaaaacttgtctagaggaactcaattcagtcattaaataaaaattgttggctgggcactgtggttcatgcctgtaatcttagcactttgggaggctgaggcgggtgratcacctgagttcgggagtttgagaccagcctgtccaacatggtgaaaccccatctctactaaaaatgcaaaaattagctcagtgtggtggcatgtgcctgtaatcctagctgctcaggaggctgaaacagaagaatggtttgaacccaggaggcagaggttgcaatgagcggagatcacgccactgcacttcagcctgggcaatgaagtgagactccatctcaataaatcaaaaccacaatgagataccatctcacaccagttagaatggcagtcattaaaaagtcaggaaacaacaggtgctggagaggatgtggagaaataggaacacttttacactgttggtaggacagtaaactagttcaaccattgtggaagacagtgtggcaattcctcaaggatctagaactagaaataccatttgacctagccatcccattactgggtatatacccaaaggattataaatcatgctgctataaaaacacatgcacacatatgtttattgtggcactattcacaatagcaaagacttggaaccaacccagatgtccatcagtgatagactggattaagaaaatgtggcacatatacaccatggaatattatgcagccataaaaaaggatgagttcatgtcctttgtagggacatagatgaagctggaaaccatcattctgagcaamctatcgcaaggacagaaaaccaaacaccgcatgttctcactcataggtgggaattgaacaatgagaacacatggacacaggaaggggaacatcacacaccggggcctgttgtggggtrgggggagtggggagggatagcattaggaratatacctaatgtaaatgatgagttaatgggtgcagcacaccaacatggcacatgtatacatatgtaacaaacctgcaagttgtgcacgtgtattgtagaatttaaagtatactaataaaaatgaaaataaaattaaaaagaaaaataaataaataaatattgttagggcctatcaggttccaggaattgtgccagatcctgtaattgcaaatatgagtaaggcatattccctgccattgcagaatttatcttgtagttgagcaaaagtgaaaagtacacagaaaacaccttgtatattagaaaacatagcatggtcaattgatctgtttctctaataggcacatatagcacttttaaaattgtattcttctagggttgatagaggaattctattactaactgaactttgttgattaagcaactttcagatattcgaatatttgaaaggctaaaaaaaaggcagcctcttctttgaacaagcttttaggagtgatcactctaacagcaaacatctcctttgcatgtaaaattaagcaaaaacttttcttttactcctttcctttccattctccttttttcctaccacttcagcccaaagccctaaggtggcactgaacacagagggagggcaatggtcagtgtgagtagagagacacaacttaatgtagggagagaaaggcatccatgtgtgaccacatatgtgggtataagtagagcaaccacatggcatcagagcccaagcaggttgaggatagagtcctgatagaaaggcagccttgcttggggggcgagaacctgtgcaggttggtaccaacaatcctatggatggtaccctggtatggcatgtcagaacctgagcaaggtaaagaaggcatccttgtaggaggacttttcaaaatgcagtgtaagagcctgaccagagtaaagagtattttcacatgggaagggtactttcacccagcgaagttggagtgccaaagccaagtcaggtggggagggcatcagtgcatggaaagaaagcagtttgcccttcggatctggagtccaagtggggtgggtatgttgtccatgcagtatctggcccaggcagggtgtggtatggagcctggccaacrtgaagtggtctggtgtatggcagggtagtgcagagcagcatgtcacagagagatttattttaaggaattggttcacatgatcntagaggccgacaactgcagaatctgcagagtgtatcggcagactggagacccagggaagacatgatgcttcactttaaattcaaaggcatcctaccggcagaattccctcttcttcagaagaggttagtctttatctattaaagccctcaacttattggatgagatgcacccacattatggaaagtaatctgctttactcaaagtctactaattgacctaatttcatctaaaaaataccactatagaaacatctaaaataatgtttgaccaaatgttttggtccattagtgttgctacaaaggaaaacttgagactaggtaatttgtaaggaaagagatttggccgggtgtagtggctcacacctgtaatcccagcactttgggaggctkaggcaggcagatcacaaggtcaggagttcaagaccagcctggccaacatagtgaaacctcatctctactataaaaaaaaaaaaaaaaaaaaaagtagccaagcatggtggtgggtgcctgtaatcccagatactcaggaggctgaggcaggagaatcacttgaacccgggaggtggaggttgcagtgagtgagattgcaccactgaactccagcctgggtaacagtgtgagactctgtctcaaaaataaataaataaaaaagagaaagaaaagagatttattggctaatggtactgtagtttctagtccatacacgaagcatggtgccagcacatacatctggagagggcctcaggctgcctctactcatggtgcaagggggaggggagccagtttgtgcagagatcacatcatgacagaaaagacaagagagagagacagaaaggagggaggtgataggctccttttaacaacctgttctctcaggaactgacactgcaacactccctcactccccgctaccaccacaggggacattaatcatgagggatccatccccatgacccaaacatctcccattaggcctacctccaaccttggaaatcaaatctcaacatgagttttggaggggaggggtcaaacaaaccatatccrcactatagcaacaaatatctgagtattttagcctactcaagttgatacataaaattagccatcacakttgggaaataggctctgaggtataagtagtctcattatggctgattttaagctatcaacttcacgtcactggatgtaaactacagaagaattatatgaacacaaccagctcttgtgagcaggtattagccagcagcagcataccactgagttgacttgagttatgaagtctgaatggaatcttcttccaatcctatggagggttttgagaatgggacacgacacccttcaaaactgccccatattggcactagtgagtgagtcagatcactatgccctgaatcaatcaatcgttggatacaggctgccttcagaagggggcaaggctttgagaaaggcagctctcttcaatttaggcagttttcaaagctgggctgataactggagctgctcactggcagcactccgggtaagtttggtaataagttacttaatggtggatgaggatctaggcagcacatcgtagcttcatagcacccaccgtattcaatgatgagtctccgtgattgggtctcactaaatccataaaaagaaattggaggctgactctctctctctctttcccttagagagagagagtaagagagagagaacccagttacatccagagttctagggagcagaagcacagtgctgcaaggaagaaacttcagctgaatttcaggcagaccaaggctcaactgaatttcaggcagaccaaagctcaaattctaaaagtattattttcttattaccagcttagttgagtcatagaactagtctttcatcattgaaagtgtatacttttaattgttagggctactgttttaatcagggtttccagctgcagaaaagaaagattatttgcctttttcctgccttcttgttctatctgggaccttagccaattggatggtgcctgcccacattggatgagggcggatcttccttactcagtccactgagtcaaatgctaatttcttccagaaacaccctcacagatatgcccagaaataatgcttttccagctatttgagtttaccttaattcagtcaagttgacacataaaattaaccatcacacccaccaaaactgtattcaataagggaaaggtaggagatttgatgctggactgctatccacgttgtttacagtgaccatatatatgattgactcaggtctacacctgcttcctggaataactataataactgctcttttactccccaaagagcccagtttgagcaataaattacattgttatcctaatatgattgcttctacaagacaggcagaatagcaagcatagtgccagatgtcacaacctttcactgccatgtgaaacctgggaataataataataataccttttaagactgtcatgggaattaaataagataaaatatgcaaaaatatacatgctaagttattggaatagcacctaagtattattatattttccttgtgatggcattttatattgccccaaaatgagtaaatattaaaatgtccctacaatagaattccaacatgaaaatatccagtgccaataataaaaagaaagaaatgattgatttttaaacaaatgaataatactctggaacaacttgggtagtttgctggagaagctttcartgcagaagtcttgggtcaaacccaaaatcttataagcagtagttgtttttgggtaatttgcttaaactttctcagccttgggtctctcaattattgggttgtaaattatcaaaagaatatctttaaagcccatagtatcttcctggccctcttagacactcagcaatgttaatttccctctcctggctgaaaaaagtaactgaggttaggaatatttttcagaccaaacaaatacatggagggcttggaaggagtcttccaaactcctcaaagcagagaggcttccatcctcaaactctccttatcaaataataaaattcttatttatggggaaggatgggagggaattaataccacctactactctagaaacttgttctcaattccgcttgccttctacctactccaccagaaacatttcctcatggcttgaacgacaatatgtagaaaagcatgctataaatttgtgtgttttcaatttataaaaatggtttcatatattacacctcagttgaaaatcaagacaatgcatgagttgtcaaatcaggtattagtcccattttgcagatgggaaatatgaaatcccaagaggttacttgacttgcctggataatacagttaataactggaagagacaggcaggatatgaacatacttttctgaactctaaagtgaatgatttgtctgctttggaacactctgaagtccctgactctgaaataggagctcctggatgtgttattaagacaggcacagtgaagtatgaatacataagtgctaaagtgtttctcagcttcacagcttgttttatcagctatttcaagactatttccacttgagagttttgtacttctagcctgctgtgagtcactaatgatataatccattttggaaatggtggtaaattatgggttgtggtaactctgttatgaacttattattattaattacttgccatcacttgccatctcaattgtgttttgttcagtaaacataatatccatgctcaatacaaaaattaaatctttctttctcatacacacacacacacacacacacacacacacacacaatgctaagccagtaataaattttacttgaccttaagtttgagcctcaaatatgaatctggattcctgaaaaattgagtttctaactatctttgccaaataaatatttttgagggtgaatttcaaatgaccatgtctaataaaaatattattttaaaacttatttttattttttacagatgmataatagatgtacatagtttgagggtacatgtgataatttaatacattcataaaatttgtaaagatcaatccatcaccttttatgtttgtcttttctttgtgctataaacattcaaatagttctctactagctattttgaaatctactatacattattttaaactattatttccctactaatgtatctaacattgggtgttattccttctatcatactgctttttgkacccattaatcaacttttctttatcctccctccccactaccctttctggcctctggtaaccaccaatcttttctgtcttcatgacgtccatacttttagctcctactcatgagtgagaacacgtagtatttatttttttgttcttggcttatttcatttaacatgacgtcaagttccattcacgttgctgcaaatgataggatttcattcctttatatggctgaataatattctagagtgtgtgtgtgtgtgtatgcgcatacatacagagcacattttcttcacttatctgttgatgggcacttacattgattccatatgctattgtgaatagttcagcagtaaacatgggcatacagagatctatacaagaaaaaactatacaacattgatgaaagaaattgaagagtacaaaaaaattgatagatattctatgctcgtggattggaagaattaatattgttaaaataacaatactacccaaagcaatttatggattcactgcaatccctatcaaaataccaatggcattattcacagaaatagaaaaaaatcctaaaatttatatagaactacagaagaccccaaatagacaaagcaatcatgagcaaaaaagaacatgagtaaagctataggcatcacattacttgacttcaaaagttactgcgaaactgtagtaaccaaatcagcatggtattggcattaaaacagacatatggacaaattgaacagaatagaagacccagatataaatccacgtatttacaaccaacttattttcaacaaagatattgagaacatacactggggaatgaacagtctctttgataaattgtgctggggaaactggataactgtagaagaatgaaactagaccccaatttctcactatacacaaaaaaacaaatcatttaatttgattttttaattaaatttaattaattaaatttaaatttttaaattaaattaaattaaattaatagattgaattaaagacttaaatctaagacctgaaacaatggaagttgaaagtcttaaagaaaacatttgggaaatgatccaggatattgttctggaaagtattttctgtgtaagactttggaagctcgagtaaccaaagaaaaatagacaaatgagataacaaagctaaaaagcttctgcacagcaaatataacaatcaacaaattgaagggacaacccacacaatgggagaaactgttagcaaacaattcatctgacaaggaattaataaccagaatatataaggagctcaaacaactcaataacaaaaaattatctgacaaaaggtctgaatagacatttctctaaagaagacatacaaaaggccctcaagtatatgaaaaaatgttcaacatcactaatcatcagagaaatgtgaagcaaaactataatgagacattatctcactccagttaaaattacttttattaaaagacaagcaataatagaagctggaagctggcacagatgtggagaaaggggaatgcccacacactgttggtgagaatgtaaattagtacagccactgtagacgatagtatggaggttcgtcaaaaatctaaaaggaaaaccagcatatgatccagcaagttttctgctgggtatatatccaaaagaaaggaaatcagtgttctttgaacttaaattagatatagataatttaattgtgatgagtttgcaatttatgattttcttgatttgttgtttgcaaagataatttaaggtacattaaaattacgcagtctcaaccccttcactgattggctggatggtctaagtggatttagctagactacctcagagtgttttcaaatgcttaatcaaatactggtattcctgttaagggaaagtgaatagggcagatgcaattacagtttaagctggggtgagcagctctactctagggcactacatctatgaaaccacacaaaaggcagacactgatctgtatagtcaaagactctaagaaacaagtgaactctggggtgtacagggtaatattaaattcaggtagataaatctgaggattttttaagctaacataacagttccatgagcaagttggaaagcatttaatgaaatagatacacacgacctttgaaaagtgaacattaacttgtacttgtctaaaataatcctttctagtcaaagaaggtttttaagcaagatgagttttggagtgtttgagtttattaggtttacttaaagatataacctttatttcctttcttctatgtaaggatatacaggaaacttgacatttggttaattgactttttacatttctcattgggaaataagactgaagctttatgaaaattcaaatcaactacgtatatgggatttttgtttctgctatgtctcatttttcattgatgactacaatagaatattatcacgtttttctagctgcatgtctattataataataaacattttcagtcttgggaaatgaagaaaatcttcttgtcaacataactgtattgctttccatatacttgattagaaagcctttgcatattaaaaagagatttactgaagttcttatgaaaacttgagctgatatttcatttcaatgtggttataataactagtatatttttcttgagcaaataatgcataatattccctatcattttgttaatttgattagacgggttataaattcaggttttctaatctttgaaagaaccagtgagccaaacatctgcatattcttacccaatgaatacacacctctgttaggaacttaactcataattggaggaactctagcattctcttttcattttctggaacattttagtttatccagtaaacacatcagtacatgacatagttaatctgttcttttcagatgttctcctgatcaatactgtgatcaaatcaatttataaacatccacatagatcacataacaagacactttcaatgtaatgagattcattcattctgtggagaaagacatgagcctttctactgtctgaataaccacatttccatacagatactcaatatgaaaggtgttagtcaggtggcagaactgaaaactattctggagggaataattgaagctaaatgggattcttagtgctaatttggaacaagcaggatattttaccaagctgtttggggattcttaacctttaaatgccacaggctccttggaaaatcttgttaaaactatagaaaccctctgagaattaatttttaagtgtacaaaataccaaaaaatatatatattgaaatatggtcaccaaaatagtttaaaataaatgtgtagtagggtaatatatactggaaaattatctctatcttgaggtacttctaataactatcataatttcaaaatagtaacaagcatacatgataatcccagacacttgcaactataatgttcttatgaaaaatctatgatttatattatggataaagtaccagttattgcagtacgtctatggtttgctgcttatagtcataattaaagtaaatgttatttcttacttagaaattaaggaaacatattttcccccatccaagtttatgaattctaaacatggaccactgtcaaggtagtaaaaaaaaggttaagaaaccctgtgttaatgatttctctgagaggcagaagtgataacgaaaacattagactatgctacatagatcaaatatacacacagacacaaaagagagaacataacccattttgtactagaatttccggttctttgttataagaatctgtgcctcttagaagtcagcatgatgcagagtatgtttgtttaaggtctagtagaacatatatattatttatttatttatttatttatttatttatttatttatttatttatttatgggatggagtctcgctgtgtcacccaggctggagtgcartggcgcgatcttggctcactgcaacctccgcctcctgggttctcctgagtagctgggactacaggcgcccgccaccacgcctggctaattttttgtatttttagtagagacggggtttcaccgtgctagccaggatggtctcgatctcctgacctcaygatctgcctgccttggcctcccaaagtgctgggattacaggcrtgagccaccacacccggcctagaacatataatttaattaataaatattcattttamgaattcctgatatcaaaagaataacaagacagctatttggtttatggtacatatttattatggataatggtatgaatgatgttacataaaaccaggaagaggaaaaccatgattaagatgttcatttagtttgtagtgtttctattatggctattgtgctatccatattcccctaaaatgctgatttttgaaaaggtgtttaatatatctcatttaacatgtcaaagcaaagggaaaattcttaataaaaatacttagtgacttcattttatttaaatattttcttagcccaaatttatggttttggttatctagactattgttacttaaattgtgggccagggagcagcagcatctgcaactgcatgggaacttattagatatgcagattcatgagacccctctccactccaaacttactgagtcatcatttggaggagtatggctaaggaatcagtcttttaagaaccatacataatgttcaacaacaataactgccagttaactaccaatatttaaacttagaaagattttatattaaaagaattcagaattctaatctcaagaaaaaagaaacagacaaaacaaggatctgctgtggtacatccagacaatggcatatcattcagtgatagaaagaaatgagctctcaaacgagaaaaagacatggaggaacctaaaatgcatattgctaaattaaagaagacaggcttagaaaggttatatatagttgaaactctatggtttcaactatatgacattgtggaaaaggcaaattacagagacagtgaaaaagccatggttgccaggagctggggagggggaatgaataggtggaacacaggattttagggcattgaaaatactcttgtgatactacaatggtggatacatgtcattatccaatggtgaatccatacatttgccaaaacccagagaaagtacaccaccaagagtgaacctgattgtaaactatggactttataataatgcatcactattggctcaaccattgtaattaaagtagcgcattaatgcaagatgttagtaacagggatactgtgcagtaggaatagtgggctaggggaaagggaatatatgggaatgctctcaatttttctgtaaacctaaaagtaaaaataatgctatttaatatatatgtacatacatatatgtgtgtctacatacatacatatgaggcagagaaagaccagacctgaaaagagacctggcaacacaggactatatttttgtgtaattctgcagctgagtagtagctacccctttttgaagggccaaggacacaccaacttgcttcaatgctcaacttgccattttaagaatttgatttatatacttctggcttctgaacctttatgactcaagtaatgcaaaagcaagttttaggagcagaattggtattaattcattcagtaattgcaaattatttgctcttgagaactctgggagaggataccactgtcaccgtcttctgttactactgtgcttacctgtgattattgctgcagctgggccaggaaacatgccaacccttattcaccactataagttaggtgctaagataaggtagaaacttgctggaggtcacacaagtacactggctggaagagggtactcagaatcaccaggctatgccaaattgtttctggttactttttcatttggtagatttggcagatatttttcaaatggaaattagaatttagtgtgaagaaatgttatctaaaacatgggaactgctaagggaattgaacaatgagaacacatggacacgggaaggggaacatcacacaccggggactgttgtggggtgrrgggagggggagggatagcattaggagatatacctaatgttaaatgaygagttaatgggtgcagtacaccaacatgcacatgtgtatatatatgtaacaaacctgcacgttgygcacatgtaccctaaaacttaaagtataattaaaaataataataataatgtcttcctctcgctcaatctgcacacggagttggtcacaaagtccttaattgtatcaattaacatattcttcaagtcttctctcactcttccagttccattgtcctcatcatttgctgcctgagggtttgcaatagcttcttaatttatctccctgttgccrgcatcatggtcaatgtcctttcccattcagccagctccagtttctttcatgagtctgccagaattgtcttctaaatgcaaatagtaatcatgtggctcccttcctaacatctttcactgatattctagtctaactgctttagcaacatttaaaactccttcagacagcctttctaagtttatctgcagcctcagtcccaaaggtgcattaggatccaatcacacagaaccaatctgagatttttagagctctcagttttttcttactgataaaactcttttaccatggcgttccctttggtaagatttcctttattgccacatctgcccaataaactctcacttatccttcgtgtcccaacaaaattatccctgtctctgaaactccttctactctcttaactctaccccaggtatgttaagtagtaaccattaccagaacattctgtttataccaatattatatagtttattatggttaattttacctgtcagtttccctcatctagagaatacatcagagactattttttgtctattttcctagcatatagtaaatactcaataagtattccgtgaacaaatagatatgagtaaatgagtgaatgaatctgcatgtgaaatatataatgctgttttgctgatttcattacaaataaattgtgaaaagggaaatttgctggtaaattacatgtatgatttaacttcctgttgattctctcatactcattttaaaattaaaagtatatacaaaatgttcttaacgtcaggaagtgtgaggcaaaactgtcaaatgtggaatatcaactctgaaagcagcctgatttttgcagggttgtatctttgagtattaaagaactttactaacattcatttgaaatataatgtcttgggttttcatttgtattatgaaacaggccacaaagacgtactaaatgctcatctttaagggctttctttttctcatctgacctttataactgaaagaagcttcaagtacaatttcataagcagcaaagcagcttctccagaaatgacatttgtcagtatttctggtttggggaccctcttccatgataaaaaaaaaaaaaaaaaaaatcttaaaaggagtgttttcagctaactcagacatgattctatttgttacttgagtgcatatccaatcagatactcagggaggcagatgttttggacacacgtttctctatagctgacttagagtgcattttattatgtgcttggtttgaaaacaaatttcacagcaaactttacagaagtatgctgcttagtttgtaatgcagttcacacactcagcatgaataccaatttatgaaggtgtcatcaagttgtttaaaccaacccaaacacacataatacagatggcattgtaggcatcagtgcctgaaaaataatttgtgacatctgtagccttctctaatcatttcagttttttgtgctttttgttcagtgactcttttatgccatttcaaaatataaatagactcataacaatatagaaattgttttttgagcattaaaatgaaaattttattgtatataatttttgttattttattatatttactttaacatagctagtatattaaacattttggtaggtctttttttctccttgccttttatggatctttttgtcaggcagttaaacaaaccacttatttaaaaaaaaatacaaatattgctgtttaaatttacatttacaatttcttgctgaaagatgtacgtttctacagttataagtacctgttaaaaaaatagatttgtttttttctgattataaatgtaattaatgcattttggaaacttttttaaaaatccacaaccatgtataagaattctaaaaatcaccatgcataataagcgtagttaaaatgttgctattcataattctcaccttctttttctaaattaaagtccctataggggtgtatctatctgtatatctaaattaacctgtgtgataaatattttatggtagttgttttatttttattttttcctaatatggtctatatacttaatttcattgctcttttttaatgtcattaactggagatctttataagcatgttagtgataaaacaagtgttaaatgaaaatatagttgacccttgaacaacatgagtttgaactgcactggtccacacatgtgcaaggatatttaaaaaaataaaaaccatcaacccttaccattggtgggttccacatccacagccaccggtgagtggtattgtcaggatgcaaaacctgccataggaaagagccaacttttcatatctgtggttttcacagggccaactgatagacttgaatatgtgcagattttggtatccactgcattcctagaaccaatttcccattgataccaaggaatgactatattgctttgaatttaatcaatactttattgttgtatatttagtcacttttatgattttgtaaaccatattgacagtaaagtgttgattatcagtaacacttcggggaacagattttagcactaggatgagaatttagaaggaaattaacaaaataaaaatgcatcacttaaaagaaaaatattttatccttgaagagaaaacactcctcagccttgctaccaatgaggcatttatttaatacttatgtttatagcatttctcatatttacattaacattttttctctctggcaggtaattggtaaaataacaattttaggttttattacttgatttaaagtgagtatgtattttccccaaaggaataatttaaagttgaaatgaaacaatgctattttgctttttgaaaaacaagtttgataaatttttacgatatgatatatatttatagtctttaaagttttaactataaaatacattctttttctgttcacagtaaatatttactggatctcataggtaaaaatagaagtaattaatattcttattaatcctggatgactgcaggttacctttacatatctcttacaggttgctcaaagtattttttcatactttaaaaataaattacaaataaatatttaacataaataatatttcaccattttcgtcagttccttagtatctaagctaatattacaaatgtcaaagtctactaattagtgtattccttaagaacattattagattttctctctctttttttttatgtttatatgttattggttatcatttgtctctcttcccttgtaagaacttttaatatgagagtctaataagattaacagtgataacataattgaaatactcagagatatttagggaattcttaccgaatatcaaacactatgctaactattatatatgcgttgactatttaatttagaacccactcaacttgtactatttctagctccctttgcttatacagaaacaaacgcttatagaggttaaacaaatggcccaacccagcagtgctagtaacttgagaaatagagtttcaagcccagggtgtctgactcccaaagatatgttaatcatttgactactaaacttgtaacaagacartgtttcatttcttcaatgcatttccagttgcgcatactgaaaagcataaattgctgttttttgtgtgcgcatttggtaaaagtacttctacatatttgaaagttgtcaatgtattctaaatatcatgatcagatatatctgagcttcaaatggctgctttttgtgtacaataatattggttctattttgtggtcattaaggatctttctttccccctatccatgtggaataataagccagtagttctcaaacattcatcttaaaaattattgaggaacccaaacactgtttatgtaggttataactaattttatctgttttataagaaattaaagcagaaaaaatatatatttattatatggtatataatatataaaaatatgtattatatttatataatataggataatatatttattatatttgtataacatataaaatatatttattgacattggtgttgacccctttttaaaataagagtaggcctggcacagtgactcatgactaatcacagcactttggaaggcccaaagctagaggatcacctgagcctaagatttcaataccagactgcrccatttgtttctcagggacaaatcccacttgatcattgtgtatggtcttcttaatgtgctgttgaatccagtttgctggcatttttttcagaatatttgctttcatatttattagcaatattggtctgtaattttcttttcctgtagtatcattgttttggtttggtatcagaataatgctggtcttgtggaatgagtttagaattgttcctcctatttaatttttttggaagagattgagaagcattggcattgaatcttctttaaatatttgttagaattcatcagttaagccattagctcctagacttttatttgttgggaataaataccaaatcaatgtttttagttgtaattagtatgttgagattttctatttcttcctagttcagtctttgtgaattgtatgtttatagaaatttatctctttctgctaggttatccaatttgtttgagtataactgttcatagtagtttcttatgatcctttatacttgtggactctctttcatttataattgtrtttatttgagtcctctctctttctctgttgtttagtctatctaaaaggttgcagactgagtatggtggctcacgcctgtaatcccagcactttgggaggctgaggcggttgattgcttgagcctggaagttcaagacaagcctgggcaacatagcaaaaccccacctctacaaaaaaataaaaacattagctgggtatggtagtgcatgcctctagtcccagatacttgggggactgaggcaggagaatcacttgagcccaggaagtaaaggctgcagtgagccatgatcatgccactgcactccagcctcggcaacagagtgagaccctgtctcaaacaaacaaacaaattgaaaaaaacttgtcaattttgattctcttttcaaaaaaaaaaattcttagtttcatttttcttttgattgtttttctaatctatttcatttatttctgctattatcattactatctttactatgttttttcttctgctaatttggggattagtattctttttctagttctttgaaatggaaagttaagtttatttgaaatttttctttattcttaatatagacattaattgttatagactccacagggtcttgctgtgttgccaaggctggcctcaaagtcccaggctcaagagattctcacttgttataaccttatcatgaattaacccatatattatttgaatttataaatttataatatatttgaacttataaatttataataatacatgggtaaaatatattatacgaatttacccatagattattatagaataaccttctttatctcaattgtgacaggttttgacctataatctattttttatatacatatacctgcctcttctcactttttgtaactcatagaatatgctgttttaccctttgctttcaacctttgtgtgtacttaagartaaaatgagtctcctggatactgtttttaatccattcagtgactctctgtgttttgattgaataatttaacttctttatacttgaagtaattattgattgagaaggatttattattgtcatgttaattgcttttctgttttttaattcctttgttatttttttcctatcttgctgtcttcctttgtgatttttttcttttcatagtgatatactttgtttcctattctgtatcatttacagtttcctctttgtgattatcatgtgtcttagtctgtttagtgttgctaagaatacctgaggctgggtaatttgtaaagaaaagggatttatttggctcatgattatgcaggctatataagatgtatggcaagagagaaaacaagagtagggagtagaagtgccaggccctttttaacaaccagctcacaccagaacttatagagcaataactcacttattactgcaaggacagtgccaaacctttacattttttcatataatatatcatttaaaaagttattgcagctctagttatttgtaatactttaatcttaacttttatattagaattaaaagtgatttatataccaccattagagtattagaattttcttaatttgatggtatacttacctttgccagtgagttttatgcctgcatatgttttgatgttggtaattagtatcttttcattttaactagaagaactttctttagcatttctagtaaggcaggtccagtgatgataacctccttagattttgtttgttgaagaaaataattatctttttatttgacagctttagtggttatcaatttcctagtgggcagttattttctttaagcactttgaatatgtcatttcactttgacctgacatgcagagtgttggctgaaaaatttacagataatttcatgaagtttcctttgtttctgataaattgcttttctattactgctttcaaaattctctctttgtctctgacttttgacaatttgattatcatatgtttcagtgaagatgtctttattctcaactaattggaattctttgggctttatcaacctagatgttcatttccctatttgtatttgaaacgttttttgtcatgaattatttaaataagctttctacacctttctctttctctatcycttccgagattctcatagtatacatattaattcacttgatagtgtaccataagccctataggttttcttcacttttttattgtttttactttttgtttctttgactggataattttaaattatctgtctttgtgttctctgattcttatatttgattaaatctgctgttaaagttctccattgactttttcagttcagacattatattttttagtttcagaatttctatttttttataatttttatctccttgttgaacttctcatattgctcacttattgttttcctgattttatttagtaatctataagttatgtttctaaatgattatttctaaatgattacctacaatgaagaatctgactccatatcaaggtactttctatactctgccgtattaaaatgtattgcctagcttgtagttcaaatggatattttcactcatgctaaactttgtaatattatttactgttcatttggaaaatattttttacttaattattacagtcttccaaatatagcatatttcatattacactagttggtagttttatgtcataaaattacattggctaatagcatcaccaatctcatcagagaattttttttacacattgtaatgctttcaagctcaaggtgaatgatacaagtattcttaaattgtaatttttgtttaaaatcttgaatttttattatttttaaaartctactactgtcagctgtttacatgaatagcagcattattttgttaattttgaagaaaatattaggcaaattcccaattgttaaatgacagtttgtctgtcatccatcctttccagtaacaatgtcattagatgaaaaaaacagatatgttagtttgcaattcaaacaatctcatgattgcttattttaggcaaccattatatttacgtatgtagcagaagttctttgggcatgctctccgtttcatctcacagaattttcaaaaggtacatgttgttgctgcttacgttatttttactgggaggtgaagaatttaatgatcactagtatagtttgctgccaactggatttctctaagaggccagcaacttacctaccattgattttacatcatcagtacaaatgtcaactctgtgacaaaggcaaatatcttagttttgctttgaaactagttgagaaactctacaataatccatcaaaacttctttgcttggttctacttgaaaccatatgcctatgttattgagctaaagtaaaattgttttctcacagtcctagtagacttacaggttaagcccatgactttgaccctgagtgcacaaaaggactaatttagaagaatgtgttgcattaattgtgattatactctttgccttcaaacttaaaccaaatcatataggaagccagatgtcaaagaagcattctatcattgcttcaagtttatatatggtaacaaactatgtattgagaaagtatctttctgatcatatgccattaagtctgagtagaaataagaagcaagattaaataacagaaccaaaaaaaaacccccagtttattatgaaaataaaatagtatcaaagtagtcttacaacttttctagttttatccctcttacagactcagtctgaattggtgagtttattgccctatagaaaacttcatggttatatgaggaaaagtgaattctggattaccagttcatattgcttaatcaagatctgataaagctcttcaacctggtgctttttgtcaaacatatctgattttactgtattttaaattaaatttaaaatgttttagacacataaatgcacttttaaaattgtgtctagtataattttagtaacattttttatttaaatattctccagaaacttcttggaacagttaagtgaatgagtaagaaagagataggagaaaacacacacacacacacacacacacacacacacacacacaacttctaaacatgtttggaaacctcaggtggaatccactctgaggggtatcagccataacaaacatgttaatatatcactgttcacctcatgatggtttcgaaaatttcctttttttgaatatgcagatttgggctagtcagctcaatggtacatttattagcatgtaagtttaagtcattgttttattacttatccttattacactacatgactcattaaagttataggcattctaggaagttagagagacatgtgagctcaaaactggatgtagacctaaacaactacctgagagcacagaaaataaaaactagagatggggaaaagaaaggcaactaatttactgcatacatacaaaatattaaaatggcattttttaatgttataattaaaatagtttttttggtgtttctgtgacattttattagggtttttctgaccataagtgacagaaatgcaaaccctactagttcatcaaaaatagatatgtaatgaagattgttcttttctcttagtattgatgagaagaattcccttggtgatttcacagaaaaagtaagccaagaaaagagtagtgatgtagctaggcatcaggcattctctctctctctctctctctctctctctctctcctgtttttctgttcatattagcttcattcttttctcacagcagtgcaactttccccaaatggtggaaatatgacctccaagatttccatctctagtaacatgactcttttgaacagatgtacaaatgtcagggaaggaactcatttgcctttggtcagatgaatgctctgtagccacgcagaataatgataagaggtcggagtaagggcagtccctgcttgaactatatggactgagtacaaggtgtcaacagtccccaaataaagaggggttattgtagctgaggaagggatggatactaggcagacaaaatataagtttgcactacagagattcattgttacaagattttaaaaatcaggtcaattaagttattataaattatagttataagatgtatccatgctgaataaaaattaaatccattactaggccaactgccagctgaggaaaacaaaacacaaaaagatgctatgattgtgagcctagcaaagctttgcatgtaaattaattagtatttattaatgttaaagcaaaaaagataagaatattaatctcctaacagcaaagaatatttgatgaacagcagactattttcaaattagattgctgaatatttcatttgtccttgtatataacaaatggagtaggatgtgaccttttttttatttaactttaatgttattttggaaataaaaattatcatggggaaatgtataggctatttcattcttaaagtacaaagcatatctcatactcaaaatatagtatttcatttttctgcacatttctctagataatatttttaagactgtagtttgacagcttactaataggttggtgcaaaagtgattgccattacttttaatggcaaaaactgcaatcacttttgcaacaacttaataactagtcttgaatcaattatttaaatttactatgcctcagtttcctaacataaaaaaacgggcttaataatccaatccaaaaaaattaaaatttttgaattaggtgatttaaggaaaacgtttggaactaagataattaaaaagctgttcttattcatatagttgtactctgaccattcagactagtgtatagagatggaatggagatgcttttaatgttcttattcatatagttgtactctgaccattcagactagtgtatagagatggaatggagatgcttttaattataaataggacatataaaatttaaaagttggataatgttatggactgaatgtttatgtccccaaaattcatatgtggaagccctaacttccaatgtcactgtatttggagatggaacctttgaaaagtaattaggttattagggcaggaccttggtctgatggggctagtggccttatgagaagaggcaccacagtgcttgttcactttctctcttctcacgtgcacaccaaaaaaaaaaaaaaaaaaaaaaggcgtgtgagcatgcagcaacaaggaagagagtcctcacgtccgcacctgagcagccatgctggcaccctgatcttggatttccagtttccagaactgtgagaaaataaatttatgttttctatggtattttattatggcagttgaagcagactaagacagatgcaaattagaggtttacatagaaaaaaaaaaagaatgatttgaaatggtaaacataacagtgttgtcagcttccatcccaataaatatgtcactaaccacattttattccaccatccactcctactatggtggagtaggataagaatggattagtaataagtaaagctgtttgatctacattagtaaaaatagcctcacctcataggaaaaaaatggaaaaagattcacatgtttatacctataacagtgctacttaaattgttctattgttagctttaatatgtaaaatacaggtggttgttaaaaccatataaaaacctgaatttaaaatgttttttaaagctaaaatgtcaggtcataaaatacaccgtatttggtgtccttcttgtgtgtgtttttcgttatcttgttctcaatgaaattccctcaaatgctccttagaggcaggtttgcttgcagcagggtccatgatgtgagaggactgtaactcaattttctgatttaatagtgcagtgttattcaagcatgaaattacctattcatggagagcaatcccctttgcctggcaagtcaaggctcaaaaacttgatgtctactgtgattacagctgttgacccaaccaattgttgctagaatcagagttaagtttttctgtatgccccactgaggaaaatatgtctctgtgaacagctaaaaggtgaaaataggtatgtagctctccttagaatcacagcactatgtgattaacatgctgggttaaaaagaaccaaatataattatagcacaaatggaaagtatattgtttgaacttttaggttcagggatacttgaaaagtgtatttatttaattgacattcggtttaaacaagtttcttttaacaaaaattctaccaggtttaagaattacagaggaggcaaagtccaactcagctttgtctgtgaccatctgctctataggaaacaatgaaaaacaatttgattttcctcattaacctaatcaaacaccataagtgcagttgtttagcattgcaacctctgaagtatgaaaattcaaatagtgcaaacttgtccaggagtaattttgagccagaaattttaactacatatgtaattgtattttttcctagtaatcacttcaaaaaaggaaacaggtgaacctaattttaataatttatttttaatttatccaatatatcaaaaacatgattgctttcaacacttaacaaaaacatgtctgatgagatactttatattcttttattcatactaaatctttgaaatctggtgtgtatcttatacttaatggacatctcaatttgaaatagtcatatttcaaatgctcaatagccacatgcttctatcatattggactgtgcaaatctaccatccttaacatcgtaaaatattctctctgaactcaagggttttcagaacctttaagtggcaaacactggagatgtgaaatgattgagaagaacaaacaaggctgcctgctctaatgaggtgttttcagtatgataaggctatctaaaaaataagttttctttttttatgcaatgggaaaagtcacaaatattctctcacacacacatttgcacgcgcacgcacgcacacacacaccacttaaatttttggctcactgacttctcttttcctgagcagagtaatggattaagaagtttagatgtatttagactttagactagacaactacaatttcagatgaaagaaaagagcttggaaagctgcacttggaagcaagaaaattgtcattttcggatgagatttaacagagagtgataggagagactgaaaacatcaactgtaggaagagaaattcagaggggtaacattttattgtgcggtatgaatgtaatcaacctgagtaatccactccatagtttttggtaaagtttaaaccacttttcaacttggagagatgcttaactgatgatggttttctgaaaataacgtgatacctatgaaacgggaaaagttcccttatccccctcacagggcgtgcagtggggtgtggctcgcttcttcggtgccccaccactcaaaaccccttgggagagcaggcagatgggcaagttgtggggcttcgaccccacggcagtgtctaggggtgaatgttacagctcctgaggccccagtgggcgtgtgttaccatgtgcccttttagtttagccaaccgctgttggctgtgtttatcagctcagttagaccccccgccttacagcaagcacagagggctttctgtatcccagggtttcttgccttggtgtaccagaagaatcggatcacatgtgggcttggagaatgagtgcaaggttttattgactggaggtagctctcagcagatgggggaagccagaaaggagatggagtgggaaaggtggttttcccctggagtcgggctgctcagcagccaggctctcctccaaccgccccggggcaaactgcgcatcatttcaccagtcatggcttgacggtgcctttcagtgtgctctcaggccggtgcgtttctctccacgtccagccacttatcttcttctgtcagtgtgttcctctccatgtccagccgcttgtgtgcctgcccgctagggtctcggggtttttataggcacaggatgggggtgtgacaggccagggtgagaaatccaacatctgggtgcgaagccaggagtgcgtcctcacctaggtctgcgggtccaggcccgggggtggaaccctacccagggacccgcccttctcctcccagctcttccctgccccactcctgtatcacctacatggaccatgaagtcagccaggtttatttgggttatatttacattcacatggattgaatgacatatatatatatatatttaacagcattatgaaataaagtaacttgtccgtttgtgtgtgcaaacaaacatggtgtaaaacttcaggtttatctttataaattttttttatctttgttagccagcaattaggtccatttttatagatgtttctggtaatttgtttgttttagtcacatacatgaaatttttagaaatattatttaagttatttaaaggctgatcttgaaggacaaaggttttcagagtaaaaatctaaaagttttaaggttgttatcttgtgatttacttaaggcttatgtgtagcttgaaaaagatgttaaaatctctttgctgtcaagagctagtttcaatattttagaagcacatgacttaaaaatctgcactaataattctcattcacaacattgaaagttgggatttgttgagttctttaaattggctataagttccatttcttgagtaaaaagctattgaaaaaaataattagaatagttagagtaaatgtcacataaattaaaacattttgactaaactattagtgtgtgtttgtgtgtcagatcaacatagtcatgtgtttcttagcaaggaactattcacatatgttttgcttctgctcaggataagagtacaaatccctctggctctttctgaacaattacaacaaataattttatttgaaaatatttcataaataatttataattgttatacacacaaatattatatgtgtttattcttatgattcacttcaactttatctggcaatctcaaatgataactgatatctctagctgcttagttttttattcttgttaaatagaactcatggactcaggtttgcagacatccaagttgtgttgttcagttgcatctccagaattaggtcatctctccttggggggcagtagatggcctccctcagaactaaccagtctgcagttttgtttcctgaagaaccrtgaccatgacgaaacatcacttgaatgttgaaagtttttatttctctgtaacttttctccagcagcctgattacctccagattcctggcctgatcagtgacagccttgtcctgacagaggctgatgaaacacaccaccatgtcccaagaaactcttgattcagtgctgcaccctagtaccatagcaataataactcatgtaatttacctcctcttattgcttgagagtgaatgtcaaaagtttactttgctttctaatgtttataggtaatacgtgtgagcaagcttcttgggttttaataccagctccacctctgactatctatactgttttgggaaaattacctagcctccctaacctcaatttccaagtctgtaaaatgggaataataatagcagcctattttggaggattactgtgaatattagatgagttgagggcaagatgtgttaattcctgtaaaccaagttgaataggacctggcaaatggtaagcaaccaatagataccagttattattaccatcgtaagataagtgtatttttgcagcagtggctctagactgcacagcasmatcacccaatgaaaattttaaaaatcaagctacttgtgtcccagcctaaacttactgaattagaacctcaagaggtaagtctcatcatgtgttttttttcttttaaagttccaaagatgattctgatattgcagccaagtttaagtcttactgctgcaagaagatattataattctaattggtgtccagtttttattaattacaagttaatcatatactaacactgaccattctgtgctttaytgactctagaccattattcagtgtcattattaatgtagatatctcaaatgagaggttgagaccaatttttttcctatgccatttacatgccatttttaaaaagtagagttgggaagaagagcccaccgggttgaagtttaactatgaaaatacagtgtagacagaaagggaaacctagattttagttcagccttagagtgaacagtcatttcctggggaattgttggtgaaaggttgaatttacatgaaccagatggtaaatctgaattttgttgtatctttgtttcccccagtatttccactgcccctttagagcacagttgcactacagtcagggtaaactttttcaggtttgccccaatattgttattagctaagatttattaaaggccctctgttttaggggcttcatatgattttatctcaataatgccacgaactaggaactaattaatatcatcattttacctataaggaggctgaagtcagagagattaagcaacttgcctaaagctgcaaagtttataagtagtgtagccaggatatcagcctggactctagagctgtatttttttttttttttttactttaagttctgagattcatgtacagaacgtacaggtttgttacatagatatacatatgccatggtggtttgctgcacccatcaacccatcatctaggttttaagccccacgtgcattaggtatttgtcctaatgctttccctcccccttgccttccatcccctgacaggtcctgatgtgtgatgttcctctccctctgtccatgtgttctcaagagagcagtattcttaaccactgctctgtactgctgcctcccacaactgcagctcttcagcccatcccacttgagaataaatacatcatcttaaagatgactattttgggtaaacacaaatattcttcctctgggcatttctttctctctccggacttttgtcttctgctgcaggttttggccactactctaccttcattaaatttgcttttcttagcatttcaagttacagtgctattaaaaacagtttttcattttcttttaaaaatgtaccgtgggagaaatgcagccatctttccttcggggctctttcttttagacatgattaaacaatccacatcaataaatgactcaaccgggtgaaacagagaattcctaagaaaccataaatctcacaagtttcaaaggctgctacccatttcacattgttcagatgaaatatatcaccctaaattcaactttaatcatattattctgattgtctttgctccttatacttcagattttcaacactttggtctttttaatttttggtccatcctttgtttagtgcaaggccttccacacatataggagctcagagcttctttgtggtaattaaaaatgagcctcttcaaattttgaaaaaaaaaatattagctatggggcttaaatgaactactctgtctcaggtttcaaacaattggatagtgatattttccaaacaccctgcacagccaagcacttgcagtgaagtgattttgccactggggagcatctattctggtgccccaacccctgctcatggtaccagaaccctaactccattctgcagaactgtactgctcctattcatagatctatgattaggataatattgacccacccaagctagaaacagaaactgtgaagtccagtcttttgttcaacttaattgcatcaggcctgggcctgtgagtcagttcaaaccaatgagacattgcaaatatttgctggtgtcttttgggtaaaaagcttttctttccactgagacctatgaacacaatgttacctctttacttctggacattgaaatacaagattgtaaagcctagaactgttgcagctatttctgataaaaagagaaaagtcagtcttagaaatgatctgatactcaaaaaaaaaaaacaactctcatgaattacgtgtgagaattcagatcaaaccatagtcagagaactctgggctttttaattcctttttatgcttaaggctgcatcatctgtgatttttggctacatacaacataaagagttcaaattatatttcaagagagaaacagaagagttcatgcttgaattgtaagtgttcatagaagttcttttatttgttttctttaattttttattaatctactggtgttggtcataccaaagacacagagaagtgaaataattagctattcatagattcagaggcagcataaagatagaaataaaaagcaagctgtaacaaaatttaattcctgtttaaaggctttgattcaatcaacatgatcattaatatgtatttgaaagcgtaggtgattctaaaaggaagctactaccggtcactgttaagtgagtttgttttcagttgtataaactttgtgataattataaattcaaccatgtttcaatagtcacaatataattatagatttggactttcacaatcaaaagctctttggttgctctttgaattcatatttccaagaattgggttctactaaaattatcatttcatgacctctttgttgaatgccctttggcaatatctttgctaggtggtcatatatcctatgcttaagcatcatgggttctaatcttgattggtttttactattattatatgtgtccttactctcaagagatgaatcatctgattgctatctcattccctaagtgccatatagaaattatgtgtacacatgaaagccttttcgatgttcaaagatgtcctttataacttttatttatttttaaattatcttcaatatcttctcaggataaattcccccaacatccttaagttatttgattttttaaaaagtgccaggcagaggttgcggtgagccgagatcacrtcattgcactccagcctgggcaacaagagtgaaactccatctcaaaagaaaaagaaaaaagaaagaaagaaatgtctcttaagacattttctttaagccaaaaacatgaatgacagtaaaatatataaaagaaaggtggataagggaccagaaactttcattatttgtagataatatgtttctccaaacaaagaagcccaaagaagcctagggcaatgaccacgcattgtattccaggtggtaaaggatggacttttcaatcaactgagctcataaagttgactttccctattccaaaagagtctgttagaagaaaataaatgagtacatctacctcacgtgatacacatagtcaattccagatgattaaagacttcaaagtaagaagtagaacactaaaattattattaatatatttaggagaatgttttatcatttcaggataaaaaagaaaaatttttaaagaactcagaagagaacataagctttgaagtaaaagactgatattttaaattaatttaaaattaagcacatctattcattggacagcatccagttaaaaaaaaaataaaaagaacactagccataaataagcagaagatatgtgtagcatatataactgatgacagattaatccagaacatacaaagtctagtaagtaattcttaaaagacattgatctagtataaaagtatctagataacagaaacacaaatggtcaacaaatatatgaaaagaagcttaacttcattgaaatcacagaaatgcaactaaaaaccgtaataaacccmattttatattcatcagattcacacaaattaaaaaagaaaaaaatagcaagtgttggcaaggatgcaaatcaatagatattcccagacataacattgaagaaaaaacagcagcagatatatacatgtaagataaattacatttttaagaaattacctttttaagaaattaaaaaggtaaaatgattttacatgttgtttaggagtacatgcatatgtattcaaagtagatacaatgcatagaaaaaacacatttaattcagagcagtgagtaactattgagacggtgagatggggtgagagagaaggaatgccatcagaataagttaccagcaggtttaattgtacctcacatgctttaaatcttttattttctttttctttgttgttttttgttttgttttgttttgtttttgcttggtgacttttttattgtggtaaagtatatacaacataaaatttactattttggtcattttatgtgtacaattcagtggcattaggtacattcataatgattgtgttttcaatagttaaagtaagttttttccccttatggatgtgactaccatcctggaacagaaaatttgggtggacaaggcactgaaaatgattgtaacttctttaacttacagggaacaagacttggagtccctgcaagtaccctataaggggtacttgcagcatataacctttctggctgaaattacagaacagaatataaatgttattaactttttgaaaaaataaaaagtaaaatgacccagtaacaaattagaatatgggtaggagggaactgaagggtcaaggacttaataaggttatcttacaaagtggagaattaagatatactgtctatggttgttgtaatacaaaatagaggtttagatgtgctacctaaaaatatacaaatacagttactagagtaatatagccttagtattataaatatatcagaaaaaggagtaggatctaactaagctaaatctagcatagcagaatttcagtggttaatgctgacttttccaacaaaaatatatgtatatgttcaaatggagaagtaagaacagaaagaggtcgaagtgcttgcatctaaggagctggactcagggtggggaacttgatcaggaaattgtggcttttaatgataatttcttctgtttttttttaagtaacatgcttgtattctttgattaaaaataatcatcatggtatgtttagaaaactgattctgttctgctctgaatgtttctctcagatttatatctaaattttaattatttattattgacagtagtatacctattatagtattactgtaaaaaatggaatgcaagaagaaaggggaagcattttaagtctaggaagtagaataaaatatgctgcaaaaaatgttttaggtttagtattccttgaaatataattcaatcttgatgttcaagagaatttttgactgtatcagtctttgtatataatcaaacagagcacaaaatgggtacactcaaccttaggaaacttgaggtttagtaaattttccttttgtaatatcttaccaaaaatggttgtgttaattttttatgttcatgcaatttacttccaagacaaggtggttaacgagggttttgtagttgtttgacagtggaagctaaacaagatatgtctcagtggagtaattattgcttatgtatgtattagaatttatctattagtaaaaaaacagtcttataattatgtcataaaatttgattagggacataaaactggagattgtaatactattagagtgcagggaatctgcaattttctaaaaatctaattttggaatgtgtctcttttggatactaaatacagaattttttggccctagggtaagtaatcttttatctgaactctttcttgaattttctaagacttataataatcaaggtttggattgaaagcataataaattattcagagatgcattatatccttgattttataattaccgagcaagaattccagagatatgcacagttgcatgttccatatagactcctcagaaatcataccttcaacataagtaaaataacttccactagtaatttatttattttttgtgagggatggggggattaattcttaaatattaaggcattaaagtttctacaaattgttatccctgtaagatttcattttaggagtcatgaagatatattgggtagtaaacataaaattatattttgtctttgcatattcaagtcagtcctctaagtgtgattgtcatttaacttatgtaatgcataatttttcttatctctttcgagataagaaaagaatttcaatagaattactgcattaactatggagatggggtggtgattaaggggaatatcccaccaaagatatgaactgtggtctggtaagagtatggcaagaggaatagaagaaatgccactacattacttttaatgcatttcccatgaagattgtcttagtctgtttgtaaagctataacaaaatatcatagactaatttataaataacagaaatttatttctcacctttggaacttgggaagttgaagatcaaggtgctgtcaggttcaatgtcttgtgaaggtcctggtctccactttcaagatggcagcttgttgctgcattatctggaagagaggaatgctatgtcctcacatggcagaaggtagaagggcaagagggccaagtattgtgtgaagtctcttttatcagagccttaatcccattcacaagggaggagccctcatacctgatcacctcttacacacctcacctcttgctactatcacattggccattaaattttaacacctgaattttggagaggacacattctgactatggcagagattaagctgtaaaacttgactaacatacatgatgagacagttcatctattaagatttattttgaactgaagaggctttgggaactagcctagaaaatgtatatcttatataattttgtttttccaagaaaatgcaattctattttacaacaattaaaagaactttaagaaaatacttttggaatattatcagttcctacatttgaagtctctttatatgtatatgtgtgtgtagtcacatcaagtggtatatataatatgctttgtattagtttgtaagagctattatcaagttcagctagccaactgaagaaattgtggtcagcctacaaagagttgtcatgtgtattaataatgtaatctgaatgactgcagagtgatgaaattatactgttagtagttaataaagacaatagaaagtcttccatgaatgtgtattcatgacagcatgagagaataattctgtctagttacactttgaaatcctggcatgtcatagaagctttgtttgatttgttgctgttgctttcttgacagaaattcaatttagggagaaactctgagaccaacgcatctcttacctgttttgtgaagcatggcattgaatactgtcttatacctattagcaatcatggcaagaagacattagtaacgatgacacacatgcatagcatcaccttcttactttatttaaagtgtcatgcgattgggccccttagataactrtttcaaacaggtttagacaattttgcagtttaaacatacagaggctaccaaaaccactgaccataaaatgttgttctttagatcacattttttaaaaagtatccttggttatctcctcttttcaaaggcttcctttatcttcattttgttttgataatggtaagagttaattctaaatgtttttgccataagcatgtgtgtttgggaattctttgctttttacttacagaacaggcatctaattgagcaagtatgtcccaaaagatagatatgtgtctggcagtgcttgcccttcacctaagtccttgttccattagagtgactattattgacagacagcaccatctttgattcttccttgatgcttcaagactcagcaagagtcacctaattttattattgctgtttacaatttgtcccttgacaattacatttttacaactaagacacattgatgaagataactttctggcatttatactgcttaccctttgatttaattcaatccaaaatacttttgtgaaacacctactttgtgcctggctgcaggcaaggttgctctctgtctagcaggggagaaaaataactatattatagaagaataatgcagacatatgtaagatgttaatggagtgtctactgtggaaaagataaaaacttttgctttcatgggaaggggctagattggggtattcaggaaaacccctgtaaggtaatatttgatctagattttgaaagatatatgtattttaattacatatagtaagtactgtatrttccctgatgaagttctatttttcagggaatgctgctgcacttagcgtccttgagatcacacttctacttttggattagtagaaacatgaatggaggtagcattttttaaggcacatattcttaagtggacactttacagattatgattatgactctcagtatcctctttctttagccatgggccagggagccagggtaacttaaaacaatataggaaaataatacattagaaggctggagaaaatttaggagattttacttgttatctgatggctaacaccaagatccaagctttcttcactatgaagattttataagcatatatttattaatctcccatctttcaccaccatgacactctgttaaaaaatattaagaagctttgtttatgtttaggtccagtctcttttgatatcccaaacaggctaaaatcatatacttcagcatttcagcatatgtaacaattatccaaaatgactaccatcggtgattccaaggtaactgtgcatcaagttatctcagggaaattaataaaaacacagaattctgagcctaacattggatgtttcgctgcaataggtctgggctaggaaaatataataaggatttttaatatgtaatttcggtgaatctgattcagtcattttatgaaatggggcctggaagccgttaatctagattttatacacctgctaacgaaaatatacttttgaaagttccagtctgtacttgtgttttcgggggctataactggcccccaagcagaagtatcccagaatgtaaaacttattgtaacccagtgtgaggcatggggaggagggagatacaaattaataaaattcattttgagcactcataaccagttagccattttcgccttgagcaaccctggcagaaaattatgggagaataaatgtgagtgttttgtattcctcttattcaattccaattctcttttcatgtttaacatctggatgattaataacttattaatattctgcaataggaagctctcaatttatcagtgttgaaagccttactgtcaagctgtcagaattggcatccccagttgtaacagaattgtctttcctatgaactgtctcatgtcacattttctctctctccatatagatagaaagatagatagatacatagatagatttttaatgacaatttttttcactataaaacctcctcctagtcatgtaattcctttcaaagtcattcagacaagaagtctggaggctctccctaactcctgatttccagggaacccccaattcatccattccacctccagtcttccctgtatcagcaaatgacaactccttgcacctggtgctttggagaaaattccaggagtctttcttgattcttttctttgatttataccacaccctcaatttccactacatgaaagccctattcatccagctctataatgtagcctgaattaattcacttctcttcctttcctgtaacaaatcactgccattgccattgcaccgttgtctacctacaatccattatttatgcagtaacaagaggagactatataaaaactaagtggaatggggtcactccttcaatagtgattctccaataggttcaaattgctttaaataagatgcaaaatcttcaccttacctactacgccatcaatctctgacttctgcccacctctttaactatatctctggtttcacattcccacaagcccattttgatccaaacacacaggccataattctgttctttggactttgggactcattcactctggaccattgccatcctttctctgacacattttatcctggactgcctcctcattaataaagtctaagttcaaacatcaaccatcgttcactgatcagcctaactgtggtgctaccattctattctctctctcaatatattaccctatttaagtgtttcatagaacttattttttaattgtatagtgatttaatccaagtttttccctctaaaatataagatgtgtctgtcttattactatatttctaaatctagagaagtcccttatatactgtaggtatgcaataaatattaactgaataaataaaataatacatttcaaggcacgataacttgaattatttattttcatttttccaatttaaaagttcctgaattatgagaggactttaatattttttaagactcacaattattctaacaattctccttttcccagttgaatctcaccacattccatcttccacagagttgccaaagttaaatttctaaaccaataaggtgatggaccttttaccattctccaaatccataagataaagtcaaaagtcctgagcaatgtctaaaggctttttataatttattctccatctgtatttttagcttcattttctgcctcttccctttgtactctactatctaaccacataaaacttgagtagtctcagacatatcatgttatgttgtgatccatgccttcgccagtactagtatattattccttttgaagttcacttcaagtgtcagttctcccctcttcattgagagttagctgttttcacaagtctctgtcttagtgtttaatacagcatatggtaattatttatttatatgctgtgttagccctgatggctaacatagtgtgctcagcatatgtcccatatgtgtaaattgaatgagtgatggatgaatgggtggatgggtggatgggtagatgaatatatgaaagatgtcttctactaattcataatcatcgggtgaataggatcctttcccattcatctgagtgttcccttgatactgggctttaaacatggtaaagactttatattacttattaagggagtggataaaataactgtacttatttatccactgtactgtaataaaagtacttattaagagagtggctaaagtaatggtattcacatacttttacctaaagaagcattatctttgtcttaaaaagttttttatttctgtgtgttttccacctgtgttctctaactgtggaactagtagccactagttattcgagggtactgagcaattgaaatgttgctagtccaagccaaagtgtgctgtaagtataaaatatatacatttagtagaaaaaaagattgtaaattagctaggcaataacttaacatgaattatatattgaaatgttaataatttgggtatattgtcacatagacactgtattagttcattttcatgctgctrataaagacatacccaagactggacaacttacaaaagaaagaggtttgttggacttacatttccatatggctggggaggcctcacaatcatgraggaaggcaaggaggagcaagtcacatcttatgcagatgctggcaggcaaagagagagctctttcaggggaactcccatttttaaaaccatcagatctcgtgagactcattcactatcatgagaacagcacagtaaagamcctccctataattcagtcacctccctctggattccaaaagataatttatttttaattttggaataggtccaaactttagtatcagaaaaaaaattctctagttttctttgtttagacttcagctttatttaaatgttttactttgcattgtattttatttacaggctctgacatacatgttttgaaacaattatgattttccttttattattattattattattattttaagatagagtctggctctgtcacccaggtgggagtgcagtggtgcgatctcggctcactgcaagcttcacctcccgggttcactccattctcccgcctcagcctcctaagtagctgggattacaggcrcccgccaccacgcccggctaatttttctattttttttatagtagagacggggtttcaccatattagccaggatggtctcgacctcctgaccttgtgatccgcccgcctcggcctcccaaagtgctgggattacaggcatgagcaactgagcccggccctaatttttattatttttgtaggaaaaattttgtttttgaaatcatatatatatagagagagagatatatctagagagaaagagacaaatacacttttttttcttttagttgaaagttgtggttttaaaagaatctgcttacttacaaatatttacctagtaaacattctaggtttggaatcacagttatctaggggtacaagaggaacgggggtcgggcgcggtggctcacgcctgtaaacctagcactttgggaggccaaagcaggtggatcagctgaaggcaggagttcgagaccagcctgaccaacttagggaaaccctgtctctactaaaaatacaaaaacattagccgggtgtggtggtgggtgcctgtaatcccrgctactcaggaggctgaggcaggagaattgcttgaaccttgcagtgagccgagattgccccactgcattccagcctgggtgacagagggagactctgtctcaaaaaacaacaacaacaaaaaaaaaaaacaggaaggggatttgagaggttaaggaataagtctaaggtcaagaacatggtcgtttcaccatgcatttcaccgtgcaaatcagcaatcaggatttatttatcaaatttgatcatctttctcatctctgatatcatgccctgttctagagctttactactttttaccatgataatttcaacaatctcctgttatccttctctccattgttgtctgcattaaatccatgttccacactgctaccagagatgattaaatatttataatttaaaactatcactttcctaagtgagagcctttgttaatcactaactatgaccccattaaatacagggataaagtctaaatccctagctaaggtgtacgtatccctgtgtaattgaaatctggctacctccaatgtcgtgtcttgtttgatgcctcccctacctcctgctacatgttctaacaccaatcttgtcttcctcattctcatctccataacctgctcttctccacttgcctttgctgtctccttttgttgctctcctattaataatctgttgaattatgtatcatttccgtacccaattttattatgaatctgtttattataaattacccaacaagactgcttgttctgtaaggcagagatcttgccttattctctgtggcttgttttcctcatcagaaaaatgagaatgactcattacttacattgtaggaggagtgagttaatacatgtgcctggcaaataatcagtggtcattaaatgttatatcacttaacataattattgtaattatccatattaatagtaatttgttaagcactcagtaatgtgtatatagtaaataaagatcaggtgattaattatatttaggatcccaggaaaaagggacagggaagaactgagttgaattaagaaggaaaaaattcaaaaagcaagcttgagaccagaagtctctaactggaactactgattcctctgccctggtctaaacctttatcattcagttagcttacatgctaactgtctcctgaggagtcatttttcatatattcattgcaagttccctcagagagcatagtattagatgatgtcgcataggacaaaggcaacatatgtggctttggaataggacttttcaatgtaccctcttcagcattatcctgatttacttcctgtaattctgcactgctaatttggctcttttctatttcaataataaatacctaggggatttttttaagcaactaagaaggatgttatcaatttttcataagttccagttagatcaaagaggaaatctatcatgtagttggtaaaaacaaaattaaccaaaaggtcattccagaaaaagctgtaaaaagagcaagaaaaatatcatatcacttaattggttatgatttaagtaattaacttgttctttttgtctggcactaatgatattcagtaagcataatatattgttataaaacagacctagttcttgtttttttgagtcattatgagaaaagcagaacttagagtcagaaaactaatctgcatattgcatttgtatacaaataaatatattttacataaaaataaatgtaaaatcacttcatacatattgctgctaatatgtaatgtagtgtgtgaaatctaatattaggtaatagttactgagaatctattttttcctatgtaattgtcataatgatctggagctcaggttgtttcctggagtcatgcagtggcagaaccacaaaattcaacagagatctgtttgaccctggaatctgatatctgaagcactgccttgtcttattttaatcacgttttgcgtgtctgtgtgtgtgtgtgtgtgtgtgtgtgtgtgtgtgtgtgtgtagctaattgaacttttatgcctagaacagtgctggtctaacattagataaggatcatatacttttattacctcaaatgcccataagtatcatatttttataatcacttatcatacttcagctacccaatctctgaaagtatatatattttaatcctgtagaatatttttataatgagatccatgtctgtattaccttcattgaagcacaaagaagtagaaattctttttatttcaattaattttgtctctgtcctgctgcaagagatacctacaataatggtatttaaggattcagtaagtaggtctgtatttcccatttacaatttctgtatggctttataaacattgaagacatcccttctaaactgccctaattccagatcaaagactcatcttcagtgtttttggttagaacaacaaaaacaggaagaattatatttttcttaaaaaaaaaggtgtttgttaaagttcagggaaaaaagagaaagagtaccaataaatgagagcaagtgatgtttccaactagataaaatgagaatatccaaatccttcttaaaagcaaatttaattaaatctgaggatacagtggggttttgtggtggtggtcgtggttgacctatttttaggtcacaaatctcagtggagaatgtaatgaaagctaaggattttttcttccaagcaaaatgcttgcatgcaaataaatacaaacttttttcatgatatttcagggaatagggcccaaaggatggaccttaggttaataacttctgactgaatctataaattaggattcactttactgaattgaattcagttttcactatctcctgctaatgattgtgtcttctaaagctataacatgttttactgctttaccacttgatgtctccacctatcatttacataatgctaatgctatttcatctctctaactctgctagacatttttttcattaaaagttttagaaaacatccagacttttaagaattgtcccacatgcctactacgttatttgaacattgtctcagaggaattatttcatgttccctttttaaattgttaattgacaaattatcatgtatgtttttgtgaggtaaattgtgatctttgatatatgtacatatgtggaataattaaatcaatctaattaacatataaatcacctaaattacttgtcatgttttgtgataagaacatttcaaatttaatctcctagaaattctaaaatataccttatttaactatagtcaccatgctgtgcarcagatctcacaaaaactatccctcctgtctaattgcaactttgtagcatttgtctaacatgtccccttttccaccacctctcagcctctggaaaccactgttctcctctctgagtttgaatgttttagattccactcataagtaagatcatgtggtatttgtctttctgtggcttgctaatttcactagcataatgtcctccagattcatgttgtcacaaatgacagaattaatttattttttaggtctgaatagtattccattgtatatttataccacattttccttatccactcatccattgatggacactttgttcgatatcatatattaactgttgtgaatagtgatgcagtgaataagggaaagagatatctcttcagcatgctaatttcgaatcttttggatatatacccagaagtgggattgctggattatatggtagttctatatgtagcttttgagaaacctttatacagtttctcataatggctgtactaatgtacattccctccaatgagaaaaatatgccttgaagccagaaagatcctgacacagttaaggaactgaatgaaggccaatgtacctactcatataaattactgggagaatgtcagacaatgtggtttgacagaaaggcatggtccatattacacaaaacctacagggtcctatttaagagttgtatttcatttaaatataatgtgggacacttaatggtcttacactggagattgatatgatcataatttaatttttaaaataccattttgaaggggtttggaaaaatggaatggaactggcaaatatggtggcagataaaccatttaggagattgtttttctagttctgataagagaattatggtggttttagctaagaaagtatagtgatgatagataaaagaagatggaatcaagatatatttagggagtagatttgatagttgggaggtggacgcaatgttagaaatgactcttaggtgtstagcttaaataatttaatgaatgtatgtattattattagagatgttgaaaatacgaagagaggcaggattggtagttcaattttggatatgttaactttgagatgcctgtgagacattcaagtggatatatctaatagttcagagtagaaactagggctttatatagaaatgtgtgagttttcaacatctacactcatgcattgcttaacagtgggaaatgtgtccttaggttattttgtcatgcaaacatcatagagtgtacttaccatatagcctattacacatctaggctatatggtatagcctattgctcccaggctacaaatctgtacagtgtgttactgtactgactacggtaggcaattgtaacgcagtcatatttgtgtatctaaacatatctacacatagaaaaaggtacagtaggcctggcgcagtggctcacacctgtaatctcagcactttggaaggccgaggtgggcagatcacctgaggtcgggagttccagaccagcctgaccaacatggaaaaaccctgtctctactaaaaatacaaaaaattagccaggcatggtgatgcatgcctgtaattccagctacttgggaggctgagtcaggataatcgattgaacccgggaggcagattttgcagtgagccaagattgcaccattgcactcyagcctgggcaacaagagcgaaactccatctccaaaaaaaaaaaaaaaaaaaaaaaaagaaaagaaaagaaaagaaagaaaaaggtacagtaaaaatgcagcattaaaatcatatgagaccactatcctatatacagtttgtccttgatggaaacatcgttatgcagtgcatgactgtaaatggcatttaaagttatggtcctagataagatatcccaagaagtgagtatgaaagtggaaaacagaaattcaatattagccttgaagaggtttaaagcatgggtcaagaaagacaaaacaaaaaagtaaactaagaagaaatgagggtaggtcatttcccacagagaaagggtaggtcaagaaggctgtgagaaaggagtggtaatctgtgagatatgtaccaaagaaaaaactaaaaatattgtccattgagtttggaaaattgcatctttggtgatacactctccaaagaaactttactagcatattaagttgagaagccagattgaattgtgttggaaagagaatgagaagaagtggagacaggaagtgtaggcaacttttcaagaatctttgttctgaatgtgtacaaaatgttttgtggcaggggtgcagggggtagggggtagcgttttgaagaaattcaatcaggcatttttttttttgagacggagtcttgctctatcgcccaggctggagtccaatggcgaaatctcggctcacttcaacctctgcctcctgggttaaagcgattctcctacctcagcccccgagtagctgagattacaggtgctcgccaccacgcccggctaacttttgtatttttagtagagacaaggtttcaccgtatttgtcaggctggtctcgaactcctgacctcagatgatccacccgcctcagcctcccaaagtgctgggattacaagcgtgagccactgtgcccagcccaggcaatttaaatgtacattcttcttacctttctctctcttcctcttgcttctttttcttcctattctttttctccttttctttctcctcctcctatcccttttcctcaccttctcttctcctcccactttcctttctccttcctctccctgttcccctccttcttccccccatccttcttctccttctaaggcaatggatactaaagcaagtttaaatgcctagagaaataatctggtggaataaaaggaggttgccagtgaaggtaatataatcccttaatacaatgtttttttttttcagacttgtgcattttttttcactttgatacacacattttattaatctcaatggtagaaatagaataggatcgatctcaaagtgttatctggccttaaaatatacagaaaatgtaacattcatttgggatgtggaaatcaaaggactgagttagtgtttgaagatcacttttagaatttgacttaaaaaggaagagtggctatatttgccttaaagatgaagtatgaacttaggaaaaaaggaagtcaggtttttgttcatttgtccatttgtttttgagaaggttctggctctgtcacccaggctggagtgtagtggcacaagctcagctcactgcaacctccacccccaacctcagcctcagtggctggactactggtgcatgccacaacaccccgctaatttttgtatcttttgtagatatggggttttgcyatgttgcccrggctggtcttgaactcctgggctcaagcagtatgcttgccccagcctcccaaattgctgggattacaagtatgagccactctgcccagcccagttttctttatattgaagttaaggtggtcaaatgactttgaatttgaaagtaaatgttgcagacagactaatggaaagcagattgtacatatgaatttataaaccatatttatgaagtcagttccaagttaatataacagatatctggaagatagcagattagaaaataaaaaggactagatgggtatgaagaatgagtaagagagacagaagagaatcctgcttagagagtgaaaaaaaaaaaacggaatagacacaggcagacaatatgattttggatgtgtatatcacaagaggagatggtggctgaaactaaagcttggaagccatttttctgaaagaagggagtgggaaatcatgtttttataacaagatagataatgcttcaataacaggattgatgagacgaataaatatttattcattattgttaattttgtatttacctaaaatcaattctcatgttagaatttattcataattatctgataagagttagagtaatagtcattctcacgtacttctcttcatctgttctgctcctcagtatttttcttcttaactacacaaacttttcattgtattctcatttaaacaattttgacatcaacttttccagatctctttctgaggtccacctgcctactagaatattccactaacgtcattatawaactcaccaatgatgtaatgaattattgataaattatcataattgatgataattgataaatttcacttgtgaatccactgtaagatcctttctcagtgactaactctaccattgtctgctcactaacacgaggcaccaatagtcaatcctttcctctttctgacaaccaataaccaatccttcatcaaatgctgtccagtcttcctctttgttctaagcttgtattgaatccaaatggattttccatctccttggtttccaccctcatttattacatgttatattaaaacattctacctagtgatccacctttgcttgttgtactattgttgtatttgcctctcattctcattcccttcttatttaaacaacatcattccagttcataattaggggaaccagcctttccctattgatatggtttggctctgggtcgccatccaaatctcaccttgattgtaataatccccacgtgttaagggtgggatcaggtggagataattgaatcatggaggtggtttttcccctgatgttctcatgatagtgagtgagttctcatgagatctgatggttttataaggctcttcccccttcactcagcacttcttcttcctgccgccatgtgtgaagaaggacatgtttgcttctccttctgccataattgtaagtttcccaagacctcctcagccctgtggaactgagtaaattaaacctcttgcctttataaattactcggtctcaggcagttatttatagcagtgtgagaacagactaatacacctattatcagtgtgtgtaattggagtggacttgtgctggctgtacccttaagagcagtctgtttccctagcacaatgctggattcacagatgacatgaataagatgatctatgacagcactcactcaaactttgattttggctgttggggaaaacaatatttttcagaggtattgctgagctgtgtagtatatgtaagccaaaagtttctggtggttaattctgcaaccatatttgaagagaaaagtcaacatagaagaaaatcaaacctagatgagaagacaggcacttgacagcattgtttgcacacatggatccagctgtgtacagagctctcactctcccttgactttggaagttatatgcgccaataatttccccttttatgcctgaactaatttgaactgaatctctgtcatatgtagccaaaatttttaatataccacttctatatgttgaccttccaatctagtttttactgccaccagacaaatatttctaacatagaaacctggttatcaaacccctcttgctttatttgcataatagagcccttgggataaacacagtgcctcactgtgacctgacagataccttcatgatctaacctttgacctacctttccaactttgtctcttggcactctccctccaccamatttgtccactcattcttctaagtattcttatatttaatttgctctgcctgaaatgtctttcttttccagccaataggtagtaactatytgctctcctttactcatcaggttttatgtttaaaacccttcttcgtatccggtagctcttggtacattcctttatgagaccccataggatttatttctctttctttcatttaaacttccataaagagaagaattttttttctgaatctccagctcttaccagatcatttggtctattaataaatgtttacttaatgaatgcttggaggagcaaatgaataacaatctttaaaaggctaaaataataaatttacagtgccttttcaatgggagcaggttagaatattttgctgtgcttcagaagccttgctcatttaaccttaggcatcagagtctcaagttttagggaaaacgaactcttatacattttgtagttagaataaattttaaaatatttatatgaaaaaagattatattttagaaatataaaacaaattaaataataattattttacatttgatattttctttaccatttgttaacttacattacagtgaatgtaggcatctttcttacatattttatttttgatatatacacacatatccttttgagcttcctgtacaacacatcttatgtgtagtaatgtctaaaatattaatgctttatttaggtttgaaaactccccaggaagatttgacatttaagattagattcagagtgtattatcatgaacattgacagctgagagtgtgactgaagggtctttgtccttacaaactaaaagcctatttatagtgcttaatgaaacactagaaagccattttccttacatgtttctatatacatcattctctacaaaaacttgattggttgtgagtatttttatttaacaaaatttaagacgttggtgaagatgtagttgttttatagatcccattttctcaatacgaagcaaatttcttgttaattttttattgattataacaaattatgaatgtgaaatgtacatggcttgcactcgaaaaatgcttcagatattgcccatctttttattaaaatgagattaaatcaagatggtctaaaatattataagtttacttttctttgttcttaatttaagacaagttagaactttcaaatgaaccactttacatagatttatattcatgcccatctgtctgcatataataattaagaaaaaatattaaaatgattcattttccctactttaaaattattttaaaaggcaaacacttcatttactttcatttctctctctctttttttttttttttttttttttttgagacagggtctttctctgttacccaggcacaagtgcagtggcatgattatagctcattgcctcaaaatcctgggcacagcctcccaggtaactaggactggaggcatggaccaccacatcaagctatttttttttttttatttttttagagatggggtcttgctgtgttgcccaggcttgtctcaaacctttgacttcaagtaatccttccgccgcagcttccaaaagcactaagataacaggctgagccacctcactagcctcatttctctttttattaaactactcaagttgcttcttacaaaaagacttttatattctctattattggggatttaaaaaatataccctatcatttgccttacctcttatgaatgggattcctgaagaacatgacaaataacaaataaaatgtaaactccagattccagcaatgaaattctcattattttgtatataattcacatttaacttcttattttgaaacatatgaatgagcaaagtactatttctggaggggactacatctggccattcatttagaaacctgcctaatgtgtttgaagggaaaataaaattgtgtaaattagtggaaagaaaggttatcaacaacatttttttaagtttatgttttaactttatgtatcatatgttctattctaatttacatactttttgttttgaatgacatcaaatgatgttatatacatcttctggcacttgttagcctcatgagttttatagaccatgctgacgttgttgatccccttatgtatacaaagctttggaaatatttatcaaaaaaggaaaaaatcttcactgaggaattagcattccagtgacatgagaattatgcaatgttaagattaaaataattttcttttttcatgagtaatgcatgcttatagttataaaaagaaaataaattaaaactgcatggaagtatataaagtgggaagtaaaatgaaaaatatgctgtcctcacaaaacatattttaagatgtattttcaaaagagtgtgtgtgaacagaatttatatgcacttaatcacctctggacttagtttagcaatctacgcagttgtccggaatgagatctaggtaagcagtaagggtctaggaggcttaaatgacaggaaaagatcaggattatcttctgcaagatatccaacaagcctatacttgtgagatcatgaggacatttcagtttccaggagaccaatatatcacattagctttggattgatatcagattccaggaaataataatatcaatttgacaaaacagctagtcaataaaagggcaaatatgtagttaagtgaacccagagaatggtctgactttcatcagtttctcagcagtgagcctgagcattaacattcaatcagtgttacatttactgtttcctcaaaggctttgaacaggtgattccctatatatcctagaatcagcctttgacagagatgtgacagtaactacatttcctcagtctccaaaccctccttctctcctgactcttggcctgtgaacattctcccattgtttcagccatctaaagaggcaaacaaacctacatacaagaaatatgccctcccttcacctccaatcctcctccagatgttgtactattcctcaccttttcttaagagccattgtctttcaaagagtgattgtctttattcactcatttccaatttattactctacccactgtaatctggtacttgttttccaaaatcattattggtgctcctctcccaagtgtcacagagggcctccatgttgggaaatccagcaggcctttcagtctttctcttactgtgtacttctgactaagcctccatcaaatcactttatcttgaatcttagccatattttctcagcattacgtttcaagctcctccataagttcctcttttgcctttcataccttaaacattagtattcattttagatacacatttcttatctattatgcctaattttgtgaacaattgtctgttgattttccattatctgtctaaacatttgactaattccagagcttcaaagtcaaacattttatcttttgtatgacatattgtcttgcatctaaccaagtcagagtgtgccctacagttatgcctaagtgctctcttttgactctcccatatcggttcctcattgggtatctcttatctctattaattataattgaaaatctggagtaatctcaactcctctgtatctttcaccagagttcaaaattaatcaccaagaatctaatatctcttaaatgttttcttaatttttatatgcttcctagcctattttaataatgatgataaataagaactattttaataatattagctaacatttattgagtactgactacaatgcaggcactgtgacaagtgctttacatgtattcattcatttgatctcccctacattcttatgaggtaggtgttattagtgattacattttaaaggtaaggaaattagtcaaaagatgaataagtcactttaccaatcttctaccccaagtaaattagagtcaagatttgaattcaggcaaatctggtgccaagcctgccttttaatctccttacctttctccattttcacaatcttaccattcttcaatcctaaatgtacatgtaaatctttctacccatattattttcaagcaatattcatactatctggaaaacacattaatagtatattgtgcatcactggcatgcctcaagttctgtttttaatttcaaaggtgtcttacaaattcaccacttcagctctttgtttatgatgaagtaataacttaccaacccaatcctgctccagttgagcagtcttcagaaggcatgggccaggggtactttttgggaatggaactattaaagtaccagaatatctttgtgatatctagcccttaatgtgccatggttaggtcctattccctgatgaagaatgccagtctccacctgggaagtgatcattcctagcagacattatgatttgcagaagctttaagggctgaagccttcagtctatggacatatatgacctcagatgcctgatgcacagaaacagggagaccctcagcagggagcaacctaatttccggtaaatgaagaataaggacacatatcatatatatcatatataacttccagggcagatccaggtgtgttgtgcctcatacttaaactaattggggatattctttaagaagactaataaaaactctgaatataaaattagatacagggtaccaaatgggctatgcaagcaatgggccctaatgattgagattccttggctttatggacatctacctctgtccacttcaatgagtactagaatcatgttgacgcaatttccctcatgagtaaatgttcccatatattccaagtacaaattttatccatgagccataaatgaaatatttggatgtgtagtaaaagaaaagcttaaagtcatttgtagagattagaaagtagagaaagaacctgtaaatagatgttaagattagtaaaaatcttggaattcaaaagactgaagagaaattagttattctgatgacataccaaagaactaatcgcctgcttttcagtatattcattctcagcaattctaaagtcatgttctactaggtcttaagctcttaaattaatttcctgactttctgttcattttcacttcaaatcttaaaaatacatgtgcacatatgcatacacacatatttctgaagaaaagaaaagttattttaacttacatatttatattatgaacttgggatagaagctgttaaaatcttgatcttgtacaaattttttttatcatgggtttattattttgcaatgccagtaataaagcaagttgtcataaaagtagtcaacagtgaatcatcttataacaatcaagggagtaggtgatacttattaaatcctagtttttaaagacattatgctaagaaggcccattgtttataacatttaattaatgaaagattgcagaagtttgtaaagtttaaataagacacttgtgctttagtttctggcccaaatacttgtcctaattctccagactgtcacctttttgttttagatgagcgcaaagaaataatggcattttatagacagaccaaattaaattatattaatttgtttactcacattttaagcacatagtgcactggggcttagaaagataaaggaatcattttctctggactccaaaagcttctaataggtttttaccacttaccaatatattaaccaattctttccacctgccagaatattctagtaataaaatgcacaaattagtattgtcagtcaattaacttagctttcttgaatacaggctgttacagtacttgttgatgcaaacagaaaaatgcaaaaatgagagcctgctttccttatcatacgaataattattaatagaaatagtaatgtttatttttcattgttatatcatgtatattgtattagacaataataatttttaaagtgaatgatcctcaccactgtgttcaaagccagcatctattattattagaattcttatttgaataactccttgacttagtaattcaactaattacattgttttgttttgcaggtagatatttcttttgactgttggcttgaggttgattttgttccctaaaattagaatctgtaattatagactaatgtaacatttgagatctaagacagcagtgatcttgaatttgtaataatttgacaatcacaagtgcagtaggttctccttagagaatgaaaggcaattctatttgaggcttctagtaacagattccaaagacaacttgttcctttctgcaggatatggaaaaaggagttagagttcagatactaaccctattcattactcttgaaatcttccttctgacatggaaattctcttttagagcacagcaattgacattcaaatgaagtttgttcttttcctcaatgaaaacattacttgtttatcttattatgaaaattcatttgttttaccgttcattaatgtttgaaatggggcacagagtaggctttcctttttcccaagacaccacaccactgtaattctcaaagagaaatggtggaaccaccccaacatttctccaaaatagttttcatttcttttatagttgcttgaattccagctctatttgttatattaggaaaaacttaaaatgctatgggtgggtgcatttttctagcatttcagaaaatgcaccttttaaaaaatatttttttctcaccatttattctttacataccattgttccatttctgcctgctctttttgcacaatttacaggttgatccactctccttaggaaagaaagcattgggtattttgtctacagatcctatgtaagaagtcttactgaaatcaaataatctagataaaatttaaattcctaaaagaaagttataatatmttccacaattaataatacaaattattagccaatgaggcagatctttgaaatgtttccctacttttcctcatgagtactattttattttcattgaaactatattctgatcagccaatatcatgaaagataaagaggcttttataagaaaactgaatagaccttaacagaaaataaaacaaagtaccttatattattttaatccctaaaattattgttgataaaacacagaatgaattttgacctggcctattccttttgtttttaatctgttatttgtttcataaaaggtgaactgtgtagaacctttgcattttatgggtacatttcccctacagtagctcctagacaccctgaagaggcaaggtcagtgaytggagaattcagagacttgaattctggtcaaagcacagcctctagctatttataatacttttgtcacattattttccctgtttgtgatgcactttccccatatgttacctcctcaatcagggacgggttgaggatttatgcatgagttcatggagtaagttggattcgaaagagaagcatcattgaagtggtacctgtgattggtgtcaacaaaagagagacaaactttttcttttttaattctgctttatttcaaaaggatttaaggacaatataagctatgctgtttaaataaataatgaagtagaataaattaagaaaaaaatgccagctctagttcagagttcacgtgtagcaagacaggaatacttgatttaaacatgtaacttctatttattaaaccaaaaattatagctcttggttaaattatttgaagatagaatctgggatttctttagcatataaaactataaaagggtccacctttaggtatgtaatcaagtggtcttaaatcttcaatatgattttaaaggagaaacctattattttgatattcaatttatttttcagcccttttcatagaatacagatgtgaaattatttaataatacaattaaataaacacacaccatgtttcatacagctaaatgtaagagatagcagtaacatataagggcttctggatagatactgtatctatttgggagtgattaagttcactattacttttcactatgttattgtagatggaaagctgatccactttgttgaaatttattatttattttcttttttctttttcttttttttttttttttttttgagacagagttttgctcttgctgcccaggctagagtgcaatggcaggatctcagctcactgcaacctccgcctcctgggttcaagcgattctcctgcctcagcctcctgagtagcagggattacagatatgtgccaccatgtctggctaattttctatttttagtagagacagggtttctccctgttggtcagactggtctcgaataaatttagtatttcacttttaataaatcatttggaaattatcttatctcaggtaaaagtatttgtcacctgggattttcattcttcagtggtaatagctgctcttaactaacattacattgaaattaaagatagctatatttaacattttgatattgattgcagtcagtaaggcatgatattttatattacatttagcaattacaactgaagctcagggcatttatgaggtgttcatgatgggaagggaggagttgacatatggagattactttgacttcagttattcattgcacttcagaaaatgcttagtaataaggtcattcttcagaattttaggaaaaaaagaagtttacattatttatttatttatttgtatagcgtatgtgtgtagacagatagaaatagagaaaattataaaagccctttataaaagagtatataccttatgatatcatggcaaaataattatgtggtgataaaaagcaaataagtcgttgattcataggacagaaaatttcttgtgaagaaatgtagctatgataaatcttcacattttaataggagtttaggttacacaagtgtaagcatttatcaaaacttaggaaatacacatttaagctatgtgcatttcatggtatataaattttacataaaaatactgaaacagaaatcaaactctagttaataaagcacacgtcaaaatttagggaggagtgtgcctatactctgataagcataaaacattcgatggatcagaatgaataaaggggctcacaagaaaaaaacatgctaaaatagctaggaaagcaaagaaaaaaagctacaagggagaattcgtcttgctggatattaaaagatagtataaagttttataattaaaataatgccatagaggagcatggatagacaaaatgaatgaaatagaaaatatacagataaatacaaaaataaatggaggtttaatatatgataaaaatgacaaatcactcttctaacactaataactgatgctgaaacaactggtttatcatttgataaaagatataatttgacacaaatctcacatcagaagaaaagaataagctgcacataaatcagcattctaatgtttttgaaaaaattatctaaattcctcttaaccttggtggaaggaaatgctctctgtctgtggtgatactgcacatgcaacagaagaaaatattgatacatacaacattttatgtagcaaagcaataagttaaatgaaaagacaaacgtcaaactgatagaaaatatttccagatatgtcgcagatggagtgctaatatcactataaagatctctaaaaaattgatagggttcaaagcaagacaagcaaataaacaaaaaccctccaacacaataatgaatgaaagactagaaaggacattcacaacacacatggagagatagatagatagatagatagakagatagatagatagayagatagatagatagatagatgatagatagatagatagatagatagatagatagatacagagactgagagactgagagaaaattgacgtttcacacattcaaagatgtttgacttcattcttaatttttaaaaatgcaagttaaaactgtactgagatacgtttattcacctagcagtttgctgaaaactttaaagtatgataacacgttctgcttgcaagtctatgggaaaaccaaaactgttcacacattgatgatgtgaaagtaaactgcaacaacccttgtagtgagagatttggcaatacctaataaaactgtatatgaatttacctttcattcagcaatttaatttctaggaatttaccctcaagatacagctccaagtatgtgaaaaaatacatgcacaagatatatgttaaaggaaatagttatcaatagatgacgtaggtacaggagaaaaacttcttcgccctcttgaaggtttgctgaaaatcacagacaaagggagattaacaggaaagaaaaggcatacagttttattttatcatagttttacgtgatatggaagccttcaggataaaagcccaaagatacaggggaagtttgtccatttttatgcttagattcaacaaagtatgaacagctgtgtagaatatgactggacagaaaggggtacgatataatgccaatacactgagtggggaaacacaacaaaggctgtctgtctagatttttacctctctgtgcaacagtccttccttatgggtgtggggcaggaccctctccagaatggggatcttatgatctgtagttaaacaatgtaggtcaaatattttcttgatggacaatttttacacaaaaagttaaagggtggggagttagaggaatatttttaggttttgtgactggctttggggaaacggggttctgtttattatgacccaccttggaaaagagggattctggctagccttgggggagaatgaatgaacagagacaggagggcaggagaaggtcagagaaaatcttttattatgaagcctttgttttggtgtatcgttttctgagctccaataatgatgtaactagtgagtgaaattttgataaaaattgaaaagtttacaaattctcaccttaagtgatcaaagttaacattagtaatggcacaaatcacattctctgtcaacttctatgatgcactaaatacacagtatcacttctcttgcattcttgtcaaaaaatgcttccctgaatgtaatgatgtgtaaataccagacaaatctctcttcctcccaaaatgatgttcctattattgtcatttataacaatgattgtacttaatgagaataaaatacaaagagaaaaaccaatgtatttattctttaaaactgtgcatggagaaatatgcaagaagagaaatttatgatgcatataatcttttaattgacacttaatttagcagcaattaaaccttgcgattactatttaatattttttaaattttattttagtaggtaaaacaacatgatttctctgctttaattttttaacttatttcacacacaaaactgatattaattgttcttgttgatggatttaaaatgtttttgtaaatataacaagtagtatttaagtttttatgccgcaagaacaaagttgttccttgaaacatttctttagtgtcagaaattcatgatattcaatttcagagtattattaaataccatttatattgattttatatttattggcattagtatatagtgctatatagttaacaaagatagaaataaatggaaacagtatctattctcacaaagcccccatttttgctgtatgcagagagacgctcctcattgaccctgctcaaataaagtgcaattatctgcatgactttctgctccacttcatctaaagatgcaactgttcctctggcaacagaacatatcatctctcgtagtcagggtgatttaaggacttctaggctcagtacattcatgcagagtgatccagtgtgtgtactgcacaaagacaccagctgaagaaatgagtgggtgcactctgctgatgatgtggggaggggctgtctcactgagaaaagggtgactttttctggatacaaaggcttcatttgcttttaggtttgtgatagcaggactccactggctacctggggcacatttttctttttttctttttttttattatactttaagttttagggtacatgtgcataacgtgcaggttagttacatatgtatacatgtgccatgttggtgtgctgcacccagtaactcgttatttaacattaggtatatctcctaatgctatccctcccccctccccccaccccacaacaggccccagagtgtgatgttccccttcctgtgtccatgtgttctcattgtttaattcccacctatgagtgagaacatgcggtgtttggttttttgtccttgcgatagtttgctgagaatgatggtttccagtttcatccatgtccctacgaaggacatgaactcatccttttttgtggctgcatactattccagggtgtttatgtgtacctggggcacatttttctaatcacacaaaaataggctggttgtggccttcattctagcttaacccatttcccgtttgcacctgcagtactcaccagtggcgcttgtggctgtagcgtttaccctgagataactttgccacgaaatatctcacttttattattatatttgcatggctctagtatattgactttggaaacaatagacatcattctatttattgaattctgtttttagtagtggtatttccatttacaaaatatggtaattctcaatcactgtaaatgtcaaatcctagaaaacatagcagtcctacgtgtgatgttaacattgttctcaaacagtttgctggctgaagattcatttgatgaatccaatttttctgaaatagatgattcttatgattcagatgattctgatgttakttctgtttagaaataactccaagaacagtttttatatttcattttcccattaaaaatcagtcagatttgcctcagcctcaaagagcgtgtttatgtaaaattaaatgagcgctggcagagatctacactttttttttccccctaaatgggaaagggttaataagcccatttttacatcttaattgaccctatctctttaggttactgctttggtcctgagctctagttcccacgttgcactgtgatccatgaactgattctgtgtcctgcacttttgtatgaatatcttgctgcagcaaaatcagaagccctgtttctccatgagggaattattttctctgggactgtgatctatttctgaaatcgtcccctggatgtggtccctgctattgttactgaaacactagaggtttgctgtaggacctgctgctcaccttgcagaaagccaatgactgagaagattaatattgccaaggaagaaggctttaattgggtgttgccaccaaggagctcagtctcaaatctatttccctaactgactaaaactaggggtttttatagaagggaagaaatataacaatgtatgagaaaacaggaactagggaggagtaaggaagcaagcatgatgaatgaggggtctggaatctcattttcaggatgtggtgatctggtgagtttcagttctttgatgcttttttttgagaggcttgaaggtcctttcctgaggaaggaatttagataaaacaaatataagtttcaagctttaagatcagaaaggtcaatttctatgtttatcaaatggaacagttgatgggactatttgggtcagtttcactacctgctaccaaactctacaaataccatcaatttatctgttagtatctcttcattgtgcttgttgctgtatacccggggcaagcctcttgtcctttgccaacactgggctgttcttaatgtagtgtttttcttggcacttcagttctgttgcattcttgaccaaaaaaaagaaaaaaaaatgcttctctgaatgtaatgatgtgtaaacaccggacacatctctcttccttccagtcatagcttatcctaatttactctggatacagagcttcaattgacaatttgactttcgttatcaataactacatctttcttcaagattgtatggcccatagccaacgtatgtttagtatatactaattctcaaaacttttgctgagtatgtaattttatatatatatataattttaaaaattctatgggtgaaaagtctcattagaagaatcctaagaggaaatggatcttttcagagaatctttcatattttgcactgaaaacagtagttacactaccatcaggaattttccacacacttcagaatgacttcaacctctcagtgagtttaattgcccaatatcctatttatataagaaggaaaggcgaataaatatataaaatttactgggagatgaggagagggaatagttgaatgccaatggagaaaattaggatttctgagaggaagtgtgacttgaggcctatcttgggtaatatacgtgagttctgcatgaaagaaagcattccagatagaaggcattctacagctagaaagagttaaaagcatgagagggctttgttccctgaagaaacattgatatgttcaacattgctgaagagttgaaaggcaacagtgaaaggaaaagataacatgaggtgaagctgatccagatcctgtgaagcctttagactttatcattaggaaggaagagtcatcaaaaacatttgaataaaggagtggatgttttagatttgcgtttttgtctgccatgaggagaatatattttgaggatcaagaatactccacagatgcactatactgattccatgcaataatttaagggcttgttgattcatgatgtcagcatcaccattgtaatgtcaacatcaaagtttctggctttgaacttgggtggatggtggtttcattgtctcagagaggtaaaaaacatgagcccctgagtggtcagttgactgggataagaccataaatgagagcagaagcaaagcccagaccagagtccagacctgctgataataaaatccagtgttattattactaacaaaagtaaaaatttaacttatgaattgcaggaggaagtttgctgcaaagtcactttaattacagttatcacaggcaataaacttatttattccaggcaactaattgttaactacttccaatagcatgaaagaattatattcagaggttacataaagggaacaattccaaaaattcctgttccaaaacaacaaaggccacaacatttacttggtgttcttttacttttattatcatttatttccaaaattcaagagagttcttcacaatagaaagaatataaaacttgcttgcataatactgtaggttatctccctcatttttacgtgctagataaacagggtgttttaaaattattgacattgtagaaataactccaatggtaatatatgattgttatttatttaatagaaattatattcatgacattttatttttaaaaataacttagacatcagcctagtgtaccctctctgttaaagtccagatgaggtccactgaaaccccagaagaattatctatggatgttcagagagccatgcaagatttattcagttctctggtagacttaagtgttttgtgactgcttttgttactgctttctctgctcctcacagttcaatccagatactaaatttggcttttttctcacattaatgacattgccatgacattgctaatataatgcatttattaataggctaaatgcagtggacaataagagaggaggtgggcttgtattgcaagattgtagtgaaacctgaactttagacaaaactcatttttagatttcctccagctatcacaccaccactgaggagctcactggcctttttagcttcacatcatttgacttgctcctttcctcatcatagtctctttttactcctttctttagttttccctaccttaagcccctaccctcctggaataaagcaaatattccccttatctcattcaaagcagctatttcctcggtttcctggcaatacatacctccttaaaagaaattcttcctgtcaaaggcaatttctttcataagtgggttgccagtgctagttgctaaaataataatgtgtttactttcttaaataacctatctgtggttatgatttaaagacatgggggcctcttcaaagcactcaccttagaagaactcatgtttctattgatgatgttgctcttatagatggattttgttttgttttgtttttattttgggttgctctttcattactactctggtgaggcacttaatttattcaaaaatggtaaagaagttttattattttaaagaacttcaattagcacttttattttaaagaacttcagttagacttttcaaaacaagtctataaggggtgactatttgactattccttttgaagttctatttctacagttttagtaaaaaccacaaggtgcagtggaagataaaatgtctttcctcaccaatagtgttgaattcactgggccatatgctattaggttggtgcaaaagtaatcgcagtttttgccattactttcaatggcaaaaactgygattacttttgcaccaacctaatatctaacctattttgtttggttttatttttgtatagatttttaaaaattcaaataagaaaattatggctatatacaataaaaaagcaccatgtaataaatttacatatatgttatactatattctaggcactggcctactttacatttactgcctcttgtctcacaactctgtgaggtagatattattattcccattttacaaccaaagaaactgaagcacagagagttaaaacaaaagagagagagagagagagagaagcccagtctaactctaggcttatgctgccctggatcatctcagataacattccaattataacaatgctgaaatgtaattggtgagttgatctaataattcatgcaatgcctgcctcactgtgaagctttcactcattcaacctcttattaaatatattttgtgatatgaaaatacaactagtaaatatgtagtagcacatttacagcctctaaagttaatagtattgatcctgtcaatgttctgctctgttctgcttctctcatagtgtccataaatttattcccatttgttcccatttattcccagtgaaggttacttcactgtttttaaggcaccaggccttgatggacgttactgctttagactttaaaatcatcatcactctaataatcactgtagacttctttatatctaagtcctatttatttccattaaagtrtactgcaacaaaaataacgtaccatctttatttaccatgtggcttagttaagatggtgatataactaccattgttatcagaaacactatctgaactagtaaaacactgtatcccatcaggaaataacttttgaaatcagattgcatgggtttgaaacccagctccactacatagaagcaagttacttaactgattggaacatcaggttctttatttatcaagtgggagcaatagtataattaggttgggtgcagtggctcaggcctgtaatactagcattttgggaagccgaggtgggcagattgcttgagctcaggagtttgagacaagcctgggcaacattgtgagactttgtcgctacaaaaaaaaaaaaaattacaaaaataagtcgggagtggtggcatgtgcctgtagtcccagctacttaggtggctgagtagaaggatgcttgagcccaggaggcggaggtggcagtraatcaatatcttgccactgcactgcagcatgggtgacagagtgaccctgtctcaaaaaaaaaaaaaaaaaaaagaaaaagaaaagaaaaaaagtacaaatggttcataaggaatattgtaaggattatcttttctgttaacgccacaaaagaccaccagaataaactgatgaagaaggaaactgagtttatttcctgatcaccaccttagcagatgtcttagtagtcatagaaaggagaggccaaggtggatatttgtagacatagggaatctggacttaagtagtttaaggaaggtcttttaatgtattgtgtgaagtatgtaacataatagtttgggatgggtagacataataacgaagttctggaggttaattgataagcaaccagtttgtctagttaggcaatatataatagtcctatgaagcaggctgtttacccacgtgagcaacttaccctcctgagaatgaggctgtttgaacagtttattgtttgaatagatttatttcctagtagttcttgatgcatgaaatgaagttgtttatgacttttaagccttatcatagttctgataggtaatctgtgtggttgctggaagtctcagttctgaacaaatggcatgatccatataaaacacacagcacaatacctgctatataattagtatatccacaaatgttagccatttataactgcctcttgtgtatgatgtttcttaaatcagggcttgatagatgggagacctagcctaactctgacaagatgcaaaatttggtaaccagacagaacaatagagtggagaaagtggtcggggacggtcccagttgtgcttagtaggagggggtgcaagatggcagatagctcatggatggtcaggaggagggaagaagcagagatctaagcaagcaggcaaagtatgatcctctgggttcttccagctgaaaatattaaacagagattaaagtgagtaagctggaagatctaccagcaggccagataaatttaggattaggagctacacatgatttaaaagagctgaaagggaaagaggcaggacccttactccatactgctacattggacaaacaggtaaagcttccctcaagcctagatggtctagtcaccagatctattactgaaattttttgggaaatagtgaatatgaaataaaagtttgaccacagaaattaaagataaaatacaagatattagaactgtgtcaatgatcagagtcctactagcagcatagctgacccaaataattttagagatcttatctataatattctgtacagtgcttcatattataagaatattataataataaattacattcatatcattccattataatttcatatgttctcctccaaacttctgcaatgtagatatcggagcagttttactctaatttaggtgatgacaaaactgaagcttagagagtttagtcacatattttaaatggcagaatggggaggaaactacaggttttccagacacagatcttgttccaatatgtccaaatagtaattatgttactgaggtttgaggggaatgtgttacaattggatgacttgcaaactcattttcatatactctttccctttcccttctctgtcttttgctcatttttggttatagaaaaaatcaattgaagatatgaaaaaaatgttttttaaaaaggtatttctacacttctatttcatcttgtaataatgcagagatatgactggggagttgatctgataattcatacaatatgactcctcattgcaaacctttcatccattcaaccccttattaacaatatttttgtgacatgcagaatgctagattctggagaggcagagataaataaggtgaaccttccttctgttctacttttaaagaatcccctagtctattggatttgatagatttattgtgaaagagtataaaaaagtaaaagattaaggcatrtagaaggtacaaggccagggaagggggccgtatattctaatatgggattagggaaaagtagagaaattccttggcttcctgttcctattttgtccagcaccgctatctcccacctgagattcctacgacatatttccaatggaagccaagaagtatgggagcgttggaagtacatcctgcccaatgaccctctcaccccatccccaccaataatcagaagaaaacagaagaagcaaataattgatctgatagcaaatacaccaaagatgagtacggcatctccctggattttaaaataaagatgtttggagcagatgaataccaatctgattttttaaaaaattgaattacccaagtaattatgacatagaaacttacttttggaagatttaacacattgtaaatataaaccaacacacagaaacccatgcaaaatttagtgcttcattttacttcaggccccaagctgctcaattattatgaaacaatcactttttggttgcccaagttttgtttgcatggatgcatgggagaacgatgaaatttctctctctgaatatgaatgttaatgattgggaaacatagaaaccacacataattctgcaattctcatagctcttaaaatatatagaggacttgcattgcaagtctttattttaattagtgttattaatattcattgactgaggtagtaaaaggcaaccactggctcaatgagcagcagtccaacaagtcatgcaaactccagtgttgacagcctttgtttggagtcctgaatggattgtgtctatctaaatcactgtgtaatcatggatcctttgtgatttcacattctcatcttatagtcaatttttatttctctgatgtggcatgttgtgttcagtagcttatctgaaaacatcaatatggttttgaaaggataaaatcaaattgtaacagtttatgtttctgtaatgtgtgcatagcctagggaaaaagtgataaataggaatactatttcactgtattgctatgttacagacattggaaatatgattctgcctccatattctttccaaagtagatcagctggatttattttttatatatttataaatcaacagctaatagaccatgagaacagcattagtgtacatccagatgacagaagagattgtaaaagaagtggagaagactttctgactttccctgctttcgtgacagtaaatattgtcttcttgcttttatatgacataaaggtaatcttcctacttttataagatataaacacacaaagagatgttaacctcatgcatcatattttaaaatgttggcataagcctaaaggttttacatgtttcaaagagtctatctttatggtaaagtacttgagtaaccattctcaactttggctacacatttgaacttccaaagagttttttaaaaatattttcacctgtagacacagtcagacactttaatcagaatttctgtgacagaagctctcacacctatagttttttgagctcatgagataattccaatgtcmagccaagattaagagccacagatatattatcatagaattaaaaaaataaactttcacttccttgcaagtattacaaattcagcatgtcaatatagtgttaactgttgccatgataaagcttatgatttcactggaataccagatttcaggctcttgatttggacatcaaatattcctttcaaattgatgaaaattgctattgccatctgccacttttactctcaaagttaattacatatacattgtgctctacaataatgtcaattttgctaatcccatttagatgtttacataaaagaaaacaaataataacttcataagacatgttgctaaaagggttatttggtctaaatatacataatttcaattcaagctgacattttatgcttagttttaatgaagtgatcccagggaaattggtattttcctatctgatacaacgatatatatatttgaatgcaagattaaggcacattttaatatgctttatttgtttctaatttttccaattaatttttttacaattaatgtcatttaaaacttttgatatagcattataaaagaatctcaggcagaaatcattagtattactaaattatttttattgcattattattactactttaatatagtactgaaagaactatgcagcttgagacttgtattctgtgaaatgaaactttgaattagccaactttgaaagtcctttccagttccaccatgtggagattatgagctttactctgcagcatataccaaagaatgtctaccatacatttcagatgagacctttgagattgcctaccttaatcttattatgtaaaagatataaaaactgaggtgaaaagtggtgaaattatcctttttatatcacaaagaacaaattgtcttgtctcaagtagaatagattattagccaagttctatctatttgttttgttttaagtacttatccccacttccatcatttgttccttgttcatgttgttgttcttgtttgttttgaattgtttctggaaataacagtgagttaaaaactctgccagctttatatatatatatatatatatgtaatattatatataacatgttaggtattatttataatatatagtataacatatagtataaaggtttttttacacaaaactttaaatgcattttgttgtctaaacaaaagaaattattgtattcacatgtgttaagatgtgcagttttttcattttatgtgtctgaaattagcatgagtttttcaaacatggtcacagctgttcatatagccattgcttcatctagattatgtgtactctttgtactgcatgtattgagtttaattgtcattcactattttttcaaaaatattacattattkttcaatattagaacaaaaagttattgtctgaagagaacaagatatgaaagaacagcaagaattaaattttatatgattaaacaaagatttgttattgggggcatcattacaatcctacatttgcctgttaatcaacagctgactgatttatatggcttttttcttatcatgtcagccaaggaccaggaatgttggcaccaccaaggatggtattataaatgtagaatcatgagttcataccagatctactgaatcagaatctgcattttaacaagatccgcacataattcatttgcaccttaaactttaaaaagcaggactttatagtaccaaggaagatatccacaagaggttgacactgttttagatttcttgagttatatgctaaatgtttgtccctcatatgrtaagcaatactatttaaaggcaaagaaagcttaaatacatggaagaaacttcaaatctacaggaaaatgatgtgactgattcataagtcgagcataacaatattgatagaaatctaagtccaaattcatttaaaagctttttctgtaagctctatttaagtattaaatggactctagtgataagaaagcattgtgctataatttgaccacatttttttctttcataatagtagataaaatcatatcttcccacagatggaacattaactttggtaaaatacagacaataataccagttcattgtaccacaaattcatcagaaataatgaaaatcataactcttgcttatataaatatatgcatttaagataactagataaactgacatagaaaagaactaatttgtgtcactttaatagtacagaaggagtcttctttgctgaatgactttattcagctttattgaggtatatttgacaactaaaagttatatatacttaaggtatacaacttgatgttttgatacacataaacattgtgaaatgatcaagttaacacgtctgccagctcacatctttatgatttttttgatgtggtgagaactcttaagatcaatttcttagtatattttaactacagtatacaatacagtattattaattatagtcaccatgctgtgcattagatctccagaagttattcatcccccataactgaaccattttaccctttgatgaatgactgtttacacaggaagaagaggaagaattaattaaaatattagccctatttaatttttatgctacattaaataatgacagtggaagttttctctaagtaaacatgatagctacattaacagtaaactaattcattataattttgacacataaaatgaatataaaggtaacatttgtgagtggatttttttaatcacaaagtaaagcttggtagaaatactttaagatgctgtatcgaaatatctgcttttagtttgacattttaaatcatttaattgttggcatttcgtgtaacatacaaaaaatgttgattgaaaaaatcttttttaaaaaatgatgctgagtagactttattcactgtagtccttgagtgaagccactggttgttggcttttggactgcttttagcctgtttttctagttgtacttctttgaggaggatgatgatctttaccttactcttggctttgcatgctcaaagtgattaggtttttttaatgaggcaggagaatggaaatttgaggaaaatggtagagagaaccctctctcatttaccaagatgactttctaagtttatttagtgatgagctacttggagatacaagtcaaatgatgaagttcatagaaatcttttgaatcttgccaccagaaagagatgacaataaatccaactacttttcccatgccttacatttttattttcttatatgcacagtatcttttgtattatagatgcttaataaatctttttcaaataaatgtatgctggaaaatgttgtaattgaggtaaatggacatttttagctggctatattgcagaagactttattgggtaggtgatcttttagacggttttaaaaaataatgaagatcttaactggcacacaatcaagtatctgttatatgccttcatcttccacattttattgtatttttttcactcccttgtgaaggaaactaatttcaacaatgctgtatgtgtcatgcattaacccattcataattagcaagaggtatctgattcagtttatattatggtactaattatctagctcttcagaatattttacataaaaaaataacctcaggtgaataaacttctgtttctgctccagaaaccttttgacattttttaataatctgtaatcacgttgacttaaaatgacatgacagaaatgcctgaatgttgacgagttgatgggagcaacaaacatctgcctgttaaatttgggatcaccacctacagcactacacatatcattgatccaagtgtaccttgattgattgcttgaaaagaaaaatctggacttayttggatttataagcaaagtcaaaaacatttttcaaaatgttaagttctaaaagtagtaataatgatggtgtagccccttactaatcagtgtgctctggggaccagcagcctctaaatcatctgggagcttttcggaaatgcagaaacttcaccctagacctagtgaattagaatctgcatttgaataaatctccaggtgatgctgaaatgggaaaagttgccttctccctctcacacggcgtgtgatggggctgtggcttgcttcttcagtgcccctctgctcaaatctctagggcagtatatggacggacgggcaggttgtggggctccgaccccacagcagtgtttagggccctagtgggagcgtgctaccgtgtgctcttttaattttgccatctataggcagcttgtgttaaccagctcaattagaccctctaccttgtcactaccttgtcacaaggacagaggactttctgtatccggggttcttggcttggtgtaccggaagagtcacatcacacttgggcttggagaatgagtgcaaggttttattgagtggaggtagctctcagcagatgggggaagccagaaaggagatggagtgggaaggttttcccctggagtccagcacctcagcggcctgggctgtctcctctgactgccccagccaaattccgcctcctcccactggtcaatggcttgctggcttgccggtgcctgctggtgcatccctctccatgtctagccgtccgtgccttcctccgctgacttgctcctctccacacccagctgtctgtttcatccagctgtctgtgtcttctcgggcagatctgctcttctggacgtccagcagcttgtgtgtctgccttctagagtctgggggtggtggagcgggggtggttataggcacaggatggcaggccagggcggtcttgggaaatccaacatttgggcaggaaatgcctgtcctcacccagggtctgtaggggtggagccctagccagggaccacgccctcttcwacccagcacttcccttcccttcttccctgtcatttaaagggaccacgctcttaccttcccagcacttccatatcagtgactgtgcacattacagtttgagaaatgctggtagtccattccctttcctgatctccaaaacatagggaaattttagaggccaggatgcatttagtagattctgaatctaaaggaaacctaaatcattccttggaagtagacattgtttatagcatcctcaaatggaattaaaagcatatatgactagatttagaacagaaaaatctgttttacatatttcaaaaccctttggacccttgtctgtttatgttcctatgacttcttgagttatacatttttattaacaaatgataaaattatattcactaaatgaactcatttgtacctgttttaccagtttcagaatgttattttatatttcttaggtttttcttagacttgtagaaatcatgctgctttgttccctgcaggagttaaaataaaaatattagtaattatgcatatttaattttcagaatgccaactgattactcacagcasttataaaagggaaatgattttagatattcataaaacatttccttagtaaggggctttcaagtctgaagttgtgttattatggatatttctttttaaaataatcaggataaaaaatgcatttattaagatccctcttcttttctctttttcagatgtaagacaaaagtctaccctgatgaacttccaaacacaagtgtagtcattgtgtttcataatgaagcttggagcactctccttagaactgtttacagtgtgataaatcgttccccacactatctactctcagaggtcatcttggtagatgatgccagtgaaagaggtacaaactggttttttgtttttgtttttgtttttttgttttgttttgttttgtttttttgtattagaaagctttattatggccaaaaagataactaggcaatgatctatatttgcattataattttactagccctgccacagcctatcagattctcatcaagaacctcattaatgccaactctagaagcaaataactaattctttcactttctctcatgattctatatggttcttacctaaaatttcagccaaaatgactttcaaaaatatatcttttttccaactcaattgattatattattgagcattctcatatgattttatggatacttgacattaattaactaatgaaatctctattattttatatctaaggcartaaatactgataggaattggccaccatttctgtgtgttgaatttccatcttggtartatctctgctatttcttaaaacagtttcaaaaatttttcttataaattcttatacatgttacagattttctcaagttgacattagagaattacgtgaaaaatttagaagtgccagtaaaaattattaggatggaagaacgctctgggttaatacgtgcccgtcttcgaggagcagctgcttcaaaagggcaggtcataacttttcttgatgcacactgtgaatgcacgttaggatggctggagcctttgctggcaagaataaaggaagacaggtaagaatttatgtgttctgtctgcctgggttatgactgaacctcttaggacagttccagatgtccatcagaatttctcttccaagttgctatttttagaaggtttattttatagcttktcttaaaagcacgttttcccacttgcttgataaataagactgctgtattcatgctggacatagatagttgattaagaaatagtgaaataattcaaataataaaaacgtgttaaattactttttaggtgaaggaaataaatataatctaaaatagtataattgtgttataaagcacattttcaaagcacctttttgtgttctgacaaccaccctgtgaggtaggtactgtagatattcttatctataacttataatgaggaggaacaaagaagccacatctaacttgctcctgtcattggaagtgctgggaacaacaattcagctctttccagttctctgccagtgttctgtaaactacacgagcacccttagtcagtctagttcaaatccacctggaatgtcttaaaaatgcacacacacacatgcacacacacagcactgaaaaaattataattaaaaaaagaaacataagagcacagctataagaatatgtttaattatttcaacaatgtcaccttatacatacacattttgaaatctggaaaattgaataaataacacttatagaaattaagaatccttatacatacctgcaattccttctgttgttgatgaagtacaagcattttttagcaaatatttataaacactggtgataagagagtataatttctaaatacctagataactaacattgaatgccaactgatacaataacaaaacattacataacaccatacttgcatagtcatttcgtctatagtagaaaattccttctagaattgacatttttaattagacactcaagataggagctacttagtctgagctagtccagccacatcacttaaacagcaggatttggtacttgccaggaagatggatggaagctgtcagtaaaatgaagcacagcagttgaagaaagcagtaggaaccttttagtccatagagtgttgtacatggctaataacatttttccactctgtgtattgtacagtacccacaggacaatcagactggcaaagtaaaatgaacttaaaaatgaatttcctggcaaattttggtatattatgttgttttttttttccacatgtgtttcatattcaactgaatgagcttttaatgtttcaatacggtcatacataggctatttatttttttgatctaacaacataattgcactgtatttgcatatgatgaaccctattgtcttgacctgattataaagtttaaaactaccctaaatagacagtctgttcaagatttttagacctaatttsttctcctcacaagttaaatcattaaatctaataaaggaagtgagaaaaatgttgatttttctggggtccagagtcaccaagaaggttttccaaggctagaggagtcttgttgatcgcagataagttgaggctctggtcagttgtgtggaatataagacttcaattgaaaatgagtattggtgaaactggtgttacaaaacaagtatgaataatggacatttatgtgcttttcatatctagggatgattcagaagcttatttgtgtatttaccttctaccaaatatgaaaaaccaactctggtcttcagaattagctacaaccaatacaatttgagtaggcctgaacatttacttgtggaaatcacagaaggttggtcccataataaaataaatgaacaggcattagatcaagaattagagaaggcacaacatggattaaaagtgtacctaatgattttcccaaatgaaattttctaccatagaaagctaccattaagaacaccaacctttctcttactttaagaaaaatgggataggccaggtgcggtggctcacacctataatcccagcatttgggaggccaaggcaggtggatcacctgaggtcaggagttcgagaccaacctagccaacatggtgaaactctgtctctgctaaaaatacaaaaattagccaggtatgatggcaggcacgttgggaggctgaggcaggagaattgcttgaacctgggaggcagagtttgcactgatctgagatctccccactgcactccagcctgggtgacagggcaaggctctgtcaaaataaataaataaataaataaataaataaataaataaataaataaataaataaaacaccagagattaaagttgcttatctttccctatcttaagctatcatctagattatacatgtaaactcttaatttgaggacattttactcagaaatggtcatgaccctatcatctttcatcggaaacatttacttatactgacggattatgatttttgttgttgctgtttgttgatttctgtttgtttttcctagtaggtgttttctccatgaagatgttctcagaactctctaaactaacgtaccctacttgaaatgcaaactaccagatctaatttgccatcatcccttcttacctccctgaatgctatttcttttcaatggattatagctaaaatgatgcataatctcaaagcagctctactaatcatgctgtgggtggaggttttataaaaaatagaccctgctcatcttgctaagttagtacttagaatgcatttggaaataaacttgtttagatttcaaaagatagcataaagtaaactgtaaggaatatgtagtcaaaggaaataattccatggactaataggataaaatgaagctaaaggcatattaaagtaacaaaataattaaatttcctcatatcagctataatcagtttgaagaagataatgtaacattttaattatcatgtgtctataaattggttttaatttctctgcaggaaaacggttgtctgccctatcattgatgtgattagtgatgatacttttgaatatatggctgggtcagacatgacttatgggggttttaactggaaactgaatttccgctggtatcctgttccccaaagagaaatggacaggaggaaaggagacagaacattacctgtcaggtatgtagatcatayctcttgaagattatgtatatccccctaaarattaaggaatattatagatttctgttctaatgtttaattatttaattgtatccttattattcaatatacatatacattatgacctttacataatcatataaggatcaatgacaatattaaatctaatttaaattagtataggcaaacttaagtattggcaaaaatgctaaatatcttttgaaagtttatgtattcttgtattcaaaatatatttactgtgaattttctatgtgacagaaatgtgctagccttgacacttcaagtaaatgtgtgtcttaccttaaagtatagatttataatagaaatgttctcaaaactgaaatagccaaaaatgttttggtaagtattctaaatataccacctttaaaaggttatcttccttatagattctataggtccatttggaaaatattaatgtattcaaaattatgaagggcttattatcccaaattacttcaaatactacttaagttgaaatcctgattagtaaaatatgcacttacttgtaataaaaaatatcatatacatctcgaattgtctgtataagcattacccactttattaacacaaaagtatcatcttcctacttaaacacattgtggacctcttacctgaaactaaaaatcgatttcctgaaaaatactttcggaagtattcactagtttagttctttaaagatgaatttggcaaatcatccttcctttggaacatgagagaaataccctaacattctagaaacatacactttaagtcctcacttagcattgtcaacaggttcttggaaactgcaactttaaacaaaataacaaaaacactgtcatcaatcttataatggaaggacattgaactaaaggatgttactcgaggaccttttgtttgtcatttcacttaaagttgcaacaacattaagtgaagacttactgtatgtaaaatccatgatctgaacaagaatgtctggtaacctactgaagggatgacttatctattgtcacctacttaattatataaagaattaattaaaattaaactctaaaaataggctaatggaagagaatggctaaaggtatttgttactgaacaattaaatattagggatgttaacttctaaagaagatctgttacatcaaagagaaaaataaaatgtgacttctaacatttgtataaagtcatgtaagttatcctgtcagtatttaaaatgtaacttagtagtcttaagtcttgtataatcttcaaattcaccaagtcttattgatacttacctttaacaaactgggaaaatatagtggctcatgttaccatcatttattagatattctattttcccaaattgttttcatttagtgttagctgatttttaaactttagattccgagtgaaaactatcagaatgcttgaccaatacacttacatatagataatgtttttattcatttgaaaatgctgtttataagaaggcatgtttatactcatttaaaaaaacacattggcaaaaaacatgctttatttatgttctcacagagtcaaacggaagataactaagaggtagccagcattcacagtaagaaattactgatctcattcataaaataaagatctatgtagaaatcaatcattattactcatctttcattaactaaaccaaaagatgaatcatctaacttcctatattttaaccataatttatgtggttgtattgcagtaatatgagatctgataaaatctcagtatattttgtttcctgcagtaacggcacatcattttattttctaacatgctgaggaagctgaagtgagagaaacagagaaacctcagtctttgctgragtttctagatttttgtggcaaaaggttaattaattcatgggttcggttgtaacagcctgcaggtaattttcatcagcatagctgtaatgtgaacgttccttctacttgtaatctattgcttgaagatgtgatcatttttctcacattcatacaaatagataaatcattctagatgttgaagacaatttttttcctacttgattaacagaattctgaatagctaaagtgatgaaaatgaagctgaaattttagttttcttagtggaatgcttcatttaaaatgtcagttatgatagaactttgtagtcaccataattggctagtcatcatttagaaatacaatcatgcatctgcttacattgaaagccaagttgaacttgtgacctaaatcagttatactacatctaaagtaaagcttaacatggtcattcttatttttctgggctttggtattttcattttcataataaatggagtttgtgaaatacttgttaattttcatattataactatggaataatatacataattacgaatatatattttcctttaatcagtaatatatagtttcctttaatcagtaaactttccttgacatttaataatcaaattatatgacttttcaagaatatttcaattatatgtgcaacaaatagtactttttaaactggaggtcataaactaggaggttttgtgccaaatattctctgtagaagtgttttatttggcatacatagtgttttacattttcaaaaattaccaacactttaaaaatgagatattttaaataaaaatctggatttccatctactaataagtcagaagatcttgctacaatggaccaggattcttacctggcaccatcaggtggaatttaatagaaactgcccatgtagaaatggcatgaaaacttttcccaatctccacaactccttctaaattatgttcctgacactgaggctgagggtcatttgacatttgtcaatattcttgaaattgaagaaatatttctctgcacctgtgtcttgaggaaagggggaaaatatatttattgtaacaaatccactttatataattatctttatctggctataatcttttaaagttttgaccctggtcttagaggctactgcctgggaaatggctgagtttgaaactcatcaagcatatcacccctgtataactatgcatatacattacctaatagagtaggcaactagtagcaaagttacctgataatgcaaataatactctagatcatttaattaatttggggatgagttatgcattttttcctaacacatacaaatgggaggtgatttggtttaggctattgaaataagtttgattccatacaaaaacaaacatacaaactgttctatttgtatwccatgcatacaaactattgggcgctgtgctaagttctgcacatacaagcatggataaggctacctatgctgtaaagttgctcactgtctggcactggccacaggtatgctcgatgagggaaagagtctagtgtaaatggtccaagtgtggatgtacaggaataattatgtctactactaaagtggtgtggacctctagaaaggagcctggcttaagtcttattgattgctttagtctcttaattatgccctgtaagtgaacctcaataaataattatgaagatattcatttccactttaatttcacactgattaaaatagattttttaaatgaaaaacctactggtaatttccaagtgaatttaacttttttcacccttcacatcttaccttatggactcttttacctttaatcatcattaatatttttaatatgactgccttcatttttacttcaagtgccatgttgagtatatttctaaagtaaaacaaaagagttttagatgttcttttaattctgatatagtaataaatcaaacataaatgttattggtttttatttcagacctattttacctaattttatattcctttttattgacattcagttgatttcatgcatttatttttcactcaattagaattaggagtttatgaagatcaaataaatcaaataacatcattagtatctctgattataattgtattttattgtgaaaaactcatagaatgttcacatatattatctcctctatcattctagtgtgatcatagaagaagcattgaaactagccttggaggatctagttttatttcaagctcctccaattgagaaattacctagtcttctcaactataaaatggaaaattattctccctgctttgcttaactcatgaagtgctataaaatattgaaatgagcaatgtctttgatatgaattaggttttaaatttatatctgataatgtaacatataaatattgcaaaataaatgtgacaagtacccaaaaggatgaagaagcagaacaccaatgagccatctcttttagaatttggttgtattttcttctaaggcttttctattcaatttctctacaatgtaaatttgatatatcatcaatatttttctatgccattatttttccccacataggttttaatggctgctaatgtctcaattacttacgatgtttctctattttttttgttgactaaagttcatcaagagtttgtttgcacttcaatttttttatcaattatttcttcacctagtgtttgcatacaaagtgattgctttagaattatgcatttgaatatgaaatttgttttaatattcctgacaccttctgccaatttaattcctccccaaaaatattatcactgaatcaatttataatttcactaagtataataaattaaaaacacaaatgttactctttaacatcttatacaaatataagacaaagtttcttatatttagtagtaacaaataatttacttcttaatttttatcagattgtattagacttttctcaatccaaccataatatacgtttrgattgcaggaaagaaacagaaatagatatcaccaaagcctttaaaacacttctataaaataaaagatatgaaaacaacagcacagggaaaggtcaacgttgtgagcagaacaaagactgaaagaaataactaactttggaatgctcaactagtcaatgctcttgcttactcctgttaaaatctaatgtatgttgattgagagaagtaaaaaattatctcctcagataaaaatatttgaatctatattctatgaaagaaagagtacttttatattatattactttctaatagtttaggggataatttgggagactttcttagcagcctgttgggatgagaagaaaactagggtaatagagtgctaagttaaatattacatttatatactgaataattttgtcacatgaaccaaaatattttatgacatctgatcccagctggccccattgtttattttgatccctcgtaagcatgaaatgaaagtacaatgaaagattaaaatttgcaccaattactctacatccttgtggaagcttagggttttatcaggtcctaggaattattaaaaaggatttagggaaaaaaataactactcctttattggaaatatagatgtttaagcacaagtttaagtatttgattctcatgcttattggtaagtgggttctttggcagcaaaacaaatcatttgcccatactaagcagaacattatatttttcttattccttaaaaatgacacaaattgtttgtgtttcatcgactctgcaggattttagtaagcttccatgtctagagcctaagccagcataaagtcttaaagtaacaatttcttctctacagaaagccacatcttcatacccaaacacaggttcagatgattgtaatagtgtgcggtatccaccaaacttcccatttttatcagtaaaaactttaattacattcagcatttaattattcatcactctgatagaaaagcatttgtgcctctgcttcctttctctttcctctgctttctattttggttatagtgcatagaataaggaagaaaggagagaaactcatagcatttcatttcctttgggttcctaaacctacaaaatgattaacctaataaagccattagattttataatttaaaaaaatcagacgtgaagatttcagctattcatgctcatatttgtaaatgtaaaaaaaaccttatttttattacttatctttattaattttataatctatggaaaatgtaattaacacagatctaaatactaacagtgtagatattgtgttatttgaacattataaataatagcttagaactaagctgtggtctctgaaacattcttaggagtttttcctccaaggcccttgattatttgccaagtaagattaaatagaatcctgatgtatccaaagaaaaaaatagaaggaatgatgtttccagaactttgagagaaattgtttatgaagggcagtccaaaaattcacaggaaaacatggtacataaacatggagcttgaaatcaggaaacatgtactattttaatttattttattttattattattattttttttttttttgagayggagtctcgctctgtcacccaggctggagttacagtggcgccatcttggcctaccgcaagctccgcctcccggattcacgccattcccctgcctcagcctcccaagtagctgggactacaggygccygccaccatgcccggctaattttttgtatttttaatagagactgggtttcaccgtgttagccaggatggtctcgttctcctgacctcgtgatccgcctgcctcagcctcccaaagtgctgggattacaggcgtgagccaccactccccgctaggaaaaatgtatttctaattaactaccccaaatcttttgctgtataaggtatatggacgaatggaaaaagatagatagatagatagatagatagatagatagatagatagatagataatagataaggaaaggagaggagagaagaggagaggagaggaaaggaagaaagaaagaaagatgacttttttatccatgctaccaactagttaggggtccttgaacaagggacttaaacacattgcaactaaattttttgaccaaaactgtagggattttagagctctgaaatattacatatctgaaaattaattggacccagaaaacaataaaaatgaagcaacttataatcttggtaaacagagatgtttctccttttttgatagataatatctaaaatgtatactataagctttgtgctggtattgtttcaagactgttacatgtattaactcacatgatccacattttataggtgatgaaactgaggcacagagtttaagtgactcaatgacagtcaaacactgtggggctggggtttgaatccaatctagctatgaagtccagacttctaacaactaaatttggctgcctcttggggtctcattacctctatacagggtgattatcacagcrtgaaatacaggatatattgtcttcttggtgaaaatacagacattacattttagcattactgaataattaaatgtattctgtcacaatttctgttgatttaccaacttctggtgaaaaactccagcatttttccatgtcaaatgcatacttttttgagacttttactattttacatagttacaaagcttcatatcttaaattctaaaatactatcacaaactaggcactgtagcatgcacctgtcatcctgagacaggaagatagctggaggccaagagttcgagattatcctgggcagtatagtgagacccagtctcaaagtataactaaccaaataaataaataaaatactatcaaactcaacccctaaaactcctattagatgatagagcctttgaaaatcttgcaattagtgaaatcatctttgttactcatcaatttagcaggtgcgagcaaagaacatttttggaatttcagaaataaaattgcagataattttaactttcaaatagattgttctgtggctatagagatacattactcatttgtttgttattcagtaaatatccattaatagtctaatactattaaaccaatgtattgggtatgcttatagaagtggtgaaaagtacacaaataaatataatactatatacaataagaattggccagttccttgagatacacagtgataagggcttatagaagaaggtggaaggggaagartatgtcttgattgagggagcagggggacggggcagtggtgttgaaggcaggctgcctagagtgtataacatttgtattagactaagaataatcaaatttgaacatataaggggagttttcaaagaaaaatccaggtgaccaatggatgtgaacaaatataccaaggcacaaaaatgtaaagcatttaccagtaacagctaaacactttacatgcagggaaatagttaaagggggttgagaggagctcgttgggtagccccattgtttattttgatccctcgtaatcaaatggctagattactgatgccaggataagaagctagatttatttccttaacatagatttttgaacatctattaacatttttagaggatcatcaatttagagaaattaatctggctatggtttttaggataaatttcagaagcagaagaatctagaggcatccagatcctctcagcatctaggcatcttagcatctaagaggaccccattattagcaaacatagaagactaaaagtatcactatgataacagagatgagtcaaaaatacttcagaaaaaaaaagaagtattttggaaataattgaattaggcataaaaaatgtggtttttcattttatattaagagactggaaagaaatataagacattaaaagagagacagataagtagcaaattttcaggtctatgatgtacacactgaacagagtcaaaggagttttttggaggaatcatctagtgagtaactgcaaaagcacaacttatgcagaggaaacaagtatggaaacacagattaggagtgaaccataaaggtgacagtgaaaggtatgtgatgaatgatctgatcttacccacacaaagagcatagaaagagaaaagtgcccctgagagacccttgggaggactaatttcagatgagagaagaaattattaaatgcatatatccacaaaataatattataatggtatattgcacccacgtgatagatatgaaactaagagcttgtccaaagtctgacagcaaggaaaaaggaggggaaggggatgtcaataagaatcataaaattaacaatcagattagtagaagggaaacctctacagaacaatgcaataggagctagaaacaaaaatgatttcaagcaggaagcctgatgtattgtgctatatactttcagaggaaaaagttaaggacaggttattggagttcaaaatcaatggggacctttcagaaagaagttattgtagaggcgggagcaggatctagcttctagttgaaggttaaaagttgctaagggggtatgtagaaagcatcctttcaagaaggttaccagggaagggaatagaaaatatatgtgtctggtttaacagagtagtaaggtggaatgaaaatgttttttggtttaggatagaacttaattcagcaggcttgtaagctcaagggaacaatctagaaatccaaggcataaaacataaatgttaatagtcgatgagcaagggcctgaaagagtagttaggagtctgttgaggccacaagcatgaatgctagaccacaatgagaggaaaggagctattcttttytatgagacaagaggagagaggaggccatgaggaagacacatttttaaacatgttgagctagagattgaaggagtttagatttcatgattgagataatttagatttcatgcatttccttgatccccagatggttgagaagagtccaaaacttttggaaagactcaggccaggtgtggtgactaacacctgtaatcccagcacgttgagaggccaaggtgggcaggtcatttgagcccaggagttcaagatcagcctgagcaacatagcaaaactctgtctctacaaaaaatacaaaaagatagctcggtatggtggtgcatgcccgtagtcccagctattctggaggctgaggtgggagaatcatctgagcctgggaagtcgaggctgcagggaaatctgattgcaccactacaccactctagcctgggtgtcagagtgagaccctgtctcaaaaaaagaaaaaaaaaactcagttaaaaataaggtaaacaaatagagagcaggattgttagcagtttgtgaattaagcagagaatcaataatgtggacttgtcctataaccagttaaccacatcttattactttcccagtgtcttaatagcagaagtaaatgaagtgaaaggtagattcacccaagcaccaaaatttaaaaaaaaaagcgagagagataattggaaattgcagaaaagcaagcacagagaaccaaagttcctaagctagtgttttgctgacatggcagagccttggaaatggattggaagaagggaagaagaaattcctgaaagttgttattaatgtgagactatggattaactaaggaaccataatcaccaataaaggataaaatgacttcttatgaaaataggaggggttaaagagtaagaagttatgctctgaggcaaatttcagtcagcatcttggatatgaggtagttctaaatggttttgaaacctaaagtgagggtatatagagagagaggagcccaaattaaatgaaggatagcaaggattttacttaaatgattaacatcaataacaacaacaacaaagataaattacctacccttattaactgttggttatgtattgagaactgtgttaagtgctttacttctgttaactcagttcatctttcctacttactatgtgtggtaggtagtgttcacagtcattgagctgactattcccctctcgttcaattgactgtttggttgcttggtttgacattgtttagacacaaccttgaaaagcaaataatttcagttaatttaaccataatcaagatttttcattttctagatgctctgaacacttaaggtgcacatgggcatatgtaaatattttattaggcatattacagggcagttaacttagaacagaacgtgttgcataacattggctatggctataggtattaaacattataaggcagagtctccaatctgagagagctaactgatattgcaaacacaaaaaaaactatccaggagtatctgtcttcagaaaatacaggagtttcttgaagaattgtaattttattttattatttttattattttcaagcataagtaaaagttatttgagtctttcttaatagtataaatagccacttatacatttctcacatagaagaatgatgaccaactgtaagccgaaattcaatacatgttatttaaattaaaatgtgccagtactttatcagtaagtagataagtagatgggcactctgaactgattattaaaaatgcatcacttaacaatattaagcatttggttacattatgataggataattgcagcaattttggttcctaattttatcaatcaaatagactctccagcactgtaatatgttatatagttattgccatagtgttccaaaacccacatcaggtgagggtcatggctacttcctaattaccatctgtttagctttgttagtgtttctcattataactcagaaggtcaatgatactgttcatgataggaacccagcaaggcgaaaagtaataaaatagctctgagactaagcaaggctctgctactccaactgatggacagttaattacctgagcataaaacagtgagagcactgggagaaatagagaactttgcaatatggtagatgtccaagtacaatattatttggtggtttttcaatgaacaattctgtttaattaaaacatgagcataacctttgtcagaggagaatgtaattttgacaaaagcaaaacatttggtttttaacagcctcacagactacttagatgagcattccaaatctaagtttctatagcagtttctcacccttggcagtacattagaagtacatagaaactttatataataccaaagtcgggccccaccccaagccaattaaatctaaatctgtggagggtggaaattaaacatgcccatctttttttttaaaggtggctcagatactgcttttgtgctttgaaggttacaaaccactatattacaactaacattcaaaagtcatcattgccattatggatctatttgtgaacaactacaatcttctttttaacctttaatttgcactgcttttatatggaaagacttgtgtagctcactcattaaccattgtctttaatttgtcttttaaattatcaactaattaatcttttaaaaacttcacatctgacttctcagctcccatggaggaattttgaacgtgaaaccaaaaggcatttattcctagaaaaaagttttagaatcccttcgaagtgtcctttcaaacctctgaataacagaaatcccataaatcctatgggatatatgtttktccatagaattagatgattaattctatcattttaattagtaaagagaagaataaacaattagatgtaaagcccttatgttaaaaaaaatacctttgtaactatcgctagatacttattttctataaacattttatagaatttaattttttttatttttaaataggctatggatcttttcatagtgaaaccatgtccacagatttctagagtttacataaaaatgatttacattatgtgacctaagttgacacctgatagtttcatgaccagctaaccacttcaaggacagtgcaaagggcagaaacctctcttcgctatgattttcagagggaatatagaagtaccagtcttccatggccagtgtcactttcatctatctatttgatcacctgtaaaaaaaaaaaacaaaaactaatatgagttttaaagaaaatgtgaaaaaaatgctatttcttaattttaaaacttcttacaccttgactttgtgtttttagtttgagattttttaaatatttagaatgtctcaaaaatacgtgctacagtctcattaaactccatacattgttttcaaaagatattcttttctttttgttttttttcaactaggacccctactatggctggtggcctattttctattgacagaaactactttgaagagataggaacttacgatgcaggaatggatatctggggtggagagaatcttgaaatgtcttttagggtaattgcattttattttattttttgatgctgaayatacaatgctgtagcatgcacataccagtcccagtaatttactgtcaaatcayttttgctgagtgatgcaaattactgatcaattggttatcttaattcacattttgatttgacagagtcctattgcatgcaatattttcttctaaatgggaaattataggtaatttttgttttcaaaaatattgtttttattcacagtaaaaatacattaggactttcaattgctgaaataaagaagggttttattttttaataacgtgttgctctataaaatcactttgtgtttttgaactgaaacttggaagtatttatgtaatctgaatttgcaactactgcctcaggttgttctcagaaaactttaagaatgaactgtggtcaaatgaatttggataattctgcaagtagtrtgaccattttcactaacattattgttggataagtcagtttgaataaagcaacttcatttaataaatggccttccatgtaaataaaaattgaggaataagtccttacgaatatgttattaggaaagtttaataataatttaaataatattttgttatattcaaaaaatttaaaaatgaacacataagttttctttcatgctaagaaattgataagcactaacatartggttttgtttttcaaatcactgcttttttttctacctaaaattcagtgtaaactatttgtgagtgttttttgttattgttgttgttgttttttgagacagaatttccatcacccaggctggagtggtacagtggtgcaatttyagggctcactgcagcctagacctccagggctcgggtgatcctcccacctcagcctcccttgtggctgggactagaggtgtgcaacactactcctagctatttttttttctattttttgtagagacagggttttgccaygttgccyagggtggtctcaaattcctgagctcaagcaatccacccccctctgcctcccaaagagttgcgattacaggcatgagccaccacacccagcttcagtgtaaaatatatgaaacattccatcttcgcccaaaatatttgtacaataaaattattagagtttagatgtatttatctatgaagtttaaaaattatgccttttaatttctcatttcaaaagtaaagtttgtttttcattatcataatataaatacgtgtgatgttgtgtaagaaaatgttaaaatttgagaatgagttaccttgaatttctctactgtagaattcagtggatcttggataaattattttaaaatcagtaggatggcctagttatattactattttgcctgtaaactttcctgatagccagatgtctgagacaaaccttagttaatggaattttattatttttgcatttgtctatatgcttatattctcatgaaacttgccaaaccaaactcagcaccacactcaggaatatcttcttgccttcaggtccatggacagtaactctttgcaggaattttgaggacatttgagaacccaaaattattacctgttatggttcttatggtgaaagaaataagaggtaacagaaaaagaaaagaaatcagtatattcagaagtttagaaataatttgcttctattcttagaagtaataatgagagaatgtactcattcattaactgatattcttcgggtgctatgctgggttacgtaagaaataaaatcaacacagaaataccgctactatataggatcctcttgctactttttctcttgtcttcctaaaattagaattcacctctttcctccctacctgttaagcttgattttctgccaatgtactcctcttacttttatcacatatctcccagattggcgggatgctctttatctaactggttgaaagtagaattcagaaagaatttagtggaataatatgataaacaaggaggacctgatcaggaaatgtaacagaggtataaatgtataaaaaggaagacttgaggatatgatagatgatgcagataccaagggtacagaaggaatgcagctaggggctgtaagaataatcaaatccctcaaaaatgacacaggaggttttctgtgattggttattgggattattaggaaataaaatacttatcagtgactattttaaaacaatatcaagtgttttaaaatgtattattatctttagtttccatatgactttaatagaaacaaaatatgtattttgctttttattagactcttaatttatgttttactttcttctctgtgacatgaatatgtttgcttaatggtttgtactgtagctgaggtagacattgataaggaaaaatgctagaatagtgcattgacaaaagattgagaccactcatctctctttaatttcatgacttgatgaaatgagaatatgttgagcatttataatcagagggtttgaatctaatatccagctcaatcattacacaacaaacatacattgagcaagtgatatgtttccaggtgctgactttacaaagatgagtaaagcatgatgcttctttgctctcaaagaactgcattcctatgacagagatgcgtaggtgttattgtcaagaaaatgtgataatttcctttataaatttatgtgtgaggttttttgtctctgtcatgtgagtataggtgaacataaactcaactgtaaaaaggtgattataataatagtgaagttattgtggttttgtagctgtggtctacataggttctagtctaagtaaagaagatagaaatatttagggcttgcaaaatgttaagattctgactcacctcaaggtattttaagccaaaccaaaggaatacattgcaaagacttatttgtaacatatcacttgatcgctgtacttaaagacatttgaaaattttatgaaagctgtagacttcctaaggaagatgtttccaaccttttaaagacaacagatttaaatacggtttcaaagtgtttaaaaatctcttgaaaccttaggagaaagatccttggcatataataatagtgactattagtatttatagtagctagtaagtggaatagctaagagttgacccgcagcattctgacaccagggactgtgctgttaaataccatactgttacctcctcattaaggttcatctctccataacataacgaacctaacagttgatggtattattaggagaaagaaagacgctaacatgcaaatacaagcttcctccacaattctgagatgcttctctcgtctataatcttatcttcctcttataggctatagcctctaatggaagataatacacattcaatagcagtgagaatatcaggtatatctaccagagaacagcagttaggtcttaatgcttctgaaagctgtttcaaatatttctccctactgcattacacaacaatcactgcaataacataaatcctaacagcactgtctaaacataagcattaattaattatgtttagacagtgttatgtatctgctggggatacagtaatgaacagaacagacaaaactttgtgctcttatggaacttagattttggagaaagagacagacaataaacaaaataaataaaatttattaaaatatcagttataggtgttaaagaaaaaatataaggaaggaaagattctatgaagtgttggattttggaggatacataggggttgaaattttagacaagaactgagaaattgatacccaaataaaatagtgataaaatgaaccaagaaaattatgaattaccatcaaaaagtatcctctatctttaaataataaccgtgtttcaggataagtatcaaccaacaagcatcaccaccaaaagtccttgtcttttataagcaatatcatggggagcagcattcccaagagtacagatcattttgcccattctaaaatgaagaaaactgccactatccaatcaactcagagcatgggaaaaaataaataaaggagcttgatgacagcaaaggacacagaaatctgtctcacagccatgaatggttacaagtatggactgggattcagatagcctgcattcaacacccagctctggcacttaccatctgtgtaagcttaggtaagatagcacatattctaagctttagtgtgtccatctctaaaacagaaagataacagtactttcctcatttttagagaaagattaaatgatattatgtatattgtgctgagtactccactcagcacatagtgtgtcattcatggcagctgttgtggtgattgttataagctgtgcaactctgggcaagtcataacattcctgagaatcacctaaaaacaatcttacctttaataatttggctttgatcatggttaatcacaagagagaatgtagagaaaaagtcatttaaacccagaaatgcaatatacattaaagtataattatactaagtgttagttgagatgtagttctaaggctcccctgctcaaaaaatatattaaattttaaaaaggaaaagaaaaaccacacacaaaaaaatactttttatacttccacaacatcattggagttaattactgacatctaagaatctagggtggaaaacatttttctacactcataaatcagttggaatgaaacagttgttaatttttaaaagtatgtatcatctagacttggagtaacaagtactagatttaccattctcctcgtcattcacctgaataaattaaaaaatggacaaaaatacatgaaataacactttcaagacattgaacagcagtcaccctgagagatgggaaacaaacaaggaaagccttacaattgcctcggcttactgccttgtgaaagtttctaggccttagtgataaaagggctagatactgacagactccatgacttgaggagatgaagctgagtgtttggggagaccaagccygctggaatttggtgaacagagtaatggagtcctgggcagagcattgaagagatatacagaggtttctgtgggagtattcagctgtgtcttcacaagtgtgtgaggaaacaatccaagtctgaggaaagaaccttcagaaaaggttagaggtctcattgcccagtgatgactcaggaaagtcaatagtacctgtatcctccagacagattgattcatgaggtaaggggtagaggaaatattgagaaactacataacatacttcttaaaaacccatggatagtctggatgtggtggctcatgcctgtaatcccagcactttgagagatcgagcaggcagatcacctgaggttaggagttcaagaccagcctagccaacatggtgaaactctgtccttactaaaaatacaaaaaaaaaaaaaaaaaaattagctgggcatggtggtggactcctgtaatcccagcaactcgagaggctgaggtagaagaatcgcttgaacccaggaggcagaggttgcagtgagccgagatcatgacactgcactcccgtctggacaacagagcgagactctgtcaaaaacaaacaaacaaacaaaacccacagattaaagaacaagtaaaattaccactatttggaatgtaatgaaaatgaaaacatagcacatcaaaatgtgtagtgacactaaagcaaacttaggaattatttatagcactaaatgtctatatcagaaaagaaaaaaaaaaaaaagaggtaaaatcaatgaccttagcttccaccttcagaaactagaaaaagaagagtttttatgccaaagtatctaagaaaaaggaaataataaagataacagcagaaataaatgaaatataaaaggaatatatataatattccacatatatgatacctatatgataaaaaaatatatatatatatggaaaagcaatgaaaccaaaatttgtttccttgagatcaataaaatagatgatattttagccaaatatgggaaaaatagagagatgacacaaattatcaattttggaaatcagaaaggtggcatgaccaccatgtattctacagatggctaaaaggattggaatggaacattatcattctcattatgccaataaacttgacaacttagataaaatggacaacttcattaaaagatacaaattatcaaagctcacagaaagaaaaaatagaccaaacagccctgtatctagtaaataaatgaaatttattctaaaaatttataatttttaatactttaaaaataatttttacaaaggaaactcaatggccagataacctaactggtgaactctaccaaatgttttgggtagaaatcagaagagttcgggccaggctcagtggctcatgcctgtaatcccaacactttgtgaggccgaggagggcagatcacctgaggtcaggagttggagaacagcctagccaacatgatgaaaccctgtctctactaaaaatacaaaaattaaccgggtgtggtggcgggcacctgtaatcccagctacttgggaggctgaaacaggagaatcgcttgaacccaagagggagaggttgcagtgagccaagactgcaccattgcactccagcctgggcaagaagagcaaaactctgtctcaaaacaaacaaacaaacaaatgcttccacaaaattgaaaggaggtagtacctcccaattcattctgtgagatcagcattacacagataccaaaacttgacaaagtcattacaaaaatagaaaactaaaaattaatattcctggtaaacattgatgcagaaattctaaataaaattagcaaatcaagtttctccgtatgtcaaataaataatatatctgattaagtagtgttcattgcagaaatgcaaggttggtttagcattcaaaaatccatcaaggtaattcaccgtatcaagaaactaaaaaaaattgattggtcatctgaatagagtcaagaaaagtatataacaaactcagtctactcctgaatttaaaaagaaaaccaaaaacaaacaaacaaaagccctgagcaaactatttatagaaaactcatcaacctgataaagggtttgagcaaaaaaacctacacatatttaatgttaaaacattgaatgctttccttctaagatcaggaataaataaagattttggatcttactacatctacttaacattatactggaagttttaggcacagcaacaaggtcggaagaataaattaagccatccatattagggaggaaaaattaagactataattccagaagacaagattatctacaaaatccaatggaatctacaaaagtattgctgaaacaaataagacagtcttcttatcaaggttgtagaatataagaacaatgtataaaagtcaactttatttctatacactagcaacaaacagcagaaaactgatattaaacattatctaaaataatgtaaaaaatatgaaaaagtgataaatctgacaaaagatgtgcaagacctctatgctaaaaactgctgtatattactgaaattaaagacctaaatgaatgaagataaatactattatttattaatagttagtagactcaatatgatattaagatgacaattctccctcagatcaatatagattcactgcaatagcaagtgtattgtatttacttactattgcatatcaatatagattcaatgcaatagttaagtgtattgtatttacttaactattgcattgaatctatattgataagcaatagtaaataaaacttattttgttaggtagaaattgacaagttgattctatccatatagatatacaagggatgtataatagctaaaaatgcattaataaagaaaaaagttagagaattaacaaagtaggatttaaaatgtattataaagctataataatcaagactgtgtgttattaacataaagacagacaaaggaacagaactgaaaatctggaaataaacttaacacatacgtggacaactgatttctaacaaatatgcaaaggctgtttagtagagaaagaatagtagtttcaaaaatattattagaacaactgaatgtctatgtgggggggaaaaacaactccaatccataacttataccatgaaaatattaattcaaaatgtaaaaatataaaattataaaagaaaacataggagaagaacttgtgtaaccattgattagacaaatattccttagatatgacaccaaaagtatgagtcataagagaatggattggtaaattagatatcattaaaatttaaaaacttgtgcttttcaggccgggcatggtggctcacgcctgtaatcycagcactttgggaggccaaggtgggcagatcacttaaggtcaggagtttgagagtagcctggccaacatggtgcaacyccatctctactaaaaatacaaaaattakctgggcgtggtcgtgggcgcctgtaatcccacctacttgggaggctgaggcaggagaatcacttcaacctgggaggcggagcttgcagtgagcckagatagygccactgcactccagcctgagcaacaaagtgagacttcgtctcaaaaacaaacaaacaaacaaaaaaacttgtgcttttcaaagccactattaagagaaagagaagtgaaggcactgacagaaaaaaagaagttagcaaattatatatctgataatggatttgtatctagaaaaaaaaactctcaaaactcagtaataagaaaacattcaactcaataaaaaatgagcaaaataacttgaatagacacttcactaagaaaggtctacaaatggcaaataagcaattgagtaaatcctcagcagttagtggggaaatgaaatttaaaccacaatgagattacactatgcatttattagaaaaagaaaggttaagaaggctgaccatgttggtgataatatggaagaactgcacctgcaatgctggtggcgatgtacaatggtacactaaactccaaaaaacagttttagtactttttaaacactcttgagtatttactcagtggaaaggaaaatgtatattcatacaaagagttgtatgccaatattcatagcagctttatttgtaataccgaaagccagaaacaatccaaatgtccatcagcaggtcaatgaataaactatgctttgtccatacaaagaatgtgtgcaaactattaatgcaccctacaactttggtgaattttgtaataattatgctgaatgaaacaagccaggcaaaaagattacatactatatgacttcatttgtataaaattttagtaaatgcaaactaatctatgaaatcagataacttgtctggggacatgagattgaggtggcagagggaggattgcagggagggattaccaaggggagcatgaaaacttttagtggtaatgtatgtattcattatcttgattgtggtgacagcctcacaagtttcacctatgacaaaacttcttattgagtggtacaatttaaatatatgcagttcattatatgttagttatactttaataaagctgttaagaattaaaacacacacacacagagagagagacagagagagagagagaggcatactccaaagagaaacaaatgaaggaaaaatgtagttcaaagtatctacttaacagtaaacctctatactttaggttagattctcaatatatcatagtccagttacttttaaatatccctgttgatctgattataacagtctacctcccaggacaactgtattcattaaatgaagtaatactcattaaagctgtttataaataaactgtatggcaatattactttttattataattacccttaaaataagctcttttgtcagtaactaatattttaattaacaagatcgaatttacttcaagtaccccaattttcttttgcttgcaaatcacagtgaaaacaatagtgtatttacctgaagaatatagctaagtgaaatgtcttytcatgtgaaatccatgtatttccaatttgtacaagcaatgaagtggaaaagaaatgagagctgacataataaatagtggaaaaatgaaaagcaggggttcccattgaacagaatagtatggtaaatgagacaatgaaatttgtcaacctttaggggcttatagtatccagactttttaaaaatacttaaagaaagtaaagaattttctaagcaatgtctacacaattcaaattttgacaagtgaaaacatcagccgtaataatttattagaaatcattttagacaaaaatccagctgatttatttctcttagagttctttgcctttttgtaaacttaattcatacaaatctgatgaaagtaggttatttgtcagtgtgtaaaacttgactggtttttttttttggatcagtcatagaaaccaaactataatagaaatatggagatggttttgcaggatacttttctttaaatatgataaatcactctcttaatgataatatagagattattagcctttttaaaaaatcctatgaaatcataaactgacatcatgtgtgtgtagtctccacaaagaatgcagaccaatcttaatgatttggttcagcaaatgtttctcttgttccccatttggtgcaggctgaaccttaaacatattgaagaatagcttgaagttttagcttctgtgcctgcaactagtttttctgtcatctcggccaccactttgctttgaaccattgtttaaacatatattttcattcaaagaagggctttttaaatttaaaccacagaataaaaaatatttctagataagaggcaatgagacagtgctactaaagattgtcatatatatatttatatatatgtgkatatatatatatatatatttctaaagcacagggtgagtaggtgtcacagaataatatttcattatggttcctaatagaattctgtttatccaaaacaaatgtgttagaattttattttgaatattaactgctataaataactggctttgtatgctcctttagaaaaaaataagtgaacaacaggtaaattagacattaatcaagctttagaagaacattagcaaacattaacaaaacttgtattgctcttaaaattataatagcttaaggcatcgtaatttcaataactacattcctctattaatatttttggttcagaaaactggaatatgagaagagctttatattagcctttgatatgatgctttaccttgtaaacattcaatttggagacatgcttatagttttagaaacataaagcacttaaagttgtttagatgcactaaaacttggtattaatctctggttctcttttatattcatttaattatttcttaaactaattgaaaataattttgaggtggtcggtaccacccataattcgtttttaaagcataaccacttatttataccttttctattatttctaaaatcatcctaagagattactaacatgaaaattcacaattgaaatgattcaaaacaaagcaaccgagaggaaagatgaaaatgaagggcaagagaaataaagtaacaagaaaatgggataaactagtcacattgaataatcaataactttattcaaatattcctgacagctaaagtgaaaataaattagtaaataaaattgcactgaacctttttttttcttcagatgaaaggaactagattctgaaaggcattgcccagtagacacaaagcagttgatatgttagaccatgttttagcaaacatccactaatgcctttaaatggatagtgggtttcttgggtgcactaagagaaaattatcaattttattgctttccagtgatttgatctcataaaggaatatatcttgaagatagagtatcatttggggtttttctgtaaataaaacgtatctaaattcagtcaagcttaaatgttggtcaattcacatttgaattatgttagcattcttttctcttaataaaaatagaactcacatacacaagatgcagggatgtagatactaacattagtggctggtcatgaaaactatgatataaactttttctcctactcagacccatcacatttcttcacaggtttggttcacagggttgcttgtgaataatgttattagagaatggatttgcttggatacaacttggtaaagagattaaaatgtaataaagatacaaattgtctagatatttttggttatgctatttgttatctgtgcaacgcatagaataattggccattactggctrcaatgaaatatctatgctagcttgtaacagctgtcttggaactaaacaaactaaaaattttggagaagttaaatatgagctttgttaggcaatttcatgaggatttagaagatggtaaaacaaatcctagagttatgagaagataggtgaggtttgaactgagtgttaaagaactgacagaagttagctatgtcaggaataagaaaggcatttgaggaacagaataccacatctgtggaattagaatatgtgtcataaacctagccctcttgcattaataacattcatttcttctctttcatgacctcacaaaatctcatcatatgagtgtttctctggagaattgtaagcatatactgtattggtaaaccaacaaaaatactcgtctactatctaaccaatcatgaatactatctgtttattttattcatctatatatatatctatctaatttatgtgtatgtgagtctatgttagcataaaaactaaatatttatgagggcccaaaatgtaagtctctagtggtagttactgtagaagctatattgtaacaatgatrtatggataaaaattttacagtattagatgtctctataaaaataaatgctgaatggtactcgcaagacatcctgaatgagttggaactaggatagtaaaggaaattataaaattatggaaccctgaaagatggacaggaattaaatgcataaaaagaaaaagaaatcgaatgaaaattatacaaaaatagtaatgtataaagtatacattttcatttccattaataaataaagaagtgaatgatattttatagggcttatccagaaatacacattggaaatgttttgttggaaaatcaatctaattgagaaagtttttctgtcttcttgaatgataccattagatggaaataaaggtacacacaagaaaaataaacaattaacttctgaaccatgataaaaacacttttgaaaatattattctttaacagatacaaggatattttaaacatactaagcagaatgtccctgtatatagcaataagccaggaatacctggctttttagtgaatttcagtacattaagtaaccaacactcttattagagaccaatgtctaaaatgtcaactttgagaaacatacttcattgctgtggctttctgacccttctctgctcatatgaacagatattccacgtgcatgttacccttaaaagtctttataatctttctgatcccaaacataaaggacttaaattcagcggtttgaatttatggcaataaaaacagctatatgaagaatgttaatgtgctcagaattattgaacagacaagtttcatatccccttaaggccaaatttcactagagcctcccattaagtgtgcttaatcaaacaaaatgatgctgaaaattaagtcaattatcctgctgatttacatttgaaatgtccctgaaatattctaataaagaaatgtttaactttcttttaaatctaaatatatgctgccgtgaattgacttttagctatttattttacaaattagggtttcatttttcttacgtggaaagggaaagttaaagtaaataacttgtaaaaaaatagctttaaaattttaaaaagcatttatacagattgggtttgattaatgagctacaactgccattaaattcaaatgaaatgtgcaaataagtttaagtcaggaaatttactggttaattttaaaatgtttgtcagttcttgggcatactcagtccctggtctcggtttcctagaacttatgctagagggagaccatagacgataaatgagtaagcagaaatattattctgttaatttcagataaagtcaagtgcctagaagaaaataaaataaggtaaaatgttgtgaatgacagaggtggaggatgaagggtagagaactacattacctagagtggtcagagaaaccctcccaggggacatttgggctgataccagatgacaggaagcatctatctatgcaaggatttgcaggggggaacattcagcatagaaaaaaaatgataaatgcaaaaggccttatgcagctatgaagtgagctcagttctcctgttccaagtctataggatcacaaatagcctgaagaattgggagggttaggagagaggtcatcctctcagaataatgttttggttgactgatttgttcagcatacaattaatgtgtacctatttgccacatacaatcacacactacataattgtgttttggtcaacaacgacacatatacaatggtggtcccataggatactactgtatttttactatatcttttctatatgtagatatttttagatacacaaatacttaccattgtgttacagttgcccacagcattcattacagacacatgcttttcaagtttgtaagctgtaccatctaggtttgtataagaacattctgtaatgttcacatgataatgaaatcacctaatggtgcattcctcaaactgtatcccagtctttcagtgttgcatgtacaccgagtacagttacaaaagatgtacaagagatgttttctaagagattatattttgatgaaggcttacatttgaataatacataataaaataaataataataaaatcattttacaagtattgttataatggatctagtatagattaaatatataagaaggttttttctcattattttgtttcttatcttgaatgcattttgtaacatttgcattatacttcagatcacctctaagtatcagccaactataaatcaaccctcattttacctatcaatcagtataaatattcacatacctaaacctgcaatagaccctgtggatggcatatacgcaaggtgtggttcttgatttctttcactgtgtgggtatgtaagatagcaaatagcacctgataatgtacgaagttctaggtatcatttgaagatgcagatatatagtgcattaagttcaaaggagggaacgattgctgtggtctaagacattcatggaagaatttagaaataaaaaatttaagggtatatgtagtcttgtgaaaagaagcagaaaagcatggcctggaaatctgtgtactctcagtttacaaagttctctgctgctgtgatccttgatatagtttggctgtgtccccacccaaatctcatcttgaattgtagttcctgtagtccccacgtgtcatggaagggatccagtgggaagtagtttaatcatgggggtggttacccccatgctgctcttggcacttcttgcttggcatttctccttgctgctgccatgtgaagaaggtcatgtttgcttccccttccaccgtgattataagtttcctgaagccttacaagccatgctgaacagtgagtcaactaaacctctttctttataaattacccagtcttgggtatgtctttattagcagcmtgagaatggactaatacagtaaattggtactgggggtaccaaaaagatacccaaaaatgtagaagtgactttggaactgggtaacaggcagaggttagaagagtttggagggatcagaagacaggaagatgtgggaaagtttggaagttcctagagacttgtttaatggctttgaacaaaatgctgatagtgatacggacaacaaagtccaggctgaggtggtctcagagatggggaacctgttgtgaactggagtaaaggtcactcttgctatgcaaagagagtggcagcattttttgcctgccctaaagatctgtggaactttgaacttgagagagataatttagggtatctggcagaagaaatttctaagcykcagaccatttaagaagaagcagagcctaaaagtttggaaaatttgcagcctgttgatgcaatagamaagaaaaacccattttctgtggagaaaytcaagcctgttgcagaaatttgcataagtaacaaggagccaaatattaaccaccaagacaatggggaaaaggtttccagggcatgtcagagaccttcacagcagcccttcccatcacaggcctggaggcctaggaaggaaaaatagtttagtgagttgagcctagggcctcccttgcttgtgtgcagccttgagacttggtgctctgcatcccagatgctctagctatgggtaaaaggcatcagtatacagttcaggccattgttttagggggtgcaagccccaagccttggcaacttccacatgctgttaggcctgtgggttcacagaagtcaagaattgaggttgggggacctctgcctaggtttcagaggatgtgtggaaatgcctagatgtccaggcagaggtatgctgcaggagtggagccctcatggagaccctcttgctagggcagtgtggaatggaaatgtggggtgcaagcccccacacagagtcccccctggacattgtctagtggatctgtgagaagagggccactgtcctccagaccccagaatggtagctccaccaacagcttgcactgtgtacctggaaaagccacagacaatcagccccaacccaggaaagctgacaggagagggactatcccctgcaaagccacaggaatggagctacccaaggccgtgggagcccatctcttgtatcagtgtgacctggatgtgagacatggagtcgaagaagatcactctgtaaccttaaggtttaatgactgccctgttggattttgggcttgcattgggcctgtagcttctttgtttgggccaatttctcccatttggaatgggtgtatttacccagtgcctgtacccccattgtatctaggaggtaactaacttgcttttgattttacaggctcataggcagaaaggacttgccttgtcttagatgagactgtggactgtggattgtggatgcttttcttttcttttctttgttttcttttcttttctcttttctcttttgttttctctttttttttgatggagtctcactctgttgtacaggctggagtacagtggcacaatctcagctcactgcaacctccttttcctgggttcaagcaattctcatgcctcagcctcccaagtagctgggactacaggtgtgggccaccacatctggttaatttttgtattttgagtagaaacggaaaatgcaacatctgcatcttcaccatattggccaggcttgtcttgaactcctgacctcaggtgatccatccaccattgcctcccaaagtgctggcattaaaggcatgaaccaccaggccctgtcagactgtgacttttgagttaatgctgaaataggttaagattttgagttaatgctaaaatgagttaagatgcctcctcattgggaatgcatgattgcttttgaaatgtgatgacatgagatttggaaggggcggaatgatatgatttatgtgtgtcctcacccaaatctcatcttgaattgtagttcccataatcccctcatgttggagggatctggtgggaggcaatttaatcatgggggtggttagttgagtgctgctgttctcatgatggtgagtgattctcacaagatctgatggttttacaaagggcttttcccccttttgctgggtgcttcttgctgctaccatgtgaagaaggatgygtttgcttccccttccaccatgagtgtacatttcctaaggccttcccagccatgctgaactgtgagtcaaytaaacctctttcctttataaattacccagtcttgggcatgtctttattagcagcatgggaacagactaatacactcctactttgttctttgaggcatatctaagtttagagtagaacatctgatttcctgccttttgttttccctatggaagattacatgaatgaagtattactaaagcattacatgtgtatcttataaaactaagatttaaatggcaggattaataaagtatttattaaaaattcaataaattgagcctattatttttatatacctatatctgatcccttaaagacatctaggacaaaattccaaatctgttgtttttgtatatgttcagttaggaaacctactgaacctcgctcgtcaaaattaatgcattcaaaattgaatctatgtattttttattaaagagccaactttaaatctctatggtaacgactgcaataaatgtgcaacatcttaagctatgattatattgtcacacttagtgatgtctatcttcattacatgactaccaatcgttttactgttgttctagtcaaccagaaatgtagttaaaaaaggaaaccaattatgagatttatttaaataagaccgaacaatttctgcaataacagattctagatactaggactgactctgagtgtgtgagataatgttgaggggagaatttcatccaactgtaaaaaattgagtggtaagtaccaatacgtaattactactgagaaattaagtataattgaaaagctagttgttgattttcagtactacccttaaaaattatattcaaccaaacaatatttacaacattttcaaaattccaaatttgatgcattaggaattctaaagatgttttataattgtcaaactaaccatgtggttacactgcaaatatgccaaaattgaaataaacatttttggtatggaattattagcatttctgtactgccaccatgatacacctgcatgtgataatatatttctgcatgccctactctatcatcaaagttttggcaacattttcccacttacttgcttactccatagcctagtaatatgtgatccctgaccaaaatattttttctctattttaagtggtcaaccaaattctatatttactttttaaaatcctatattttagttggtcaaccaactttatattccatattattaattggccaataaaagctatttgcatttgcgaaaaacatcataacttatggaattcctaaattaagataaaaatctatacaaaactttaagcgtactgtgtcccacactaatcctgtaatggtctatttggatagtaattagacctgatggaagactactgctccttcatcatttctctgaccctacaagagaagacctcaggaactgcaagatttcttttcatatttggggaacaaaatggaagctcttgattctataaagttatggaaagttaaagatgtaccaggagcagttggaaatgtgttgcagggttgaggcaaaggataaggaattaaatgggtgtatgaggattgattaatttgccaaggaagaaaatagggacagcaaaagagcaaggcatttccttaggtagcacctactttaggggtgggagaaagaagaaaaagtgattgctaagtcaaaactgtcagtgaagaacaaataaaatgtcacaaaaacttagaaagttatggtgattgtcaacagtgtcaaatgctacagagaagtcaggaagtaggaataatgtaagctcataaaaagtttcatgagcagtttcagatgatggattcaagatagtggaatataagatgataagataattggattgtgaaaacatgtagtgggggaaaaatctttttaagacatttgcccgcaaataagaaggaaaaatcatagtaactttaaggttaaatatgagcaaagtaattattttgtattttctatcatttcattttatcataaatttaaaataaaatatcatctattatattttagataggtaaaatatctaaaaatgaataaggaactagttttaaatatgcggtgatatctaaaaagaaaaagaaagggataattgatgagataaatacctacaggtattggacaaatggtatagcaataaagaatatctgtgtgacacttagtttacagtgcagtttcacactcattattttactatgtccttaccagaacactctagatgagttcttattatcatcttattctatagttgaaggttctgagcctcagataaattgtcatgtgcctagaaattggcagggctaaacatcaaactcacatctcctgactccaagtcaggaaccttaatacgagttcaggagaccaagggcaagggtgaacttcagagaagasgattgactttctttcctaaaatggaaagaagaaactaaggatatttgagacatttcgaggtagaaatgagtagaaaatcaggtgagctctttttgatctcaaggaaagtggaggcaagagattattttcagagaagatagaatttatatggagcttgataacaggtgaaaattttggattaatcacagcttcttcaacaagcatttgaatgagcatttgatgttctctatggagcaacttttaaatttcacaagaataacattttgaagtactagtgtaccaaggaaattatctttactggactttaagcatcatatctaaagaaataaactttgcactcccctctccttgtttgtgactgacaagttagcaaagcaatatgccaaatgttgctatttcatggttatttctttactcttctaaagtgtaatgtaaccttcattgactattaccaattaatttttttaataaaaaactgtcaaaagtagagtattaatttccttcttaggatgtttgtgggtttcttgaataagtacttgaggtgacattaacatggatatttttaggtgtttcacattggttcttgccaaactctatatagcaaaaaaaaaagtgcctgtaagatgagttttgagaggtactcatattttccattgacagcattagaattttagatatgccccctagggaaagtacttatttgaagcaaaacttacagctttaaaaaataatgtcttaggttcttgactagaaacaaaatgactctagctgattaaaagccaggagaaaggcatcctgtctatcacgatggtgggggtgagaaactctcaagtccccttcttgtaagcatgagagactgtttatttatttatttcactgtcaaatgcaaactgatgactagactttaactttaatatgcccagttttgacattcacaactagactggcctgtaagctactagagagctatgtattattattattctttttctatgccccagagcccagcattgtgcttgacaacacacaaagtaattggctaatatatatttgctgaatatatgccagccaggatcttagaaaaaaattctcaagaggagacaggttgtcctatttcctcaaatttatcacaattctctacatttgggacacacatgaccactttacaaattacacaggaaatttaattgaaactgaaattctgtaactccaattaggagaggtggacatttacagatggagagactgaaggaaaactttttctgagctaccaggttttcttttccactcaagttctttttatgtattgctggcatctgtgaaagagcaagagatgccatatattgcagctgggtacccaggtggtctactgatattcaaaggggactggtttggcatgaattctagggcagcgtcacgcagctgtcatgagccactctgtggctagaagcagcagatgttactgatatctgaaaggcagtcacatcagacatgggagaagaccaatgtaaaatgcaaggtatctgacctacatatcatttaagaaatcacacacattttccattcagttttcaaatttacatccacatacaatttttttcacagttgagagtaattgataggcttaattatacaacgaggaaaacaaaaattccaataattctacttttgtcttaataatcacttaaatatactgaaaatactttcaaagcctccaggatgtattataccttaacattattaattattaaaagatgaaaaagtgttactgtatcatatattatttttgtttcctttcttcatgagttactgtttgaaacaatttgtgctcataaaaaagcaatgcttgtttataatgtgaaaacctaaccattaatttcttaagcagaaccatcttatattatgtaggatttctaatatctgacagatggccttacattttttatttcttgcctgttatattcatacattttatttacacagagaacggaagatttgccacaatacaatcagaaccatgtgttgtattgttgatctaaaggacaattgggattttctgaaatatcagcagccctaataagatgtggagtaatgacatgtaacaatttttctgattccagaaaacacaaaagccataaagtgtggtgatcaatcctaaaggtcagaaaactccaaggcaaagaaagttgtcgaaaggcaaaaagtgacagtagattgtacattaggaaatgttggcatgagtattttgggggtagcttcactgtgtttttgagctgctaggaatgggtttctggttttgagaggagtgggagatgagattaaaggctccatctgtgatcaataccacttcaccatacctctcacacacaccggttcatgcacattttgttcttaaacacatcctctccttcaactctacattcagtctatacacacctttgcattctttcactctactttttcctctccctttccgcacccccactctgcccccaccagctgctccctcaaaagtcagttgctaggcctttggaaaagcaaaagataaagtatgattgagaggcatcctttaaaaaaacctacttcaaggtcaatttgctaattcctttagaaaatgagtaagtatgaaaaggatcattttgaatttgggkctttcaggaacttcattactaaattaagacagaaagtacttgataagggaaaatacttgataattggacattttagaagcaaactgacattggtgggataaatacatgggatggattcaactcagcattgtctacgtttaatgccaactttaacatctccaaattaccctaataaggctatgacctgaaaaattctcctaaaggagaacaaaagtgctcttccattttttctcgttttaaaacatctgtgagctttctaaacgagaggaattcccatatttgagggggaaaaacacatttattgcctcataataagttttatagtctcagctcctttattctttctcttgttcatagaatcatatttttattatrttcttttaatacaactaaagtaaaataagcttgcctaagtaggaaaagttttatttaaatttcggagggttatatcattcccatctaaaaatatgatctctacaagtggtttgtgtaccctaggtaaaaagactaatctaaatcataaatatatggccaaaaacacaaagccatcatcaacctcattccctcttcttctgcatgtgagttttctaaggactctccagattaaatgacttgttccaaattctacaatcagtttgtgtctatttcaagaacagaatgcagctttccaattttaaatgtgatgctttttttattttccatgcaaaatattttgtttaaaaaaaacattaaattatcaagtattggaaagaatcctcaggtgtgctgaatctccctctggcttctggcaggtgaccacttaaaggctacaataacttgatgtagaaaaatcttcatcttgagatgttatcattacctcagacttcaactctagccaccactcccaagtaacataaatctagattacactgtgaagttaaaaataggtcaagagtcaaccaaacaactaagaaggcattctctcaatcaaaatgacaatgaagaaaaagtggcaagtttcatatcaagaatgaggagaaaaatgcctactgtaacctttatgtctgttccatttgaatgactttcatgccttttgtgtttgtgcatgccagtttatcaaggatcatagtgccttcagcatctcaatgaaggcctttttagactttgtttcaattctaagaattacgggatttgtcatcaggctacttgaatatatggaaagtggagagttgatatactgatagggatttttttttattatttttgaagcaaacaggaatatggaacaaaatattttgaaaattaagtcaccagtatcttcaagttttccctttaccaaaattgagaaaataacagctgtttttcctgattccattacatggtagatacattttgtgtgccttgtgtaatttttctcatttttctttatcaatattaatagatcaatgatcaattattattgagcactgatatgagctaaactttttttagactttgcaaacactgagagaatggtatctttaatttctgatttttttactatatataaattatacttcgagatcgcaccactgcactccagcctgggcgacagagcgagactccgtctcaaaaaaaaaaaaaaaattatacttcagtttcataatgtagaaacgtgatgctttttcttaaagagataacatgagtggggctataaggctaatatatacaaaatacacacacacatacacacatctatatgtgtgtgtgtgtatatacacacaagcacatacacacagcctcacatccacatacatatacatgaacatttatctagatgacaaactatagaattgagaactcaatggggtgatatagaggtaggtagatagtaagttctataaatcagtgaaaatttgagatcaatgaaacctatcatagtcaaaaactgtttacaggaagaaaacaaatgtgggctgtgcctgatagggaggacataataggtaagggaaagtacgtatattcttttatttttatgtttatttgtaattaacacataataactgtgtatatttgtaagatacattgtgttgttagatctgtgtatacattatagagacaatcaagtcaattaacatatccatcacctccccaacttatttttatatgtgtgatgagatgttaaaattatactatttaagcaattttgaaatacaaaatacatcatcattaactgtggtcaccctgcagtgcaatagatcactaaaacttattcttccagtctaactgaagttttttgtcctttgaccaacatcttctctttccccatctctccccgattccctgtaatctactttctctttctatgagattgactsttctagattcctcatgtaagtgaatttataaaatattaatctttctgtgcctggcttatttcacttagcataatgtgctccagttccatccatattatcacaaataacataattcccttccttttttcagctgtgtaacatgccattgtgcatatatatatatgtgtgtatatatgtatctgtatacatatagctacacacacacacacacacacacacacacacatatatatgtatctcacattttctttatccatccagccattgatggcaggtgctttggttgcatctgtatcttggctattctgagtaatgctgaaatccacatgagaatgcagatatctccttcatatatgaatttcaattcctttgaatatatacccagaagtgggattgctggatcatatcgtaattccagttttagcttattgaggaaccatcaaactatctcccaaaatagctgtacaaatatacatttccaccaacagtgtacaagggttcccttttctccacatcctcatgtggagagtgaggattcggagaataactgtgaaatataacacttattatcattcatcttttttataatagccattctaatagatgtgaggtgatatctcatgtggttttaatttccatgtctttaatgattagtgatgtttcacattttttcatagatgttagtgattcatatctttttttgagaattatctgttcagatcacttgcctattttgaaattgggttattaatatttttgctgttaagttgtttgaattccttgtttttgatactagctctttatcagacatatggtttgcatatattttctcccagtccatgagttgtctcctcactctgttgtttcctttgttatgcaagagctttttagtttgacacaatttaatttgtctctttttgcttttgttgcctatacttttggagtcctagccaagatatcattgcccagactaatatcatggagttttttccccatgttttatttgagtaactttacagtttcargtcttatatttaagtctatattttatccaatttgagttgatgtttgtatatggtgtgaaatagtacagttttattcttttgcatgtggatatcaagttttcccaatgtcacatattaaagacattctctttccctcattatgtgttcttgccacctctgttgaaaatcaatttataaatacttaggtttatttctgggcttttgattctgttttactggtctatgtgtttgtttttatgccagtcccatgcttttttgatttataatagctttatagtgtattttgaaatcaggaaatgtgatgctcaagctttgctctttttgttcaaaatttctttgggtattcagagtcttttctgcttccatatgaacttaaggattattttttatatttctgtgaaaataacattgcaattttgataggttttgcatggaatctgtagattactttaggtaatatgaacattctaccaatattacctgaccatgggatatatttttatttatctatgtcttcaattttttagtcaatgttttataattttcaataaacacatctttcacctccttggctaaatttactcctaagtattttttatgttattgtaaatgggattgttattttccatttctttttaagatagctcattattaatgtgtagaaatacaagtgatttttgtattttgattttgtgacctacaaatttgtttatcagttctaacagtttttttggtggagcttttagggttttctgcatataagatcgtgtcatcagcaaacagagataatttcacttcttcttttcatatatgatgtctttagcttattcttgcctaaatgctctggctaggatttcaagtgctatgttgaatataagtggcaagattgggcattcttgttgctgaccttacaggacaagctttcagcatttcactgttgagtctgatattagctgtggccttatcatacatggcttttattgtattggggtacatttattctatacctagttttttgagagttttaaacataaagcgatattgaatttgtcaaatttttctgcttctactcagatgatcatgtgctttgggttcttcattttgttagacatgccttacaagaagtactaaaaggagttattcaacctaaaggaaaagatacccctaagtagaaacaaaaatatataaaaatatggtcagagtggatgcaggtgtgagagggtccagcagaaggaaacatggctgccagcatgtttgagtctattaacaagtttggcctggccttatagctgttgtaggaggcatggtgaactctgccttatacagtgtgcatgctggacacagagctgccatctttgactgattctgtggcatacaggacattgtggtacaggaagggactcactttctcatgccatgggtacagaaaccaattttctttaactgatgttcttgaccatgtaatgtgccagtcatcactggtagcaaagacttacagaatgtcaacatcatactttgtatcctcttctggcctgttgctagccagtttgcgcacatcttcaccagcatcggagaggactacaatgactctgtgctgccatccatcactaccaagaccctcaagtcagtggtggctcactttgatgcaggagaactgatcacccaaagagagctggtctccaggcaggtgagtgatgaccttacaggtcatctttgggctcatccacccacctttgggcaagcagccacctttggatggcatgtccttgacacatctgacctttgagaaggagttcacagaagcggtggaagccaaacaattggctcagcaggaagcagagagggccagatttgtggtggaaaaggctgagcatcagaagaaggcagccatcatctttgccgacggcaactccaagacagcagagctgatccccaactcactggccatggcggggacagtctgattgagctgtgtaagttggaagcagcgagacattgcattccagctctcatactctgggaacgtcacctacctgcctgtggggcagtccatgctcctccagctgccccagtgagggcccaccctgccttcacctctgagggccaactaggccacagcccagtgattcttaacaatgcttccttttgcccccaccccagattggatgatttccaaatgacctgttttctagttcatcaatccttcttctgcttgttctacttggctgttgaaaccctcttttgaattgttattattatattcttcagctcaataattcctgtttggtgttttctaatatttcctatctccgttttaacgttcagtttgctcatgtgttgcactccacacctcagtgagcatctttattactgttcttttgaactgcctataaagtaaattctatgtctccatttcatcaaggttggcttctagagatttatcttatcttttatttgaaatgtattttcctatttcttcattttccttgactctgtgggattcagtaccttagataaaagaaccacctctcccagtcttgctagactggtcttgcgttggagatattcctcccaattagtatagccggagattctaggtgcctcaaaacactttgtttgtccaacctgctttgcttttattggtccctgtattagtccgttctcacactgctagtaaagacatacccaagactgggtaatttataaaggaaagagatttaattgactcacagttccacatgactggggaggcctcacaatcatggtggaaggcaaaggaggaggaaagtgacatcttacatggaggcaggaaagagcgcttgtgtaggataatgcccctttataaaacatyggatctcatgagacttactatcacaagaacagcagcatgggggtaaccacccccatgattcaagtacctcccaccagattcctcccacaacatgtgggaatcatgagagctacaattcacgatgagatttgggtggagacagagccaaaccatattgttccacctctggcccctcccaaatgtgagcccctcatgtcctcacatttcaaaaccaatcatgccttcccaacagtcccccaaagtcttaactcatttcagcattaactcaaaagtccacagtccaaagtctcatctgagacaagccatgtcctttctgcctataagcctgtataatcaaaagcaagttaggtacttcctaaatacaatgggggtacagtcattcagaaaatacggctgttccaaataggagaaattggcccaaatgaagaggcctacaggcttcatgcaagtctgagatccagtggggcagtgaaatcttaaagctcccaaatgattccgttgactccatatctcacatccaggtcttgctgatgcaagaggtgggtttccatggtcttgcgcagctccaccattgtgattttgcaaggtacagggtacagctccactccttactgctttcacaggctggcacggagtgcctttggcttttccaggacatggtgcaagctgttggtggatctaccattctagggtctggaggacggtggccctcttctcacagatccactggacaatgcccaggggggactctgtgtgggggcttgcaccccacatttcccttccacactgctctagcaagaggttctccctgagggctgcacccctgtagcatacctctatctggacattcaggcattttcacacatcctctgaaacctaggcagaggttcccaaacctcaattctggacttctttgcacccacaagcccaacaccatgtgtaagccaccaaagtttggggcttgcaccctctaaagcaacagtctgagctctacatttgccccttttagccatggctgggatgcagagcaccaagtcccaagactgcataaagcaataaggccctgggctggcctatgaaaaatttttttgtcctaagtctccaggcttgtgatggtaccaatttactatattagtccattctcacactgctgataaagaaatacccgagactaggtgatttataaaggaaacgggtttaattgacttacagttccacatggctggggaggcctcacaaaatggcagaaggcaaaggaggagcaaaagcacatcttacaaagcagcaggcaagacagcttgtgtaggggaactcccctttataaaaccatcagatctcatgagacttactcactttcaagagaacagcacaggaaagacccacccccatgattcaattacctcccactgggttcctcccacaacacatgggaatcatgggagctgcaattcaaaatgtgatttgggtagggacacagccaaagcatatcaatccccaagaaattagtgattgccaagtcatgctattgccttgagagagttggaatagcacccagtctcttgggattcagctagagaggctacagtgttagaggtgtgttccagtttcttattttcttgcagagaagctgagagccaaagtttgtcccacttattctgtccttcaccaaggagacagcctgaagcagctgcctctgctcataatcagaatgctcactttgagtctagtgagagagatgctgaatatttccaagtttaaaagtcttttcttgttccctgtggtctaggagactcaggagtgcagagctctgtcaactcccatagctaggtgatttaagagccattctcttgggtaaaggctataaaagttggggcactcaatgcatgcacaagctactcccagtgagagtctgcatatctagatttactgccggggcaagtcagggaaaaatatgcagggagagcccactctcccattcaaacaagtggaagtctcacaccctcctagcaggggaagaatgtagtccagaattatcactgaaacaaagcagggaagaaggtgcagggaatgcctacttttccattcaggaatgaagaggtcctccagtctctctttaatgagagattgcagaaatttatctcaaaagcaagccaaggaaggaagcaaggggcatgcccactctcctgttaaggcaagccgaacttttacatctctcttgccggggtagactgagattacaggaatttatcttaggagcaagccagagaagaatgtacatacaggacatgccttcctttctgtttaagctggaggcggcttattctttattggctatgtaggttcccagatactggcttgttaaaaggccagaaccacaggaagctgataggaaagcctgagaccaaatttgggggaatttagaagctgggccaatcctcagtgctatagytgctaggagggctcatgttgtgtccagaattggtggattcttggtctcactgacttcaaaaatgaagctgcggacccttgcagtgagtgttacagttcttaaagrtggtgtgtctggartttattccttctgatgttcggacgtgtctagagtttcctccttctggtgsgttcrtggtctcactggcttcaggagtgaagctgcaaccttcacagtgagtgttacagctcttaaaggtggcgcgtctggagttgtttgctctttccgtccagagctgttcgtccctcccggtgggttcgtggtctcgcgggcttcaggagtgaagctacagaccttctcggtgagcgttacagctcataaaggcagcccggacccaaagagtgagcagcagcaagatctatcgtgaagagcaaaagaacaaaccttccacagcgtggaaagggacctgagtaggttgccgcggctggcttgggtggccttttattcccttatctggccccacccacatcctactgattggtccattttacagagagctgatttgtccgtttcacagagagctgattgggctgttttcacagagtgctgattggtgcatttacaatactttagctagacacaaaatttctccaagtccccaccagattagctagacacagagcactgattggtgcgtttacaaaacctttagctagacacagagtgctgattggtgtgtttacaaaacctctagctagacacagagtgctgattggtgcatttacaatcytttagctagacagaaaagttctccaggtccccaccctacccagaagcccagctggcttcacctctcaatggcactcgctgggggactttgcggcacctagcctgggcactctggcagcccagagagagcttgtcccccagtcaagcccagcaggtgctggccggccacgctgggtgcggggcccaccgaacccatgcccacccagaacccggccggcccacgggtgctgcgtgcagccccagctcctgcccgcacctctccctccacacctcctggccagaccagggagctggctcccgccttggccagccccagagaggggcccccacagcacagcggcctgctgaagggcgccttgagctcagcaagagcggacgctgaggccgaggccgaggaggtgccgagagcaagcgaggactgctagcacgttgtcacctctcgatgtgattcaaacctttttgttttttccttttatgtttgagataaatcttctgatgccctctccctgtggttcatcaagcatggtgattgaagagccgagccctctgtaaagactgcaaaagttggcactttatgtgtcgtacaagcaagccccttacccctcaggaagaagctggtagttgagatttttcctctcaattgtaaggctctgtgctctgggtggagctagtgtatgagtgtatttctgctttcaatatccattttgatgtgagtatttctcagtagtctggcatgtacgggtctttcatctggattttggctttctcttggagagaactgactcatgtttaggtgtatactagatgtgtctgtgggatgagaggtagcccagagcctgctctttcaccatgttgctgacataccctcatatattatttcataattttaatttcccaaattgtatcaagttattaaattcctctctatttcactgccatcaccttgggcaaagtcattatcatctctgttctagattgttgcaataactcctcaataaatcactcatttactcaattccaattcattgccaaataaaagctaagtatctttatgtgaattagtttgccttaatcctcataacaatattattttaccaggtttgctgggctagattcttctagtttcattttattatctgagacccaaatcacagaaaaatgacataactgaggtcacccagctagtaagttgcagagctaggatataatatcaggagctatagcctctactcataatcattgtactatatggtctccattattatttgttttcaataagactatattaaaggatgacttcgtgccagaggtagtatgtttatgggttaggggaaagataaagattaatataaaaacaagcagctgcatgaatttggtacaacagctgtaaaattagaaacaatagtagcactggaactgacattgcaaagtggagcttatgaagtttatgaactttaattaaaatgtcactgatgtgggtrccaaaaatcatgaaaaggataaagtatgttcgttaattgtctcctagcaggggaaatagagtagataatcaaatgagcaatgggcattttacattttgattaagaaccttctccatcataagacatttataaaaatatctgagaacaaagacaagctttaattccctgtggataataggatagtttatattgtatacatggtcaaatttacttgaaagagataaaatataaaatattaatctgttgaaagcctagaaaataacaatctgatatactcagtgatacaaagtaattcagatatcacttgttcatgtgaatgagacatcatgttttattcagcttatacagtttgttcagacattgtaaaataatttcagggaataaaatgcggtattctaattagaagctaatagactattattttagactccacacagtgtacataactcctggacattgatgttgtaattttaaagaaacacaacatttttaagacctgaataaaattctttttaaaaagcaagaatcagcgagtaatctatagatgttgatttccctgagaaattatggcaataaaagttaaataatatccaagtatcattttacttcatcccatatcaagtgccaggcatagttccttgtttctttacacataaaatcttgttagagtcttggaagtagtcattattattcccactttccactgggaaagttaaggccttgaagacttaaataataattttcacaagtatacatagcatgtgacagagcctgtagaaaaattctgtttgcttatttcatagcccaagttcttaatgactgggtcataatgttccttctttcttttctcactgccttttaaaatgttgagggtacaataaaggaaattatcgaggtagtcattgtggactccactcaatttgagttctttctgctttaacatttatttttttcacattaccgtggagtctaaatatatgacatttatctggtcaatatttcataagttaaatgttttattcttgtattagcttagtattactatgagtagatattaacttagtattactatgagcctaattaatgcatagtgttatgcatttctaccttaatctttttatttttgtgcaaattttgaggagaggctttacctaggaaatgcaatatcagcatttatctacacattctgtgagcacagatggctgatgggagaagcactcacattatttcaagagtcagtagcctatggcatacaggcaaaacatgagccagtatccattgagttatggaacagttgccaccacttctttgtatctatcctcaatatatttaagaaatgcctttatctgtgagaatcaaagtcagacaggttttccttgtcttacaaatatcartgcttgcagcattatacctgtatatgtacataaaaatgtcattacatgtcaggagaataacataaaatctgaactttcgtatatccttatctttgccaattaagatggaaaggagtgagaccattggaaccctactttaaaagatttcaaaccagatttcatttcctgttctgtgtgcacgttcaggatgtaggggaaaacaaaacaatatcttttccctgcctgtcacaaggtttatgaccaacactcttatgaaaaagacagacagattcacaaaaggaaatcatgacaaatttatttaacccaagttttatgtcaaatgagagccttcagaaatgaagacctaaagatccaagaattttcatccttaagcatttgtttcataactcaatgacacttttatccttaggatccaagaagaatggacagtcatatagaagtatgattggacaaaaattaagtgtgatctaatggaattaaaggaggcagggcacttagcaaggtctgtttgttcagattcttcttggcctgcaaatatagggcagaacccctgtgaaactagagtcttatgatcttcttttaggaaaagtaagtcagagaatttctttatggctatacttcagggyagaaaggtgggagaaggtcagaatggcctcctggctacggcagttttttcarttgccaacttgacatattttggagtattatgttcagagccctgatattggcagagaaccaataaacccacaacctatgggaggaccaagaagcaacagagtggaaataaagagccctgtgcatctaactcacacaaccatagtgctaatccatatttataraaaggcaaatggagagtcatgaggacaactgtcagtcagtagtttatattaaacagggcttagtctgaatttagtggagtacagatttaaaatgacttttttccccccaattattgcttttatgctctgaagaatactcattttcagtccttaatgttatttagcactgattttatagctttgtaatcacttctcgttattgaaaattctttttattttatttatttatttatttatttatttatttatttatttatttatttttgcgatggagtctctctctgtcacccaggctggagtgcagtggcgcgaccttggctcaatgcaacctctgcctcccgggttcaagtgattctcctccctcagcctcccaagcagctgggattataggcacccaccaccatgtgcccagctaattttttatttttttatttttagtagagacgaggttttaccatgttggctaggctggtttcaaactcctgacctgagatgattggcccacctgggcctcccaaagtgctaggattacaggtgtgaggaaccatgcccagccattagagaaagctctaatgtccactgtaaagccttgatttttgtaggcacacatagctcacattctcttctctccctaggcccatgatgaaagaggagcttggaatgagagagggcaggggtttgtgggttgccttccccaatgggtagggtgaaatgggaaggctagaaaaacggcaggtcttttctgataagtttgatgatggcttgccgttgttggcttcatatggttccacttgctattggtggccttacccaggtgattatcttctatacatagttttactgttttcttaaaactgtgctcagcttcagcctttatttcttctcttttccaagggccttttggagaggaagatcttagtctctatttcacccaactgcctttctcaaagtgtgcctccttgctgatctgccatattgttagtcccatagctcattctttcttttctatgttccatgctctatagagcccagaaatgactgaggtcttgtccagatgctattaaagaccacttcctccaaggttcactgcatcactggacctatcaattctgctggaacaacctgtaaaataaaccccaaccatagcttcagaattcactagattgggagtggtctctcttttactagggtcatgtagctctctgaacacattcttctctgctctaaaggcagcaccaggataacgtgctaatttgctgtacaactgtccagctgggagagaaataccagtctctccattcagttagctcccttgtttgggtgaaggaggaaagaagctcttcatttatgagtattccataggaagggagggaaaagcctctttaccaaacaccttgcatttttcacaataaagagaagaccttaaattccgtctcatgtataacaagtcgtgtcatttcttctgaaattggagcacctttcctggtcacagaatgaatgttgagtactctactaaatcatgtctgagagagagagaggaatacaaataaacaagttacagattgtggtaagcaaagagggaactaaacagggttctcttagagaaaataactggggtggggctactttatttttattttatttttttaaagattctttttttttgttattatactttaagtctgggatacatgtgcagaatgtgtaggtttgttacataggtatacacctgccatggtggtttgctgcatccatcaacccgtcagcaattggagaagacctctctgatgaagtgatgtttcagctgagatgacaagtatggcaaagaggtagccaaggtgaagtgctgacagaattgtattccgggtacaggggaaggagatttgagaatttggtgtgtgaaaaggtatgtggtatgttattctagaatgtggcagaaggccagtatcaccagtgttttttgacagagagggagaataaggtatggtcttagaggccctgctaaaggattttgtttacattcacagtgcaatgagaaaccattcaaggatttaagcagggaagtaaaattaagtaattaaatttttaaaagaccactttgatttctcactacaaaacaaattgcagaaagcaacactgaaagcagcaagacaattaagagtctgttgaattgacagataagagatgctggtgattaggacaaggatggtggccgcggaaacagagagagggctcccacaaaattcatgtattgaagccttcaattactgcctcacatatggcctgtgaggagggaattgaagataaatgaggtcagaaaggtggggtcctaatttgataggactgatatccttataagaagagaaagaaataccagactgctctctccatgatgtaaggacacagcaaaaagatagtcatctacaagtcagcaagaacacccttatgaggaactgaccatgctggcaccttgatctttaacttcccagcctatagaactgtgagaaagagatttctgttgtttaagcctcccaggattttgttatggcagcgcaagcaaacgaaaacagatggctatatggagaattattttacagatagcactactaggatttaataatagattgcatatgcatacagatgatgaaagaaataagtcaatgatatgttctagttttatttagttatttattttactttacttgtgtatttattggtttgactatctgggtgaatgttggcaccatatactatcaattggaaaaaaaaaatagaaaaaaataagacctggctgacagaacaggggtgaatcaacaaaccaagtttgaacatttctgtttgtatgtttctgggacatacaagaggaggtatcaagtagatgtatggatacacaagtctggatcccagaaaagaggtctgggctgagatgtaaatttgagattgttggcatgcaggtcctatgtaaattaatagtaacaagtgagaccacccatgaaatgtataaagagagatgaaggccaacatttaaatataaatttaaagtaaaaatggataaacatataagaagaggaaaatcaggagactccaagaaaacagtcaacaagataataaatgcatcaagggatatttgttattttgaccagaggaattgtgaggagctacataaataaacagtattttttacagtaggtcaaaaacgaatgtaaattgaggaagggaaagaacatatatcactaaatacatatataatatcactaaattacataaatataatttatataaatatataatttatatataaatatatatgaaatatatataaattatatataatttatatatacatatataaattatatataaattatatataaattatatatacatatataaattatatattatatataaaattgtatatatttatatataaaattgtatatatttatatataaattgtatataccaatgtatatataaattgtatatataatttatatataaattgtatataacaatttatatataaattatattatttatatatagtatatataaatatatatattatatataaattatatatttatttatatattatattatttatatataaattatatattatttatatatacattatatatacattatatattatttatatatacattatatattcattagaatcttaattgtctttctgctttcactgttgtttcctaagaacatgtatcgctaatatgctaaaattacataattcataattctaccgtaacaaaaatataaaatatatattacagatacaaatatattatatataaaatataaaatgtagataaaatatatattttatattatttaatggtaaaaggaaacagataggatatagatattaaacaattgattttttgtgtgttttataaatttttgaagctatttgaaagatagacgactttagaaggtattatgcaaagataggcataatctagtaatgagaaacgttaatatttcaggagaaaagcaagggaaatgactaaattagtgacatccttaagaaagatacaagggatataatggaggactgaaaaagaatattgatttatctgtgataggatagcgattaactgcctccattttaacaggaagaatgtaaaaatgtgcgtaatcacaagaaggttcatatatttcatgaagctaggaagatgaggaagttatcaatcaatgaaatactttttttttttttttttttgagacagagtctcactctcgcccaggctggagtgcagtggcgtgatctcagctcagtgcaacctccgcctcccgggttcacgccattytcctgcctcagcctccagagtagctgggactacaggcgcccgccacyaygcctggctaatttttttttttttttctatttttagtagagacagggtttcactgtgttagccaggatggtctcgatctcttgacctcgtgatccgcccacctcggcctcccaaagtgctgggattacaggcgtgagccaccgcgcccggcctgaaatacgttgattatttaagaatgagcttccctgtcttttaagggggaggaaggtttctattcttctcgtatattcatctgtatttcagtgtttgttggacctatttttctgctagcattacactgtttaaaaattataaaataaaaaaatagatttacatgaaatgcacaaaccattattgattattatgacttattatttatcatcttttatcttctgataaaaaaagtggttgtctcttactgctacccaagtccaatagcagctcttttctaagctaaatgttatctgaagggtcaggtgaaaagatagtttttttttctttctttctctctttttttttttttttttttgagatagagtttcgcttttgtcgcccaggctggagtgcaatggcgcgtgatctcggctcactgcaacctctgcctcccgagttcaagcgattctcttgcctcagcctcctgagtagctgggactacaggcgtgtgtcaccacatccggctgatttttgtatttttagtagagacgggtttttgccatgttggtcaggctggtctcaaactcctgacctcacatgatctgcccacctcggcctcccaaagtggtgggattacaagtgtgagccaccgcacctggccagaaatggccagaaagatatttttctttcaaaaaaagtaactctacttaaatcagatgtatcaaatgaaaacaatgttagttacagtataaaaccatgttttccaaattttgtaaaacagcgactatgacttctatttattgtgacaagaaaacctgtagcatatatgttatatatatatataattgtatgtatagtattgtgtgtatgcacatatatagaaatagtataagctatgattatacaacataatttcatagaaatcagtattttatggctagtttgcataatacttagcctcaaatacacagtgaattctaggatactaagaaatatatggtatattttctaagaatttatagttttaaaggagtgataaggaagtgaataattgtaatcagtcctaaaagcatgcttaaaataaaaaaggtacacattactaaatctccccccagagctttctagaagaaatgatcttggtgaagatgagttttgaaggatatgtagaccttgagcacctataaaggtgccctaacacatcttaataataaatccaaaggcttaagatgcaaggtatatgaccagcttagaatgaatgatcgtttataattccagatggatggagagtaactgatttttctccaaatcaaatttagtttttgacaatggcatgtaacatgtacagattcattaatagcagatttgggtaccaaatctactaactagcaattaggttaactactagaaactagaaattaggtattctaataaagagacatacattaaatgtgtcttacctccataattccaatgctacaagtatttaaatatatcaagatcttccaaattcgcatcctttgccaaaagtaagtatagtgtaccagttctaaattttgcatcagatatttgcttgaaacatgtaaaatacgaagatttggcctaagcttcagttgcttcatctcatacaatattattgcattatttacaatgattgttccttttcccagatttggcaatgtggaggctccttggagattgttacttgctcccatgttggtcatgtttttcggaaggcaactccatacacttttcctggtggcactggtcatgtcatcaacaagaacaacaggagactggcagaagtttggatggatgaatttaaagatttcttctacatcatatccccaggtacacaattctgacatttttctttctctacaggagaaaataaaattgaaacatactgaatatgtgtttcattattgctgttattcttctagttaaaatattgtttattaccataatattgcagaaaacggcatatgagaaagttgtactatgaagtaaattttgatgtaaaataagaactgtatttcaaacacctaaatattatcttttttttttctcaacccaagtgttatgctggaaaattggagcaagccatacagagagatctatatttattattaactcgaattaagaatatttttaaaaatattttagtaggggaagattaaatgacttcatacagaaacaagatggaaaattatgcagatatttaaatttatatttctgaagaacatagtaaattatcaataaatatgtgtgaaaaataatatgagtaaaacgttttcatactttagttacagagaagtatatatattgaaatagaagtaaacataggctatcagtgggtggtaggattatgggtaattcttttccctatatttttatatattttctaatattcatacattacttattttaagaattgaaagtcattaaaaaggaaaaaaatgagaaaatcctattactgggtggtgggattattaatgattacattctgtataattttctagatttctgcaatagctacattacttaaaacaaaaaaagccaaaaactgaagcatttaaaaagggagaaaaataaggatacaaaaggactgtttttatataggccttatggtcattagtgtcattattgtcattattatgtaacccatcaggacaacaacaaaaatccaggcctacatcctctttctgtaatacaatctattagctggcttagaaaaggctatttgattttaattggcatgctctgatttttgaaggtatatttaagtgtcaatgaaaagagtcaaactctgtaaaacatttagagctttactctgaaccaaatttgagtgaacctggcccaaggcacagtctggagagttccagagaacatgtgcccaagatggttgggttataggttgatgttacacattttagagagacataagagacatcagtgaactcatatgagggatatattggtttggtcaagttattgtctaaatacctagactcaataggaaagagtgactgggttaagataggaggttgtggaaaccaaggttcttattatacagatgaagtatcattggtggccaccttagaggcaatagttggcaagtgtttcctattcaaacctttaaaaggtgctaaactctcagttaatcttctcaggtttgggagggactggaaggggaaaggtctagatgcagatttttcccctacaaaagatgtctttgcagggccatttcgaaatatggcaaagaaatatactttgggttccttctttatctgtcatatgtttttatgccagaatgagattggcaatgaagcggctacgttgtctggagtaaatactaggggtttgtcctctcatgccaagaaaatttaggacagggacacacacgaggagtttaggagtggaggttaaataggcagaagaaagaaaaaggaggacagccctctctctggtgagagagagggcttccgaaagggaaagaccaccagagtcggatgcgcgcgattttataggcaggcttgagggggctgatttactggggcccacagaatggttggatcaggtgcgccctttacatagagtgcgggaaggctggccaccccaccctaatcttattatgcaaatagactttccactccactggcgccatcttgtctgctccttactgtacatatggctgccaaagagaaaagggaagatggagtcgctgtttggaacatgattggcccagctgctagcatctatatctgcagttcaattttacaaactgctctttgttagaaaatgattttagggctgcttttcattaaaaaggaaaaccttactgaggactcctgtaccctcactgcctaagtaatttcatcttaactcctatatcagcgactaacccacattacacagggttaaataaacccatctaatgagattgtatggtcaatacggcatgataggaacttggacaagagaggaaaaggtccaagtttagtcctcataaggaaattcaaacttttttttttttttgagtcggagtctaactctgttgcccaggctggagtgcagtggcgtgatctcggctcactgcaaactctgcctcccggttcaagggattctcctgcctcagcctctccagtagctgggattacaggcacccgccaccatggccggctaatttttgtatttttactagaaacggagtttcaccatgttggccaggctggtctcgaactcctgacttccagtgatccgcctcagcctcgcggagtgctgtgattacaggcttgatccaccgcgcccgcaaaaacttttttatatataagtacctagaagagaaggagcagaaggagcagtatgaagtttcttattaagatccagcatcgctatataaagaatgggggcattgtatgtttaagtgtgtgattaggaaaaggactttttcacacgttttcaagcctcttctatgttaaaaagctattacgaggaacaccatttcatgcatagatgtatttccctttacagtagaaatctagtccatatgttcagagttgaattcagcaagagcatgtaatattcaaagcaaggcagtgacatttatataaccttttcattttcttttgatgatactttttgaattcaaatcattacttgtagaaatatataagttcaaatatgaataaaggagtaatggaggaaaaaagtgtgttatgtgtgattgcatgcaatgtacattcaggaatatgagtaattgagaataattgtaatcacatgtattatattcatccatgatgaatatttgtgaaaagtaatgtgctagtcttttgtataattttccactgaatgaaaaaggcagataaatgatggaaccatttctcaaattataatgaaatgaataactttagaatgtaaagcatgggaaaaaatgcctgctatctggaactaatgactttatgttgcacaatagggactgtttgtatatcctggaaagtgcagtttttacattacaataaataatatttggggttattgttttataaaatggatttatttaaatgtagaaaagtagtttgggaggcagaacaaggacttttggggaatgtgttgaagatatctaagaacttcctaaagggcgtttatgtttacgtgtgtctcagagacagtcagtgcagctaagcaatgtagaatccaccagcaatagtgtgggcagagggaggaaaccccaaacctgaaacacaaaacaatgaattgcttctccctgaaaaaggaagaatggacgcaggctagaaactagtactggatgtctaaaacaatttgagccctgggaagatttcagatcatccaaaaacagataaaacaggttgcattcaggaagtcagaaatctattatttttatgacaacaatttcagccattgttaatttaggctaaaacagcagtggtcattttaatttaaaatcaaaatcatacacttctttgctatcctctggaatttttgattttctgtttttcatcactttgggaatgggtgagtttgtaaagagagaatctggtgtgtgtgttcaggaaggaggggtgggagctacatgcattcacatccacagttagaactatatcctttactataatacacatgcacacamaaacacacacacacacacgcgtatttatgaaaaactctaaagagtttatgagtttatattgagcttctcagarcttccttaacatggtgaaataaataatacttgttctttctagaaactcctctatatatttgttaatttttccaatatgttttgtgagatttctactttttacatgtgggcttctactctgagattttattcttcacttaggcagtttctcaaacttcagtctttaagtgctgagcctttataacttgaattatgacaataacttacttactttcaatatactctataaaatatcacctgactactgtattggttggcttcaggaatgtttcagctctatctgtcttgaactgtctgggcattctttctctctttgtattccttgaagtttgataacatgggcaaaccatcatcacttcttaccatattgttttaatttttattacttgtctctatatccaaagtagttcagagacaactatttacagtgcctagcaactttcctgtcattttgtttaaaaaaattttgttgaataactggaagaatgaatgaatgaataatttttaaaagagagccacatttgtttctttctgctgaattatccatgggtgtctggtttataccagggagactcttcacaagaattgtggcaaataagcctttgtcccacctctctgatccagccctggataaggacccactgttaaaagagaggtgaagggtcttcctcataaatctcttttattattattattattattattttatactttgagttctgggatacatgtgcagaacatgcaggtttgttacataggtatacacgtgccatggtggtttgctgcacccattaacccgtcatctacgttaggcatttctcctaatgctatccctcccctaacccccaacccccaacaggccctggtgtgtgatgttcccctccctatgtccatgtgttctcattgttcacctcccactcatgagtgagaacatgcagtgtttggtgttctgttcctgcgttatatcattctgtaaccacacagcaggttctccttgcccactgcccagacatagctgatttatgaagacaggggaattgcaatagataaagactttaagtcacataaagctggctgtacaggagatcagagtttcattattactcaaatcagtctccctaaaaattcagggatcaaggtttttaaggataatttggtgggggggggggtcaagaaatggggagtgctgattagtcagagatgaaatcatagggtattgaagtgggtttttcttgcagtcttctgttcctgggtgggatcacagaactggttgagccagattacccgtctgagtggtatcagctgttgcatcaaaatgtagggtctgcaaaatgtctgcagcaatgatcttaggttttacatcacaacagtgatataatccccaggagcattttggagaggttcagaatcttgtggcctctggctgcatgactcctaaaccataatttttcatcttgtggctaatttgttagtcctacaaaggcagactagtccctaggcaagaaggtggtttgtttcagaaagggctgttattttttttttttttagcgttacactaaattcactcccaaaattagtttggcctgcacccaggaatgaacaaggacagtttggaggttagaagcaagatggagttgggtaggtcagatccctttcactgttacaataaaggcagtttcaattcctctgagttttccataggaaaagaaaattcctttggtttacatatgtgcttagggttttatgatttcaccataatcataggtacacactgtaatataatcttaccctccagggctaatacaaaagtctaacaggcacaataaaagcagacaataaaattgtctaacagagcaacataatacaagagcccacaaaccaaaataaggttacttttatacattttggtatttatatttcttaagactcccaattaatttaaagttaaaaatgagatgtataaatagcttcatgtgtgaatacctttatctgagttttttcacaatatctactatatatcctaacagtcttggcctatgctcattagccgtttggtaatattgacaaagttggtagagtctatttatgtcttctaaatagatgtgtaaataaaaaataracatactttgaaatagtgttcaagaatagatttttttttttcacatttgtttagtttgatttctggctgtcttcttaaggatgcaaatactatatagcatcaaatactatagcatcattgatttttaaagccctgtaggctgttaaassctatggcagttttcacaagtaattgagctgtttcagcttgaaccaatctgattgtcctagcaaatcctttgaagtgaagttatgtaagcaaaaactgctcttcacagaataccacattataaaaagcaacattttcttttcctcttggtcacaggtaaaaagcttaagaactttaagatagactatagtcataatactttctgtatatttgatatgctggctgttttataaatagtggttttcttttgaggggaaggtagatctctagctgtagatcaacaggcatggtgattagaagcagcagtttttatataacacccaggttcttcttcctttacttgatggacactcttgttttgagcagaaacatattaaaattaaatttaaaggatcccaaaacataccttaaaaggtatttgtatgtgacttggaaaaatacattattttttctttggcaatattgtagtttgatctgtattccagttaaacacaaaccacacaattacagaagactccttgaacttactttgaaggttaactccctattcgttaaccttttaaaaatgcttaagaaaaatcaactcaccaaaggcagcctttgttagcagcatttttgcattgttattaaagtttaaagcctatattcatttccatctcttgaaatttctatctatgaaatactagtgtttttgacatgctgatattttgaaaaatacaatatttaataaccagctctttgaatgtggggcctaatttcttctgtaagtcatgaaaatgttccaggctgattttgcaaccacattttgtttccagcaaaatgtgcagtgtgaatatttttgtaataatctaggaatattagctattggttggattaacaggaattcatctgaaaatagtatagcacttctgaaaataaagtacatttgtacccatgagttttgaacttttattttttaatacatgctttttcagcagcagcagcagccatagtatcaatgagggattgtggtatgatgaggagaaaattctaaattattttaaagtgccatgttataataacacataatgcattatttgtgtgatgccctaaaatgctaaatattgaaaataaagaatgacagctatattcatcaactgcttttccttgctacaatcaattaaaacagttttggattctataattctttaaggcattaggtcaacatttattattggtccttttattggtattctatgggtttttatttgtatttttataataaggatactgccatgctctgtcttcagttgttaagtgcttattaagttcttgtttgttactatgtcaagtaggagggactatgaacacttttaaaatgttgtctttgccgttaaagtgtgaactatctacatgagcacatgtaattagtttaaatgaaaaataagattaaatgcttaatacatgggaaacacattttcaagaattaatatgattcttakgtgaactgcttacattttcctagattcctccttctcgcccacagtcttcaaatgaatctccaactcctttcttttccaccttctaattgctctcaaatccattcatttgtctycatttccagattcaccttcatccagacaacctactgattatcctaatggggctctgtcctagtctgttttgtgttgctataacagaatatatgatgctgggtaatttataaagataaaaagtttgactcacaattctgcaggctgggaagtccaagatcaggcagcccatctggtgagggccttgtgccacttcaactcatggcagaaggtggaaggggaaatgggtatgtgcaaggagaccaaacatgagaagaaacaactcacttttgaagtaactaatccagtcttgtgagagcaagaactcactccatgagatggctttaatctattcatgagagatccactcccatgacccaaacacctcccactagggcatacctttcaacactgcaacattgggaattgaattcaacataaatttgggcaggaacaaacctcatccaaaccacagcagcctcccttctcaaagcttgcctactcctcttagagcgctgctggaggaccttcccaaaccaaattatcactggtctcttattttcctaacaaccttttaatgacttaacacaaagtcaaaagccatgaacatggccaaaaaggccctgtgagatccagtccttgcccaactttccagtcttttcttgtacactttcttcccaagaattccacatacctgccacgtggaactacattcattgggtctccaagcttaacatgctcccttttaccttgaaggttttctgtatgtctaaaaaagtatttgagtagttaatgaatactgccacctttgcttaaagtaccataatcatccacccctatcaattgggtttgatgtaattccccccagggactccagtggttcctgtaatttccctaatgtagcatttatgcatgtttcaagtatttcttacccccactaaatgatgtgaataaaaggactatatctgttttattgttttttgtttgattttgtctttagagcttactgagctcaaatctattatatttgtactattttataacctacgtcagaggcaaatgaaatatgtaagtcccaatcaccattaccatgtatccttcaaatctttttcttatgcatttacatacatatacagacacatattcatatatataaaaaaacagtattgttgtaactcctttacttctaccttaatattatgtcctgcagtgttttacatactatttgcttagaattattattccattttgtagagaaatagttttatattgcatggatatatcaaaacttatttaatcatgccaatattgataagcagttaggtaggtttcagttgtcccttactacaaaaaagttacagaaaccctcctgtaacaacttctttgtgaacccaagaggatatttctgagggatgtggaagcattaagaatgagagcactggaggcagactacctgggttaattcaaatcctgactctacttaatctctctttacctaatctctgcacttagtttgtttgctataaaatggggattataaaaatacggccttccacataaagttttttgagagttaaatgaaataagatatataaatcacttaagacaatgtctggcaagtatcaaacaattagctgttattattattcatatatattcatagaatattctaagaatatatattcatagaatattctrtgaatatatatgaatgacaacacaaagtttacttaaatttattagatcaatggatatgtagatttatattttggtagatattgtcaaaaattcttaacttcttgaagtacttttttatcactctcaccaacaatgcttgagcacttactgtatactatcaacattctagattatcaatctttttgtttttgcatatatatgtgtatagacatatatgtacatatttatttatatttgtatagataattgcacagatatatcgggggtcctgccccgataatcaygtaggttcttttctattttcctaagcgtcgactggcttgagaaataaaaggacagagtacaaaagagagaaattttaaagctwggcgtccaggggagatatcacacataggtaggatccgtgatgccccacaagccacaaaaaccagcaagtttttattagggagtttcaaaaggggagggagtatacgaataggtgtgggtgacagacatcaagtacytaacagggtaatagaatatcacaaggcaagtggagacagggcgagatcacaggaccacaggaccaaagtraaattaaaattgctaatgaagttttggcaccattgtcattgataacatcttatcaggacacagggttttgagatcaaccagtctgaccaaagtttattaggcgggaatttcctcttcctaataagcctgggagcgctatgggagactggagtttatttcacctctgcaatctcgaccataagagacaggtacgccctgsgggggccagttcagagacctacccctaggtgcgcattctctttctcagggacgttccatgctgagaaaaggaattcagcgatatttctcccatttgattttgaaagaagagaaatatggctctgttctgccgggctcaccaggcgrtcaragtttaargttatctctcttattccctgaacaattgctgttatcctgttcttttttcagggtgcccacatttcatattgctcaaacacacatsctgtacaatttgtgtagttaacgcaattattacagsgtcctgagacgatatacatccttctcggctgacaggattaagagattaaagcaaagacaggcataggaaatcacaagggtattgattggggaagtgataagtgtccatgaaatctttacaatttatgtttagagattgcagtaaagacaggcataagaaattacaaaagtattaatttggggaacyaataaatgtccataaaatcttcgcaatccacrttcttctgccatggcttcagccggtccctccgtttggggtccctgacttcccgcaacacagataatctgttttttttccccaattgctggtagcaatgaacatcttttgcaattttctaatgacattgggatttcttctgtaaagaaactagtcatcctttttattcgtatgctttgttcattttgccattgaatatttttgccttacttttatctattcatagatcttcatgtattctggtgataaattatttgtctgttatatacattgtcaaggattttctctgaggttattacatgtgtgtggtaatttgatcgatatacaaaaagatattttaaaagaatttaactgttgaagtaaagtctatcttagcctttatggcttttttggtttatacattgttaaaacaatctcccccaagtatagcacattttatgtgccccagaaatatttgttaaatgatttaggcttgagttgaacaaaattgatgttttgcttgtttgtttgatttttagtaaagtcaatggtctctccgggccataaccatgaacagaataccagaatcagatatctttccttatgaaaaggggctttgtttgtatacatggaacaaaaataaaattattagcttgacagttaaaattaaagttttaagtaaatctattaatgtgattatattacagtaattcttgaattgtatcttgaattgtattcatgaaatagaactaataagcagacggtataaatattatttgttgaatattacaaaaatattgaattgaagatgggtagaccattgcatcctcatcaactttgattagcatttcaacaattattttgaataattatgttctcaaaataattttatcataatgaaatctggatagtttccaactatttctaaagtgaatagaacttaagttctagcatatatgtacacatatgtgtatacatacacacacactatatatatatttatgcatatgtatatatatatatacacacacactagaacttaagttctattcactttagaaatagttggaaactatccagatttcatacatatacacactatatatatatatttatacatatatatacactagatatctatatacactatatttatatatgtatatatacacccagtagagagatatatatatatatacacacacacaatatatatataaatacatatatttagatggagtctcactctgacgccaggctggagagcagtggtgtgatctcggctcactacaacctccacctcccgggttcaagcrattctcctgcctcagcctcccaagtagctgggactataggcatgcatcaccatgcccagctaatttttgtatttttagtagagatggagtttcaccatgttggccaggatgatgttgatttcctgacctggtgatctgcccaccttggcctcccaaagtgctgggattacaggtgtgagccatcatgcctggacctagtatatgttgattcacagaataagtactaccttctagggttcagataccatgatcatttatatatcttgcttctgattctccttcaaagaaaacatggatacctctagtctaatcatttttttttgtatatgcaaccaatacaatagtctgaaattttatattaataaattctaccccaattggattggatgggtccttattactttccattaccctaaacctgctgaattagtcaaggtaggaaattacaaaatttttcaaattggtacaaatgatcaagaacacttatgaaaaatgcatggatttttggtcagtagttggctgagtttttgtttgatgtaggagtactacgtctgaattaaatattattcaagtacatacggaggctttattataactcctttcatctttcaacctactcttcagagtacctcagttttactagttaaatctaaggtaactaaaattgaatagcttaaaattatatgagtaattacactaaatttcaattctaatttcttaacaaaattgaagagatcactctgacacttagtagcagtcatttatataatgttattggtgtaggtgkttacacattgcagatttcttatctctcatactctcagctaagtcccccaaattagatactctggtggattgcatttgtttggatttatactcattgtcttagtctgattgtgttgctataaaggaatacctgatgatgagtaatttaaaaagaaaaaaggtttatttggctcacagctctgcaggctgtacaagaagcatggcatcagaatctgcytggcttctgataaggggctcaggctgcttccactcacggtggaaggtaaaggggagccagcatgtkcagagatcttgtagggaaagaaaggaagcaagagtgagggagatgggaagtgccagtttccttttaacaactagctctcagggaaactaaytgagtgagaactcagtcattactgcaaggatggcaccaagccattcatgagggacataccttccttcacttcccattaggcccctacttccaacattggggatcatatttcagtatgaggtttggagtgtcaaatatccaaactatagtactcatctttgcctggattccaatgttgaaacacactcttctttgcctaaattcctatgttatactcattttttggctattttaaatataatttgagttcacatctggaatgacccagctacatatactcttaggaaagtgatgcaagaatggcttaaagaattaagaaacccagtcttttctctaccaaataataatataagatggataaatttctcagatatgctaaattgtccctttaaaatagtcacttataaaaacaaaacaaacaaacaaacataccacaaacttttttacaggacattaaactctcaatgacagattatctcaggaccctaataatttacattcccttggtagccgttcttcctcaggatattaatacaaattatctagaaaataaaaattctatacttattagatatctttatcaactggaattatgagtttgagagcattgcagtaaatcttcaatagggaagaatgctagacaatggatccaagctgggatgaaaagttgcatcagggaggcagggctagggctttaaaaacagaaggggaaacaatttctgaaataagaagtttatttaacaaataagccttctgcctgattttatcagaagcactattaatgtggaattcttgatgcctaaaggctggtgcataactgccttgctatgaaatatctggtgtgaaaggtctacttaagacacatacacacacgtatacatgattcgttaacacatcctcagtgtggtaggtactaattgtatattaattgcctaaaaatgtttatgttttaattacaggaaacattcaccaaaattaaatgattgttatattttacaaattgatttaactgkagtttcaaaataatgaaagacttattgttggttacttcagttcagcaagtgaattgtaaattacatataatatttgcacactgaattaagatatattctaagcactcagggacactgataaaatgtatcaaaccggatcacaaggtcaggagttccagaycagactgaccaacatggtcaaaccctatctccactaaaaatacaaaaattagctgggcgtggtggcacaagcctgtaatcccagctactcagaaggctgaggcagtagaatcgcttgaaccctggaggcaggagttgcagtgagctgagatcgcgccactgcactccagcctgggtgacagagtgagattcagtctcaaaaaaattaaaaaaaaatttaaaaatcaaacagttaaatgtttataatttatatcgttgaaaataagataaatgaagttagaatgatactattattattactgaaaggtgttgtgtcagaattgtcattagtaagtgagctgtattatgccattttaactttctaattgttttgttttataaactttgcacattcttagtgtaacatctgtcgttaacaaaaacagagcaatacatttgaaaattgtgatcaactaggaattttgtacaacttaaaaatttagaaaattctgtcattttagcatgatttaattatgttttcaacaaaaattttttattaaaattaaggaatatagattacaagttccnaagttttcaatttttcaaagtgaacacaaaatcaaatataactaaatataaaactagctgtctcagtccattttcttttgctgtaacacaatacccgagagtgggtaaattataaagaaatgaagtttatttagctcagggttatggagattatgggaagtccaaaagcatagtgttggcctctgttgagggccttcttgctgcatcatagcatggcagagggcaagggaatgctcgtcagctcaggtctcttttcttcttcttttgccccaagtcccagtgtgggggtcttaccctgatgactttatctaatcatagttacctcccaaaggcccccctccaatcagcatataaatttgtggattaattttccaacacatgaaatttgggtgacacatttaacacattcagcctttgcctatgttatataaacaacagtgaaaggaatggagctttgacttgaaaatacaggtgggccaggtgcggtggctgatgcctgtaatcccagcactttgggwggccaaggcaggcagatcacttgaggtcaggaattcaagagcagcctggccaacakggtgaaaccccgactctactaaaaatacaaaagttagctgggcgtggtggtatgcacctgtagtcccagctactcaggaggctgaggcaggagaatctcttgaacctgggaggcagaggttgcagtaagctgagactgtgccactgtactccagcgtgagtgacaaagcgagacatctcaaaaaaaaaaaaaaaagaagaatggtgtagggtttttactaaaaggagctcttatgaggaagagcttagacatttgtacagattgagaagataagaaaatagatacaattttaaattctagatcaataagctttccagaaaatgttgtatttggaattgatttttagtgmagtaagctacaaattgagtaatatctagaaatattcaaaggctagatgttaatcttttagcgatgttctagtgagaattgaataagaagctggatttgatttcttatccaaactttctaactctaaaattctaccatcatagaaacttatatatcaatgaataaaatcacattatattttttctaatagactatattaaaatggaaagaaaatggatttcgactcagcacgagaatcttctaataaaaagcttttcaaccatgggacaggaatctttgaaagaaggcagctatacatccctgtttccctgggactcctggtttatgcttgtttctggagataatgatatatagctcctccattcactcaccacagtgtcctgatttttgaacaataaattacatagtcattctacttataaggcattgagcacactgaccctggaggtaactctctctagaatggactaagtggactgtcaaggataacaatcattctgacattgaacaggacatagactcttattcatccagattcttgtcctaccaaaatctaaaaaaaaaaaaaattatataagtcatttaggcttttgcagactatcagtttgtagataactgctctacctcaataaatttcttgatacacaagacaaatgcctttctttaaaatactacccaaaaagaggtaattaattaaaaatacgctatctctttggagataaaattatatcactgagttttgaaatttttttggaaatgtatttgctctcattttcttattaatttgtgtgattgattatccctggctttatgataataagaagtcaagttctaaatggaatactaatrtttctaagtttaaagtttgtgatacctcaaagtatctgcaaacatttctacaggaatttaaatattccaaaacgccttaaaaaacttaatgaatattacaatgcaatttagttcatgatataccattagaaagaaggaaggagtgatgaattagtaatttcacagattaaaccacaggatgtggtagcttaaagaaatttagaaattattagattagtctgggtgcagtggttcacgcctgtaatcccagcactttgggaggctgaggcaagtgcatcacctgaggtcaggagttcgagactaacctggccaacatagtaaaaccccatctctactaaaatacaaaaattagccaggcatggtggcatacgcctgtaatcccagctacttgggaagctgaggcaggagaattgcttgaacccaggaggcagaggttgaagtgagccaagattgcaccattccactccagcctggatgacagaatgaaactccatttcaaaaaaaaaaaaaaaatcgttagattaaaatatgatctgaaaaacagaaaacggccaagattagttgtttcagttattcatggaatcacccaatggttaaacatggttgtacatgcctctacattttgtctgtattttaagtatacacaygcgcgcgcacacacacgcacacacatatatatacaaatatatatacacacatatgtatacagagagcatatgataatcatccaatgaactggtaagtaaagactaattgaatattcattgtactggtaaagttcaaaatgaaggctaaatagagctatttcttttcaccacagtttttgtttacttaagtgcaagtgaggtacattaagaaaataaaaactcaacggaaaccacacataacccacgttaattgtttatatttaaacttatctgtgtaaagtatggggaaattaagaaaatagaataggaatctgagaagttaaaagtacataaaataaatgtatgcggacatttgaacaacaggagcttttgtttcacatttaaaagcatagggaaaatgaatactaatacataattcaaacaaatgagtatacaaattactgaacaattctatagtgaatgttactggaagaattggctagcattccttttgatcaatccttaatataggccaagtgtagtggcttacgcctgtaatcccagcattttgggaggccgaggtgggtggatcacttgaggtcatcagtaaaagaccagcctgggcaacgtggtgaaaccccatctctactaaacataaaaaattagctgggcatggtggtatgtgcctgtaatcccagctacttgggargctgaggcaggagaatcgcttgaacccaggaggcagaagtcgcagtgagccgagatcacaccactgcactccagcctgggtgacaaagcaagactctgaaaaaaaaaaaaagaaaaatatttcttaataatgtgatcccattttaactgaaatgttgctttgatgatactttattctaaaaatatcagttaaattgagcattagttgaacaataagcattatatcgaactagaaatattactcttttcattcagtaacatattttgatttattttgtttgtagtagttattttttcatcatttttatatacagtaatttaaactttcacttcataaaaaatgtaatcttatttgacttcttagttatagcagacataaaagaaaaactagaaacactaagtgctgacatatatatacatatccctatatattatgtatattatgcatatatatatccctcatatatcatgagtcctaattttgagtaacttatgtaataacagactattatttctatggatactgtggatctgactcttaaaaartggacatttttaagggtagctatttaccaagatgaggtttttctctgccaaatgattaagtgtacaatcagaacatatttatcctttaaagttaaagttaatggcttaccaatctagaatctgcacctttaacaatgaaaatataatttcttcattgtcaagggagaataaggaaacttggaagtcagtattaaagagcaaaagaaccacctcctaagacattacatttactaagttctattttcttccattatgctttcccatgtttagagtccttatgtattattaacatggaagtaaacagagaaagtaagcaattaattgatgggcttcttatcagccttctgagtataaattcagtagggatgttgcccagaaatgtttatttttgttaggggctacattgtgctcacagaagtctttttttccactgctgtcagtaaagtagtaaagggtggtggctgtgtgggaaaaatttccaatgcatgatgtacatgaacaatagcataaaagttgtgttttattgtagagtcactgatgtcctccatgactgaccttctccattctcacagtcccaggccttcttaatcatctttcagggatcactctagcctgccttacgcatggaccagaaaggctgaagaaggctctttcttttttctactttcagatgccatcttattctggtattgacagccagatctttctctgtataaacctaatcatccaaaatgctaattgacaatgaactttatcccaaatcagactcctagggacagtaacattgaaaagatcttcttttcaccttgtagtaacttttccaataagaattacttgatattcagattttttattttctctggtatttattggcctcattctggaaaatcctcaaatataggtgggaaaggcaatacacaggaaccatcttgggaaatgtgttagcaactggcatcacaagggtactttgctgagttgcccaggaaaatggaaagatgagaggggatacaaggatctgcagtaggcagttaagggaaagtagaacagggaggagtagaggtacaggaggaaaaaaagaccatggtgttgtaattcaggggtcagcctggctacatcatgatggacactaaaactagatgaactaagatttggaacaatagtagctgtctttcacaggtggagctttggtcatgtgactcatggtctttctttctcctatcctataatctttgtcaagtgatccctatattcccgtagctgctttcaatgaattgcattctaccatcttttaaaaatgcaatttatttgaatataaccaataactgctattccttttcatccctttgtctgtaaattaagactttaacagaaaaaaaatttaacttttttgatcaagcatgtattaatacagaaataaagtcataattcaatactagcaatgtaaccttgggcaaattacctaatatctttacactctagtttctacctctgcaaagtagggattttaatatttaccacagagaacatttgtgagtattaatgaaataaagtatgtaaagatattgaaactgtatctgagacacactaaagacttactgaattgtaaataatatattaaaaatatctggagaaaataaggaagcactggctaaggatcaaatatttgatatatgtgtgtatatygtattatgtttaaaagccattatttaaaatgtcattaagtaacatatatgttacatttttgtgcataataaaatgacacattcatttatataagcatatatttctggatttctttaaggtgatgtttcttaacctggggcagggataacaaactgaaaatctgataaagtctgtgaaattattcctaggtatatacatatttgcccaacttgatttacacaaatttggcattcatggaagctttggttcccatttatggaattcacaggagtctaagaccaaaggcctaggattctaaaggcaagaaagtaacttggaaattttgagtttgagtttactttctaaaatatgtactttttttttttttttttttttttttttttggtattctgggatactgacctaacctcacaggcattaaatattttcatttaaattggcagttgtaaaggattatttctaattccaacttcaccttctatattcttatgaaataactagcttctccaatccttttgaaatacaagaccattttctcccacttgatcatgctggtatgagtgggatgatttagcagcactcactaaagaggtgcatcttcctctgactctggccttttaaaytgggacatggcactaggagcaagagccaaaagtagaaaagacaagaggcttgctcacagagactaaaaggacaattgaataaggatgtaactgtaaactacatatcagtggcagccttggtttgaaggcgtctgactcagagtgggaaacagcttttaagtgtgttaatatcattttgtttatatttgacttttagtcctttgtatttttaatccctgactctgtcttcaaaactagtggtagtcaggttgtgttgtttgtcttggttctagttttctcttactatataacaaattaccccaaaacttagtggcttaaaataacattttattatatggcaggattctgtgggtaaggagcttaggctggactcgactggatgatttctctcccgaagccattgactaaagtccctcagtggtattcagctggcaaatgggctgttctgcaggatccaagatggctttacttacatgtctggcattttgatgtgacggctggaagacttggctgacctagaatggtcaactgaaatgtttatctgtgacttctccagaatagtaatctcggggtactcagataactttaaaggaacctggcttcccctagagcaaatgtttcaaggggcctacacaggagcacaagaattcttttgagctcatctcagaaattctaaaatgactcagattcaaggagatggattataaacgccatgtttcaaaggaaggagtagcagctgagcataatgacttctgcctgtcatcctagatacttgagaggctgaggcaggaggattcccggagctcaggagcttgaggctacagtgagctgtaattgtgccattgcacctcactgcctagtgagatcctgtctttaaaaaataaaaaaggagaggagtagcaaagtatttgtgtccatctttaacctaccacagtttttccccctaaactttgagtaaagagggttgagttctcagtttattgcacattaacattttggtccctaaatagcttatttatttgtttgctttatcccccattatagacaactattgcattttgtttaatatgtatattttatttgaatgttttactgaaaaatgtgtattgtttggggttgatttattttggattagcatgaatggcattgagttatgtatcttactactcttctttttatcatacaactttaygtggttaaaattaattccttgtttctaagtgtgcatctttgtgttgcaaagtcctcagtagtgggaatccactgcattttaactattcacccttccagtgatagttacccagagtatctccaacttcctgttaccattagtttcaacaaataacatcaataattgtctgtgttcaggcactattctaggtaaaagcagcatacgtattcttatggacatatgtccataagaatggggaaggaggatttctttctatgagcaaaagttctgagtcatagaagtttgtcagacggttttgcagcatcccagcaagtattatctcccaggtgccaattaactttgtccatggtgtttattttattaaacaagattcattttaaaaaattttaaatacccatcctattttggatatataatacattcacatgattccaaagtaaaaacaatatagcaaggtcaacatttagaaatcttagtcccatcctatctctacctactccactcttttcccacaccttgtattcatttcttctctattgttccaatgagaattcctcgattttgttgaaattgatttttttttgtcttttggtttatgctcttgaattttttttagaacatatttttagggtttttaaattattttaacattttggttcttcgtctttttattattttattgtctttaatagtctcaattaagtcttgtttctaataattttaaaattacatgcaaagggtataattttgttttattattttttactagataaaatctcaactttgtccactggaggatattcagcaatacaacatgtgatgatttcgtatatttatattgtgatatatttaacttactaattttgagaagcttcttgtgaattagttggcaaatgctacctccacatcttttatgaagctttggtccatggggatagggtaggttgatttgcatgaggagtccatggttttcctgaaaagaaggaatcatttctctccaagtttcaggtttaaagtgttaaattagggtagctacaaggaaagtaggttgcagagaaaatagggagaaccagtgagccagtcttgcctctaaatcagaaaagtggaaatagaaagagtggtcctggtgcacagarcaaaagatgaggtcactgattataactgagagcctccaggaccagatgctcaccggcaggagtgtggttgcttggcaccagccagtgagtctatttataataggtggaaattcttctgcctcaccacagtggtctggagatggtcctgagaagctccagaagtagtatgtgtttttcagtgaagagacgcaaccttatttgtaagatgtctcaccctgttaataagtttgccttgttttcttttgtttgttcatgggagacccagccttcattcttccctgagctctgcatgcagtggcactgtttcactgtagctggaatctctatcatctcatctccatgaggccaaaccttggggcatcctagttccctgtgtgagtggctcagtgagaaagtaaaaaaaaaaaatgcttcatattagagagccggggccagtttgaacaggaacatccttatccctgaacctaaacctatgcctaaaaaatgatgaggccctcctcacaggagaggaaaataccacctgttttcatggtcatcccaaacagaaaactttgcttctgttctcaatgtgaaatgattattcaaagccatcttaagctctgttaccagaattctccaccacttccacattaaaggaactagatcgggttcctccagattaaggccctcaaatacactagartatgttaaggtaaatgaggtgaggccttggaatggcatagatcttgctactactgctactggggtactacaatctcggaactgagttatatcatttgtacttgtactttttacttatattaatcatgtgtccccctaattataggtatttagatttttcttttaaccttttttctttttttaaattttaattattgtggatacataataattgtatactttgatggggtacgtgtgatgctttagtatagtcatataatgtatgtcacaaacaagagtaattgaggcatccatcacctcatgcattgtaactcatttttaaaactagatacttttatttaattatatataatcaagcatgtatttcattttttaattttactctttcaatatggtatataactagcttaggcatatagagatcagctgtgagggtaactcattcactaattctgggttctcacattagcaaaatgagcaccacttgggaacttattagacccacactccgagggcggggcccaggaagctgtgtttaataagcccaccaggtgattctacatgctctaaatttggagaaccactgtgctcatccccttgtattcagtatgtgttgtcatcatctgtgcttattagtcaggcacagtctaaggccccattccaggcccacagcatcagaatctgcattttaacaagatctctggtgattcttgtggacagttgagaaaaactagtctgataaaaattgcttgttctcatttttatctgctctggttggccctgtctggtgttgcccttctggcctctgtaataaatgcacaggtttttccaacattgaatcctttaattctaaaatcactgagcttcaaaatatgattactttatatagaaggggatttctgcaaaaaaaaaaaaaaaatacaagttaaatctgaatgtcagatcaacaataaataatattttaatgtatatatgtttcatgtgacatttgatacttggaacatagttgtacaaataaattattacttgttgatgtgaaatccaaatttaactgggaattctgtatttttatttgctacatctggaaattctacatatatatattaattatctcctaggagaaccagtaatttctgccaacatcaatatgaatatttgctaaaacagccctgtcttgttacataacaatttttccgttcctttggaaaaaaatggaatctgaaattctgatctctacttctaataagccagaatctatatccctttttatacttacaaaagataaaatcgagcttagccttattatcttaaataagaactgacctaagaatcaaaatagtctgctatctgaagctagtaagagggaaggacaaaaacaaaaatcatttttgagaagcattgtctaacacataaaaattagtatcaactaattctctgcagtaagttaaatttttcaggtgttgaggtcacattttacaactaagtcattttggttcgtccatcaggagttcctatggatgcaaatttgatactttctgctggattatttcttagaggtctgatatggttaggctttgtctccccaacccagatctcatcttgaattgaaatccctataatccccacaggtcaaggaagggaccaggtggaggtaattgaatcatggggcagtttcccccatgctgttctcactatcactatcccataatagtgagtgagatctcacgagatctgacggttttataaggggctcttcctccttcgttcctttgttcggcatttctccttcctgtcgccttgtgaaggtcgcctttgccttccaccatggttgaaagtttcctgaggtgtgcccagaatgctgaactgtgagtcaactaaacctccctcctttgcaaatacccagtctcaggtagttatttatagtagtatggaaacagactaatataaggtccctctggtcttggaggttaactggtaacacctgttctgacttattgtttttaagttaaaattgtctgctatgatccaagttggggatttgcaggttaacacaggtttggtgacagaggggaactaattcacttccctaaagaaacctcttgttggtcatccttgggcccaactctatgtagatatgaagtgcacttttatttggatggagtactctttaattttaataatacattctgaagcctgtcctgcttatctggtttccagaacttacataagtgaccttaatcaacaatatcacattactgcaatttaaactcttacacaggaatactactgatacatgctttgtattttctaccaaaagtcttacagaagacaatttaagggatacactgctaacaatgtactcctgtacatttaaagacaatcattggatcaaattagaataccagagagctgtaaatttgatattaccttggaagaatcttcctttctaaattagctttttaagttttcccttcaaattttatcaattgtcatacaagatataatttcatacattttgattttcactttatattttgttaacctcactctcctatwttatacacttgtatttgttatatttttaaaaggagcatagtatatagcacttctgtttttttattataaaaacattgatatgataaaatgcagtttaaagaattacacgaaaatgaatatctttgtccccagcatgctgttttaaaaactaggtactgattgtaccttaaaagcaccttttctgcatcttaattgtatcatgttgatcatcctgctgctagggttaagtgctatcttgaagattgtaataaactttcttttgctttctttccttattgagtttatsacacatatgtttgcttgcttttgatcttttatataactggactttatattgcactgagatttattttttgctcaacattgtttttgatactcatccacactgattcattttcactggcatataatgttctatggtgttacggtatcataatttatttttccctgctgccaattatggatatttgcattgtctcaaactatatgttattgtaaatgatgctgctgtgatcattatttttcatgttttctggtgcatagctaccagagattctctggggcttggtactgaaagtgtgcggtccagggactagcaacatcagcatcacctggatcttgttaaaaaatgctccaccctacatctactgaatcaaaatctgtatttcaaccaatcattccacggcatatacctacaggtagaattgctgaacatgtttgatttcacaagataatgcccagtgtttttctaaagttgtgccaacattacaacccacaaagtcctccttgctccaacattttctcccacagtggcattctcaggctttaaaagtgtaatgtgaaaatgagaagatgatcttgttaaaaatgtttgtatcaattctgtctgtaaatgcaattgatgtgcttctgtgcagccatcttgttcatgacattaagcatcaattatttttcagaccatcratatttcttcctcttaaaagactgctcacaatttcgttcatgttttatttgtattttatcttttccttattgaccttaaggtattctatatactttgtactactactttgttggcttatagrtgttgaaagtgtttttacccagtttgtggtttgcaatttggttccttttttctttttgttgagatgaatctagctctgtcacccaggctagagtgcaatggcgcaatctcggctcactacaacctctgcctccctggttcaagagattctcctgcctccacctcccaagtagttgggactacaggtgcttgccacaatgccaggctaatttttgtattagtagagacagggtttcaccatattggtcaggctggtcttgaactcctgacctcaggtgatctacccgcctcggcctcccaaagtgctgggattacaggcgtaagccaccatgcccagcctgaaattttattctttatgatgttgttgattaaagttatttttaaaacatagtcaaatttatcagttttttacgtggttatcagtgttttgtgctttgcttttgccagttcggtttctctggacatctagttttacacattttggaaacagaagacatggtgaatttcttatactgcaacccacttcatatcccagcagctatagttgggatgtttgtcccctcaaacttcatcttgaaatttgatcccagtgttggaggtagagcctaatgggaggtgtttgggtcatgggggtgtatccctcatgaatggatgaaatgtccttcctaggggaggggtgtgagtgagttctcactctgttagttcctgagagagctggttgttaaaaaaaagccctggcaccacacctctgcctctttccttctttctctctctcctgtgatctctgtgcagaatggctccctttcaccttctgccatggttgaaaacagcctgaggccctcaccagaaatagattctggtgtaatgccttcctacagcccacagaaccatgagccaagtaaacctcttttctttgtaaattacctggcctcaggtatttctttataaaaatattaaatagactaagacatcagccaattagttcccagtagaagtactatacacacaaggaaataatagccaaatgggaaatatcaccttatggtagccaggcagatgatatgcacccatcctcaaagcaaggagacacaatctcatctaggaacccaggctagtaaattttaaaaatgcattttaaatacagagagaatgaccagcacatgttttctaaccacaagggagcagcaagtggtggaggggctaaagcctctattcctgattgtcgagtccaggaaatccattcgttagtataacaccctcaatgaatgtttgggaactgagaccagtcaaatttgcagtgccttcttccacagccagggaacgagagaaccacaaaggcaatgaaacvaatataagtgttctcatgttcctttacctgttggccaaagctaaatatggtaagacagacagatagtaatcaccttgctccctaatttatrtacagctgatttctsttttctctcttaactgacgaggctgtgtggttaactaagagaagcttctctgattcccagcttgataatgctcctcccctgctccttctgattatccagggaccagtgatttggccattcagcacttgcttccagaaatctctgaaacagatcttaataggatattaacatttcactcagaccacgctacaccatggatcaaaaattcatagttctaaacccaagtttacagtgggttccattatgctgtctaatatagtgaacctgaaactgcaccagttcaaataacaaaatgaataatgttctaaatttaaacaacataacccttcctcacattaataagtttctactgactgttctaaaattccctttgatatcatgtaaattcaaaggaattgtagtacaacttaattttcattcacaatttatgatttccctagtctcagctggaagagtgataaggacaaaagatataggagtaaacttgaagtaattaatatgcctggacactgttttgtatgtttataaacattatgaggactttaaaacttacagctcattatacatattccctttataatatcccctttaaaatattgtgccatattattaaaatgctatgcaaaataaaaatttaatcaaggcagtggctatacatgagataaaagtaatacaagctttagagaagggggaaatatgtggcaacaagctgaaaagattatcgtctgaaataatctccactaaaaaaaatctattcagtaactacatttttttttaactgttcccctatgtctattaaaagcactcttcattgcaagtaacaagctgcctggtttggagtgtggtagaattatagctcactgcaacctccaactcctgagctcaagccatcttcccacctcagcctctccagtagctggcatcacaggtatatgccaccatgcccacacaatttttttttttwaaaatgtagagactgggtctcgccatgttgctcaggctggtctcaaactcttagccacaagttctaccttagccttccaaagtgctaggatgacaggtgtgaggcactgtgcctgtcatgaaattttcatgaaaataaatttctggggagttagttcagaagaaggtaaagctatctaattttgacaaggtaatgttaatatactattttatgtagttttgatatgtgagtttattaataaccaggatacattacatgtgggcatctgtctcagagtagtgagtactaattttaaatgactttttaaacttttttttttcttcacaaccccatatatctagctcttggaataagctgatagccacttcttgctacagaaatagaaaactgtaaatgtgttatttgtgaaagacacaagagctctggaagcaaatgcccaaggcagtctttattaaggaataaattcatttgactggtttgaataatttgaatagcaatgtgctgtctccacgtgatctatttcaggcttkaatgctgttgtactgggttgaataatttacagaaaacatttgaagctattagctctggcattcaaaataccatgcttctcatacatggatagcaatccagacacacttagcctctgtatctttatatacccttatgaccttgtcttttatctcaaaaaagtaaaaaggaaaaactggaggagaaaagaattgaggttgtccttgagtacatgtgttttataagagacagagagattgtgttttctacctctgctgagcctaaaaataacaaacataaatgctgaccttgaggccagaatgttcaaagcttggtttttacaagagttccctagttttgataaattcttgaatctcagtgagtctcctcagcaacatctgtaaaatgggaactgattctgccccttgctatcccacaaaaaaaaattgagtatctaaccaggtaagatgttaaaaagacatgatgggtggtctataaagccctcctgcatggtttaaaatgaaattaaaaaaataatattctttatgggacccatttgtctacacactgaatgctgaaaccacaagttgaggaacctctttataagacacctacctcttctagtttttcacccagcaacaaatctctccagaacatgaatctgtcttccggctatgtgagctggttgccctgtttacaaacttgccagtagctgtggccagtgcctcctctttcccagagaaatgttactgattgagcaaagttatgaaatgatatttaactcaatcctaaaggcaaatgctgaaaagccatcagttttcttatgtgataaaagcaaatgaatgaagaataagaaatctatcttctcatgtacatattttcactactttcagttatctgaatgttttgtcgtagaaacacaaaaaacccataggtgtatgcctcttggaagcttccctacacatcatatctccttttcctaatttttcctaagtagaattaatcacttcattctcagtgtttctggagaatgcttctgtagagttaccttggttttcaaatgtcacatggctttagaatgaccttttgatgagcctaccttccccccaattaaggaatgatttctaggagccccatctttttctttctgtattgccaggacctccttagccctgcacctgtgactcagtagagcctaaggacacctagaggttagaaaataaatacaagaattttcagtgattatcactgatattggagttatagttgtattcgaaactatatataaatgtrtacatatatgtaaaaaatacataaatgtttttctaagtagagacatgttttataaaagaaatatgaattattaaaatagttaaatattttattgattatacaaagtgattctgtagccagagattctagtcctgcgttaaagaacatgtataactcttttatctagaaagctttattctttgaaagtaggaaactcaattacattattgggtttgaaataatgatgtttctcattcgccatttgttgaacaaaataattgatgaaagcaaaaacaaattgcacatcttcaattgtgtaaaacattttcaatgacttgtctttcccctattttatattaatttttaattcacttgaaatagcaatgaattctttatacctgtttataaaaatggtgaaaatgtttcaaaatatcagttgggcaatgactaatagcaattataaatgcacagctcttgctattgtaaagggagttggcagcttatccctcctcctagacaaattaaaatgatgactatttctccctgttaagagaaaatgtagtagttctactaaatctgcaagtggcagctcgtgcttcatttgagactaggcttttgtttttaacaaatgaaaataatccagtgtctttgcttggatactaatcgtggaagataatgtcaaactggcctatttctacaattgtcktaacttgcaaagcttcacagacagctgagttcattatgttgaagttgtcaatcacacaggcagtcgtttatattccttttgaactctgttatgttacctcatggatgactttttttctcttctcttttatatgatgttaaaacattccattctatctcctttacaattgacattctagaaaatacccataagattttctttgccttaacagagaaatacaatactttgttcattcaactaatgttagagatatgattccttaggctaatctcaaacttttgaaatcccattttactattacattgagaatttctttctacctgccttattaaaaactataggatgcaatagcattcgacaccctgtaaattcattataaattcacatagcattcaccaagataactcatttatatctatgaaatcaatagacagcctttaaactaaactggaactgaaagtattatcaatactacagaaatttttaagctgtaaatatgatggagagagcaatgttgaatagctgatgtgggtttttagttctgatcatctaacctccactacatcaaaacagttttgtggggtccccatttcagacaaaggcagtaaccacttatttgcttgcatcagaaaacttgccatcattcttctcagttacaaactttctagcaatcactacagtttgttgtttctaacgccagaatattcctggactttgtgtatatctctccgttctcactacataggtttgggcaatcaacattgatacttggtttattataatacaccttgcatcctccaatcttctctccactccaattccttttccatgtaacagccagagtgattcattttccacctgtttccttaattcacacccagttgccctttgagataaatttcaggctgctgcttaactcttccagtgatattaaatttctcatttttggttcctagacagcatcatactcttaattctctgcagggacaaactgtgatccttctggcagaaaaactacattttcccactagtcttcttttaccctagctaacttatgctcagcataaaagtctcttcactcagaaaaactattatgagctcctacaagtattttcagaagacttcctatatgttctcttgtacattttcattctacaccctacttttcaactgcatcctaattgtttatttacttgtctttatttacttctatgtggtagcattaaagaagatttggggtataatattttcttcaactgttgaagaaaaaaaagacgagtcacgatttgacagcaaaaggcattattaatatacatttcatcataactcgaatttattgacaaatgagcagaactatctaattttcttccagctcaggactttcaactccttagccctatccaagtatctaaaataatgtmattattacaaaggcattgcagttcttttatattgttccaaatgtgttttctccccttttcagggggtggggaattttctgctttctggacaaataaaatccacttttctctcacaatcaagtttcctgttgtataggtgagttattacactgccaaaacaccaaggatattaaatacaatagactcctgggacccttctctgtaatggccctttgttgttcttctaggtagaggaaaaaacaacgtatatacattgaacattttttgttagaagttatatttatgcttcattaattataacgcgtaatattatagggattaatcaaaattatttatccaaaccctcattactaggattctcggttatgtaaatctgttataaacagcataacaatgaatatttttaaagtaaatgtttgcccattcttaacatgtaaattactagaagttaaactgctggaataagtaacaaatataaccaaaagaagcaagtttcctcttgatttggcaactttrtctcttatatttccactaagtctaaatttatgtattttttttagtgtttacaccttaggtatttacttggtactttgttagaaatcttttaggaattcaaaggtgactaatatataaaaatgcatatacctattaggattagtgacaaatacagaataccaaaagactgaatccacgtgaattgtggattagagaaataatccagtgtcatccacatataaaatttcctagcacacctacaagtctagttgattaaataagctccttgctttgtttgggattaaaagaacagactgtgtggggcaatccaaatggttaatggtagagatattttaaataatcattgcagtttatgaagaccagagccacagactgtctggtcttttgaaagtggtcctagcctaacctactcagtgatcatcaggaataccacaggcctttcccaatccagagaattagaaaccatgcccatcagtgaggactactgcattcacgtcagagatattcttggcttccagctcattcatgagaccacaggggccaatttaaatttcaaatcatcaatagggctcatttcatttagaatctcctatgaagcatggaaagaaatgcaaagttactgtgttggcaaarcattttatttaaagtatggttatatttaaataatccttttataatttaattttgaattcagaaatcctggaaaatgtccattaagcaaataataaaaccacaggtcttttttactataattataaaattagtttcacaaaggtcaaatttattttcttagtaaaagccctttgtagtaatagtaattataacttggaatttgattgtggttgtttaaagttttaatgtcctaatgcttattaaggaaatctacagtgaaattactactagttaacttagcactctctctgcagtgggacttcttgactacaaggtccttttggtacacaactgggtaaaccactgagataagaatcctaatttgttcagaatattagacttttttctggttcaattttttgaataatatctaagcagaagttattataatcagagtaacttttcaaatataccatctccaattattaatataatttttaaattgttaaattatttctctataaaaaaatatacatgtatgcctgttaaaataggcctgatatggctggcagtttctggtaaagtgccaggccccacataacaggtattccaagttagaggcaaggtttaaattgaaatgcttagttaataatttgtaaaatggaatatagtgatgcaggctcatgttagttcaatatgaagagacattgtaataccacaccaagtaaacttaaaatgtggtcttactgattacagagtaatatatgttcactgtagaaacctttctaaaaagtacttatgaatgataattgctttattggtaaattatgatgaggaaggaacaggattaagtgaagcttttagctatatttcaaatattttattttttaaaaagacagaaaactctgaagctaatatgttaaaataattgactttgttacatctagatcatgggtatatagtttaatttctccatttttgaaatgttttaaaatttaaaataaaatattttaaaacccataagcataccacatagtgataattattaacattttagtgcttagcatttcagcttttgttgtatgaatatttaaatgtacattttgttataaatatggaattataattgttaaatatttttgagcaatgtattttacatttttccataggccatatacagtaaatattaattgcccaagtcaaaataaaaatataaacacaaatctaaatttaacattcttttgggaagaaagaattgcaattttatgcatacataaagaccaggtggtctttatgtctgaagaacaagagaaaattgggggtattataaaaaagaatgttgtyggtggttggagagaaagctcatttatattagtaaagctttggggaactggcaagcttaactggtgggtgatggcagcaagcaaaattagttcctagacttgcagcaagttatctcagtagttatagataaaactggtctcaggttataacaggcagtttcagcagccagacttgcagagaatttcttttctagagcaatgctgtgtgccctgagtaccttgtccccctggcctctagactctgatttagttgagtatgataaaaataatccaatttgcatgatcaactttcacataatatatttttaacagcacactattccattaggcattttagctagctttttaaaagtagaagctgagttaattcctgcaatattggtttaagtattaccaaagtgttctacagtgtttgtaccaaattaaatacagaataaccaatttaaaatcttagtcaactttataggtgaaaagtctttcattgttttttttccctacttttttttccaatatgtggagttgtttcattgccagcgttttgaatagaaacactttcattgaggaattatgttttaaggctacctaagatttgtttcaattagggatggccagataggcagacatggaaattactatcttgaaggaggagttttactgtactcacagattcctggaaacaggaggcatgacacaccatgcagggccacatgaggcagccccasggtcagtcaggaggcagagggaggtggtaaaatgtgggcaagagcccctattgtggtttccatgagaagaaatgagcaatgaccaggtttaggatcagctagtttgaataatttccgtaggcataaggayagttcctagttgtctggtaccagggcctgggaaatttaggtctggtggataatggcctggaatttgagagccctatagagaagggtagttaaggtgtgggctctgtcatggttgctttgcatttgaaaggcaggctccctcatgagttgtctactatatctaggaattgactaacaagggtctgcagggccttatacctcaaattatcagaacatagaaaatagaaaaacatggttaatgcaaattggttttaaatatgatatttctaaatcctgagcagaggtgcataatgcactttggagaaaagaaattagaccaaagacaatacggttgtaaaaattctttattaactcattaggcaaatgtttaccaagcatctactacatattaggcattcaatcatgggcaaaatcagatccgcatcctgctcttacactctgaatttcattttcaaatacattatactggtgtggatttctcatagtttctattaaaatatttcaaaaccaagagtaactaatatgcagttggtatatctatcattatcttctgtcttctacataggatggtttctccagactttcaggtttcccttagtcttaactgtaataatactgttgtatcattggttgtttctaatttggaggaactttggataagtaacaaatttttctttcagtgactcaaaaaaatagtgggtgtactttaggttagaattaaccctgtgatgtgctttagtacttgccaccctctgttaataagaactgtgttggccaaatgtgatatttgaagtatactcgttatttggaaggaaattgctggaattttaaaatgtagttcttatagagacatgtttgattggaaataattaaatgaacataaggaatagcatttgctgtgaagttttacaaagagttttaatattgaattgtgctcagttcacacacggaaatgggtgtctactttagtgacaatggatagtaaatgattaggtttttttcarttatttaaattctgatttccaaggaatcatttgaacagcttttagtagtaaaaaactttattttgataatcaattttggttcctgagctttctctctctgtatatgacagattttctcaaattgatggcttattttgcagtgagtggctggaaaggattttatgttcaaactgctagaggtttatcagcaggtgaaatatactgtcagttgcaatgcatgttttgtaaatatatattttatgttttctaccacagaggtattttgcaggtgtattaggtcatattacacaaactgatttttaaaaatgtctattctaattctgtcttcaaaatggtagaatggaaagaatcacaatgttgtatatggctttcaaataatagactctgacatttcctaagacagccaggcatagtattatttccattggctgtgcagatctctattgctccaactctctaacttggtcaaaatatgtttccctcattctttatgttctacttgcatcttccttaatcctcttttctcatccttcttcatttatttacttatttaccttttagagacaagatctcactatgttacgcagagggcctaggactcttgagctcaaatgatcatcccacttcagcctttcctgtagctgggaactacaggtgcatgccactgtgcctggccctcctcattgataaaacatacatatattctccaaatgcaatgcaggaaaattgtttggctcttaatgtcacttcacactgagttttcttgatgatgacttcaatttaataaaatgtttttttgattcatttctttattattccgtgtgttgcctgatataatatattgctgttgatggtaaaaaggaatttttctaagtctcttcttccttttcttccatagctgaagaaaaatcattataccatcatcctaaatttagattcagaactagtcccacattaaattcatatgacaaagtccatgggacaaaaataaatatgtaaatgtaattgagttattgcctaacctaaaaagattagtgtaaaaatacatagtatcctcccttggtaatgatctaatattgaacaactaatagtttaccaaatatccttaacacgtttataagattttatccttccartaatagttaagttaggcagtcacagatatctttgttctttgtgtgtatgagtgtgtgtgtgtgtgtgtgtgtgccagtgcgctgcgcacgcctgtatgtgtgtgtagtatgtgcatgtatgtgtacatttatgcatatattcatatataatacatagatattttattcataaagataaaatttcaagtcatagacttttgaactgacccaagaaggcacacatataaagtaacatatcaagggctagaactcaacatttgtgtatcttgatttaaagtctgcactakctttttttcctttctaataaaatatacaggcatgtacaaaggaaaaaaataaagatcacccacaatgcctgtatgaaaaggtgttcacttacccagcaaatatattttaaattcctactatgccactttgctactagagagagccatagtgaaacaggtttaaaaaaatctatgctcttgtatagagttcacattctagtggcaatgatttaaatcgctaaaatgtgcaatatacattwagtgataatgtgatggaaaaaaatgaaactgctgagatggaggtgtggaatgcagtgttaaaagatccataatcagggaaggccttgttgggaaaataatgtttaagcaaaagactttgttacaaaaaaagatagtatattccagacataggtgggactgtcatgcttgaaaaatatcaaggagacccatgtgactgcagcaaagtgagaagttgtggaacatgaggtcagacagttggggaagaaggaggagaggaaaagaggcacataggccactaacatagggctttgtaggacacagcaagtactctggcatatttttctgagaaaattatctcctgttctggaaaaaggagtgacatgatgtaacttaagttgtaagaaatcactctgaatcctctatggaaaatagactgtaaatagctgagggtataacatcaagagcagttggtcttattgtgataatccaggtgagagattatgataatagtaacagatgtcatgaaatgattgtattcragatatatttcccaaagatagagccaagagtgtttgcaggttgaacagatatgtgttgtaaaacaaaacatttaaatatgactcaaagttttgagcctgaacaaacagaaggaagattgggatagaaagacttggggaggagactggtttaggaagaagattgagtctagttttggatgtgttcagtttgagatgtattcatataataaaaactcaatgtcttcatttgagtggagtccagggtttaggaaaaaagttcaggctggagatataaatttgggatccatcaatgtttagataattttaaggtcagggcacactggatgagctcaccaagagaatggaggtaggaaaaaatgatctaataagggttgagtactgaggtaattcaaagatactaacaataaaagagttaattcacctctcaaaatgtgattgagttcttaagtcagcacataagaaagacaaactgtaaacattaatcttaaactccttaaatctcctctaaatttcagtatatgtggcttggtttataccagaggttaactatggccatagaacaaatcgaggctgctgtctgcttttgttttgtttttttatggcctatgaactaagaattcgttttacatttctaaatgattttttaaaatcaaattaagtatattatatcaaaattctatcaaattcagatttcagtgttcataaaaaaaactttaattacaacacacatgcttatttgtttctgtgttatgtatgactgtctcaactctacaacagcaaagttgaataagtacaacagagactatatgtctcacaaacgctatttgctctccggccctttacagacaaatttgccaaccactggtttatacaattttatacagttgtatctatatgtacagtaaagtgtattatataattaagagtgtgcgtgtgtgtgtgtgtgtgtgtgtgcgagatttcttagggtatttaagctttaaaatatttaaagcatttttttcttatggagctcactgtttcatttgcctgaggtaagctcactgttcttagtaccatatttgaacatctgtttaccaagtacattgcaagcattgtatttagtatgaatttgccacgcccattttagagacaaagtcaaggatcagagaggtcaaaacattatgagaatacaaacttgggtggatctgggttttacatctgggatctcttttactttaccacaaaccctgtcctgccctttggagctaaacatgggggcatcagctctcgttccagccaggtctcaaggaagataccagagacttggaggatattctgagatttagatttgaaaactcagtgaaattagttttaaaaagaaaatgttaaggaattgttacctgcctcaagagatgggagctatctgtttagggaaggggaacaacttagtaaatatatatatttgcttattcataaacttgttttaagaaagtggttgtwactggagataaaatggtgaatgacacattaggaaaattttcaaactggcaagcaaacaagcaacttcattatgcaagagatacaaataggatgtgatctcataagactactattatacaatagagtgctagagcttttatttcttaaagagtatatttgagtattcattactaatgtttgaaacttacatcaagtcagtcaataaactacaggcatgcccctgtccagcatgccttttgttgcacagtttttttgacttgaaacttacctatgttgatcttgaagatccaagatcttcttgaatatgtgatctcaaatcatggctgtaacattgatatatacagtgaattaagttcatccctaactactgatataatcagaaaaggacaagagtccttccagggattttggttgaatgaaatgaggtaatagattaagaaaatatttaaaaaactttatgagctattcaagcttgggaagatagctgctctgactgtttttactgtgactaattgaacccctaagaagaacattttgcattttgagaggatatgtgattctgtcacttgtgtctatttatagatagaatatttcagcaagtggcaccttagtggcttggaaatatgaatacagctcaaaagggacactcttttctctctccttgtgagtcttatgacccattacttgatagaatatgtttctaagaaggattttatgtattctgtctctatgatctttacagattccttagtagatagtgtcattaacctcagatctagaattttctgcttttaaaacacaaaagactgtttgcaaattgcataatcacatagtaggcatttactaaatttaaagaaaattaatgctacatagttaacaaatagaaggagatcttgcctgttgactcgcctgacaaagacttccagcaaaccattatgttgttgttctgtcatccttttatcttccaactaacaaataacattctgacagtgttaaaggatatcagaatttttctgcagaaaacagccctgagctgacatcaatgctttcacaaaggaataaaataaaactgtgaagatattagcttgacatcatggggaaaaaattgttgaaatggatttacatctaaatccattatcccatttaatctttgcaaaagaccctgtgatgtaagtgttgtcttcgtttttcctatgaagattccagctcaaggtggtttaataatgcctgtggatacataattaagaaattgtggagaaacaagacctaggtcttattctagtttttgttccctttaaatgatacaatcttgcaatactaccacccccacaaccagaaaatctaaattctcttatttctagagcatctcattatgccatcactattaatcatgaattgctcaggtaagaattagtgcgaatagaatttgagaaaggtatattttgaattctagatggagggagagagaaggaaagattaattttgagcttttagaagagttaactggtaattgttgatgggatctatgcccactggaggacaccttaggactcctccaagcactgtgtggctaaaaatagggtcaaaaatataagaaactcagaatatgtggctgttgctaaaaaacaaactccacatgctttacaactttatccctaattagaaatgccttaggatccactatatggggaattgagacaacaaggacrgaaattcttaggagcagcttttgtatatctcctaaataaggctttgaaaaagaccttagataaataagtgcttcactcctaaagatattgttgattaatgagtgattcatacttgccactgctattctttcttgacctcttagtagctggaaagttcataataatcctgaaacatgtagarcaaaagaccgatggtccctgagatcaagaataacctcacaaaaggattcaagctcaccaaatggttcaacagttttccatgttccccaggttgaaggtttcctccttagaaaaagcagccataatctaggaaagttgttgctcaagagaactttctgtgataatgaaaatgttctataaatttgcactgttcactatagtagtcactagctatacctggcttctgagtgcgtaaaatgtgcctagattgattaaagaactgagttttaaattttatttactttaaatttaaatgtaattattcggacagcacacttctagaaaaaagaaagggtgatatgctagacccagagcataccctaaaattgaattgcttttgagacccactgaggaatgtttgagtgacacaaactcctaataattatagaaattcagcctcttctgggaactccacctaattctggattggagatccttggagataactcataactataggctcaggtacaaatgctcatttctattgtaaagactttcaggtgagaatttccagacaatggtctcattcacttctttagcaatcagtaggaccttttactgtaatattctcaagagaataaaagctaaagaaaatatttgtagatattatctttcctctttctactgcatccaaattatactaaatctctattcaaaatttccattttagcctatagtaacattccattcctataactgaagctcatatattaatatttttattacagtccagcatcatacaaagtatagaacctttagttctgagactcaggttcaagcctagctccagtctttactgtccctctgaattgagggtaaccatttaaccttgctcagttttaatattatctgtaaaagggaaatgatatatatatatgtcttttacagaattattgaaggaattaaataagataaatatttatgtatttattttaaataagagaaataaatgctttccaaaactaaataaataaaatgctaggaaaatgtcaacaaatataattactgtcaaccatctgtcctctctctcacagactgaaccttcttcccatttctaaagttatatcctgatacagtttggctgtgtccctacccaagtctcatcttgaattgtggctcccataattctcacatgttgtgggagggagccagtggragataattgaatcgtgggcgtggtttccccatactgttctcatggtagtgaataagtctcacgagatctgatgattttataaggagtttcctcttttgcttggctctcattttcccttgtctgccaccatgtaaagtgtaccttttgccttctgccatgattgtgagtcctccccagctatgtggaactgtaagtccattaaatgtctttcctttataaattacccagtctcagatatgtctttattagcagcatgagaacagactaatacatatcactaataatatcctatattcacatagaacactatattcacagtctgcttttaaatataagatactgcatgtatttactgcctaatgtcacctagattctctcctagaccctggtcaaatagccatgcaaattacatcttctagaaatattctgaaaatagatttgatacataattgttgtatacagtaaacaaccgtgggtttcatgtgttctcatcctggtatgaaaatttttgtcaactactccaaagctgttaatctaatatctaattattttaagtagcaattccagttaaaaataatattacctcatgcagaaaattggaaagttagggaaaatacaatgctagaaagttagcatttcattgggcctcaccaccagcaataatgattgttaaaataattaacaagtaattaatgctattatttaatttctatgcttggattaataagttctagagattttgctttgttcagtacttgtatttcctcttctatatactctgcatccttgctattgcccgtttatttgtcaggaccttagtatattgattatcaaytcatgggagcacatactgcataaaagatgatgataccacttgatctttcatatttgttataatattttattcccaatgcctttttaaagcttttaacataagttgaggatctaatttttaaatttttatgtacttaaatctgcaattatgcttctctctaaattttttctttattttgtaaattatctgctctccagtaatttgaccaattgtcagatttggtctctccataccaatatgtcacctatagatgttgttttttctcaactgtctttgctcataatattggagcaaatacaattaagagctcaaattgccagacaaagtcatagaaggaaaatgtttggtcttttcaattctgcccaacttgaaatgatggacaaagtttataatcatagattttcactgaaggcaaaagggactagccacatattgctgtaggtgtgtggtatgtgtgaccttctttcatgttcagcacaactctcagaagtagttagtattcttatttacatggtaagaaactgatgctatgagggactaagtaacattctaagatcatactgctagaaattagtggatctggcttccttatccaggttcagttggctcaaagtcagtatgctcttccctggactgtgatatttggaaggccacttaccttatcagaagtgtttttaaaaaatcaagtacattcatattaatgattctgtaataaccactaattatcaaactttactaagaagcagttcctgcttaagacctgtcatgctttatcttatttgagattgactgtaattctatagcattgtgttatatccctgtgttaaagattaggaaacagaagcccaaggtcacagaattatcaagtattggagagaggcttataatcttggtcttggttctaactcctggcgcttaaccactgtgcaatcctgcctcaaactactgtatacggtgtcatactttaaatgacttcccagtcatttgagagtgggaagaacctacccaaatgaatggctacccaaacagcttctttagcatatttgttaaattaggcacttgttatatactcacttccatttgaatagtgttaatagtgcttaatagtttctcggtgttacagtgtgctttggttggttggttggttttaagtatactttctattagtcagagattagagtcaaaagggaagaaacacccacacagtcacaggtttcctggcatgtcctagagctcctttgaaaaatgtgttcattccctcctgacaggagccctgaccccgaagtctgtcagattcataacaaagccatggcatctattttatgtttggggctggcccatctctcatgtgctatcacttgcttcccaaaggtgcatcccagcaggggaatstatttgaggaagtcccaatgtcattttatactagatggtaggaaaaccttcacaaagccctctttgtcactgttattctacaaggtcctggaaatacacttgaatatctagcgctccggagtttgcatgttattcagaggtgagcattcaggatgaaagtgcatagtcagaatcaaacagagcctttccagaagtttttaaagggtcatggaaatgaaaagactagtgaattctttcagataattctgcctttctacatttctcactagatttttagaaatgaacactgaaatttcaagataacatttgttgcaggttcactaaactaccttaaataccaaattatttaaaattaccacaacatttaaaagattgtaacaactcatatgtgctgtattaatcaaatgcaattttagagagtaccaagaatgtctccacaaatgtccacatgagcaatcgtcagtaaacaggcacgtataatccaaggagagagctataaagcaagagcctaaggatctacatttgattatcatcatcattaataattagacacataattgatgggatatgtcattagatttaccctgttaaattttcctatccatgaaatgtggataaaatacaactgttttaactggtttacaagaaaattgcaaggatcatctaagtaccacctaaaatagtttaaagcactttttaaatgaaagaaactaatttctaggttttgctcctccctgaccaaaatataaatgaacaagctataagtcttgaatcataaatatatcccttagaaactggaaaagtcagaatgttctattgcataaaatcaaattattcacaaacaacattgctgttaggtcaaacattaaagctgccacaagtcatcttttagtatgtggatgagcatggcaatttactatgatatcattcaaattgggaaaggccctagaaatggatgtaaatccaaaccctaggttgacacaggtgcagagagagaagccaggaagggrggagatggacatatccagaatcagatgctgggatgatgtccaagccagtaaacagacttaataacctaaatctctggacactgataaataagtgccattcaggcccacaggcaatataaattgggtccagtgttaagtaactcaatgttcttgcacatgtttgccaagcatggcaatgctggatggaaagcagaagtaggaccatattagaggagtccartggaagtatcaggaatctagccattagactgtgcagttcaaaaacagatgtcagttctaagtgttgctaacagcaaggtaggattttggtaacctaaagtctatgggattcaaggacaaaagaaaaaaccagaagaaatttttmtcaaaaatagaacgttagttcagagtgagaatagtagtgtctagtttattcatttgtgcattcaacaaacatccattaactcctgtgatggttaacattgagtgtcaacttgattggattgaagggtgcaaagtattgttcctggttatgtctgtgagggtgttgccaaaggasattaacatttgagtcagtggactgggcgaggcagacccatcctcaatatgagtgagcaccatttaaatcagctgccagcacagctagaataaagcaggcagaagaacgtggaaggactagactggctgactcttctggccttcatctttctcccatgctggatgcttcctgccctccaatgttggactccaagttcttcagcttttgtattcttggacttacaccagtggtttgccaggggctytcgggctttcagccacagattgaaggctgcactgtcagcttccctacttttgaggtttggggacttggactggcttagttgatccacagcttgcagacagcctattgtggaacttcaccgtgtgactgtgtcagtcaatactccttaattaactcactttcctgtatatatctatcatattagtcctatccctctagagaactctgactaatacactccctactatgtgcaaatgaatatgctagtttcagtaatgtgtggcgggggaaggtacagtagccctcatatgctcatgagggtgagcagagggcaattagcattgtgtagcagcagtggaaggcagtggggaccaggcaaaaacttaagagaacttcacacttacagcaggtgttcagtgataagtagaaactagcagttctactttgagaagaatatttagagcagagaaaatgtgtttttaaatgcctgttttattggagaacagtaaacagtttgatgttgatgaagattaaggtaggtatgggaaacgcagtggagctggtggcagggtagttggggacacaggatttgcagctgcaaagacaggaaacttagaggtctgtgaaggttcacgtgtgcsatgtaagagcctgagtctgcatcaggaagcacttgaggaggccctgaaggacttgcaacaacaaagaatgactttgcgctttggctgtgattcagtcaaagctttaatggcaagaccatggaatatcttttggaaatggtgtcataaagcttgattttattatgttgaaggatctctgagtaaagctgaatttgtcatttggaaatatgaattaactttatcatattcttcttgcatcttgttgatgtttgccgttgtgagcttcaagaactgaattgaaaaaaaaatgcaatagaccagagctctggccgggcaaggtggctcacrcctgtaatcycagcactttgggaggccgagacaggcggatcacgaggtcaggagattgagaccatcctggctaacacggtgaaaccccgtctctactaaaaatacaaaaaattagccgggcatggtggcgggcacctgtagtcccagctactctggagkctgaggcaggagaatggcgtgaaccctggaggcggagtttgcagtgagctgagatggcrccactgcagtccagcctgggcgacaaagcragactccgtytcaaaaaaaaaaaaaaaaaraaaaaaaaaaaaaaaaaaaagccagagctctattttatgagatcactctgtcacttgtatacaataaattttgtataagaccatatcgatctatgtatctatcacaaggaatagtgtaggttctaaacactttgatcaataaaacaagtagttttatatatgcatataaaaaggaagaaataaaacatattaatcaagcatagactataaaaacttctccacagggttcatttttctttgaaacaaactactagatgttttaggaaatctaatttcatgtgaagttttgctgcattttagttccatgaggaaaatttttcattcatactttttcagtgtcatttgataacaatacaaactagttcatatattcttttagagaatgtacttcacaatttgatttggttgcaatgttcataatatgctaccaaaaaattagtatcccttttaataaataagttgaagttaaaggaaatacccagtattgctgcacctgcctcaatcccatttctttacatgaaccggcctcatctgtgcactaataataaagctgaaccatggacatgccactgcagttggcctcccatagctctgcactacctgtttctgttctgggacagtttataagattatgccaagactggtttcccccaaacttgtctttgagtctcaggtagataaaacaggtatttacttttcagaaaagtaaagtccatagctatttattgaatgcttgctaatattgttaggcacagttctaggtgctgttcatgcattgtcacatgtaaggctcacagccaatgaggtaggtacttttattactcccagattacaaaggagaaatttgaggctcagacaggtgaaataacttctcaaagtcacccacagaagaagcagttgtatacaatgagcttgaattgaatgcaagttagtcaggctccatagctcataacttgccaacaccacattcttcttatactgtggtcaatactatgagaaatgtttcccacactacataagtttcttcaatgtacctcctagggttagtactttcaatgtgcctcccacttagggtacctagtcagtgtcctcactgtctttcagctctgtctactgaaatttagcctctccttggtttctgtggaatttggcaagtccagtgcagtgtctaactgggaccatctccttttggcagcatcaagttaggcttactgttagtatcctccaaacttgttgctctggtttgctggcagctggagtctagctttgacagttactcagaaatggagcattggccttttttctctagtgactcggtagttctttgaagaaagtcatgggaagaatatgagctttacactacaatgacctgaatgcaaacatcaactcagccatttattgttgtgcagcttttgtcaagtgatttgacctctttgagcctcagtttatcatctatataatggatattaaaatatatacatcattaggctttttgtcaatttaaattaaataatagaatctctstatattcatggaacccctgtatagttagcactcaatgaacctgccttgttacaactttaaaaaaattatattcacttaaaaaaatkgggtataactgaggtttacatatgaagttatgggatacatatagatagtaaaatggttattacagtgaagcagactaacatatccatcacctcacatagttacgtgtgtgtggtgtgacaggagcagctaaaatctaggtatttaagaaagatccctaatacaatacaaatttattaatagtcctcatgttgtatattacatctctagacttgttcatcctacacatctgctactttgtattcgttggtatctccccattttctctcctccaccctgggccctgttagccctagattttttctgcaagtttgacctttttattttaatttcacatgtaattgagatcatgcaacattttttctttcagtgtctggcttatttcacttagcatamtgccctctgggtccatccatgttgtggcggatggcaagatatcctttattcttgctgaataatattccattgtgtaggatgggtatatatatgccacatttcctttatccagttgactttggtygtttccatatcttggctattgtgaacaatgctgcagtgaacatgggaatgaagatatctttacaaggtggtgatttcatctccttcagatatatatcaagaagatggattgctgggtcatatggtaatctatttttaacatatttaggaaccatcatactgacttccataatagctacaccaatcaacattttcaccaacagtgtataagggttttcttctctctacccccaccaccgtttgctatcacttgtctcattgataagagccatattaatgggtgtgaggtgatatttttatagtggttttcatttgcatatccctgatgattaaacatacattttcatatacctgttggcatttttatatcttctttggagaaatttctgttcaggtcttttgcacattttttaattgggttgtttttctgctattgagttgtgagggttttaaattttgaatatcaatcccttatcagatatgtgggttacaaatatttttcccactccacaggttgccttttaattttgttttttcctttgccagacagatagatgccttttagtttgatgtagtccttttttttttttttttttttttgctgttgtagctgagcttttggtgtgatatctaaaaaatcttggccatggccatgtcagtttttcctctacgttcccttctaagacttttatggtttcagatcttacatttaagtcctttgttcattttgagttattctttctggatggtgtgaaatggtggttcaatctcactttctttttttttttgaatgtggaaactcacttytgcaagcaccgtttatsgaagagaccacccttttccccattgtgttctcttggtgcccttgttgaaaattagctgatcataaatgtttggatttatttctaggttctcttctattccaccggtcgatgtttctgtttatctgccagacatcatacttcgtgattttaaattataatttgtaaccttagtttctcacagcarttctctctactgcttcttcatgtcagggttcttctactcgaatgccagtgtttctatacatagaatttcccattgttttctctgacactaactttctacctgactggatttctgccattgcctgccataacccttcccagtcagaaattagattcagttggaattgaatcataatccatttaatttttaccttttcttttgtggactgattttggccttacaaatgaccttaagcttttcagaccccactcaactgccattagaatactacacrgcagctttgtccccacgcccagccacatgtttttcttcttcccaagctcaggttgtatagcctgtagatattcatacctgaccaagtacttttggatgtgccatctcatttaatttttgcagtaattctgttgaagcactgtaaaaggtcacatgagataacggagayttgccttttaaaaatatttagttaaaccacatgacatggctgatatytggatatctttgacctacaaaaacaatttcttaggattcaatctaatccttccttgaatatgcaagatatgagttcttaaatagttttagttcacgaagtgcatcagcacaggtacatataaatgtcacacttcattctgatattgtatttgccacactaaaatgaggaaaggcatcttatgttttcttttggcataaagcacaggattccaagggactaagatataatatgatataataaaagctcattgtagtgctgggaaaagtaagtcattcattatcattactgctaatatgtgtaactgataaccccagagtttatttataaatgtagcaagtatttctcacagcatccacaagacaatttttagttcgagaggctgcataaaatgagtactttcccaatacccatttaggcaaaattatccactcaataaaaatgttctagaactttggacactgtgttctgaggtcggattgtttttgataatagattatgaggtcatgtttttctcttgtaccagtgtaccaagaagaggatttaaattttcttagtgacaggaatctcagtctgggccttctgactttcttcctgccagtatctttaattgccatgtgttcttattgagaagaaaagttgtcatcaggttctctttgatattaaaatggtttcaaacacctcgatttgatttaatttaggtctgatattgctaagcctctactaaacacaatttcaaatgatttctctttgatcactattctattggtgagataaacttctcagaagtggcttaaaatctgtttgctttgttttttgacaaagttatctrcagatttgcccattagctttttcctattaatcaagttaatttaaatctaactgctaagtaggttttccttagaactctttttaaaaaaactgttgaagaaatgtgtctctggtggattattctgatttcctaaactcagactctaaaattgtgtgttttcatttaagagtctgagaattgctagtgttcaatttgctcagattggattttagttatgagaaatctagacacatggaaaaaagtgctttttaatcagttcttgaaatcaatatagcaataaagcaatacatgagaaattattttgaaaaaaattgtatagggtggatgtcacagagtattctacatgaatactcatttcatatcttgcatgaggtactttatcatttacactaaattattctacttaggaaacttcatcactggcacatctttttgtaaataactacctttcctcaattttatatgtccaatatattctactttaggtcagtttttcccaaacctcygccattaatttacttacctttttattacctttgccatattctaatccatatttatttgtttctttaaattgattttcaatcttcttatacttctaactgagccttaaactataaaactatatgttgatgcatatttttcaaatgtacattaaataaatactttgctgttagcacataaattgataaccatgtactacctrtagttattatgtcttccactagactagataccataggtatctgtttaggaaaagcttttggttgtcttatatgatctatataaatatagatatttgataatacctgtttttattaacctgaagatwgattgaaatgaaataaaactgtgggaacttagtgtataaaaaagaacattatatttggtattacatgaactagaagatctatcttctaattgcttttgtacctcytgcttgcaatatagttttggggacgtacatttccaaggtcaaaccagttgctgcatctacacattaaagacatagaatcattaaaataatctctaagatctcttttagctcttaactttctaggagagtcaaaaattctttgtagcactcttggatgacttatttggggcaatatgtattctaagctgcattactgctatattttgtaattaaaatattttgtattactggtgagtattaacctttaattttcatatttcatgtgagttgtcttctctttattagagttagatgtttgtcctggtgtcccagttctattcccactttctcattcaactacatgcacagtgtaagaagtggggtgctgctgacatttaaggcgtgtaaaaaggcatgcaaattatttagctagctgagtttagtcactagcaggtagtaatcatgagccattgtgcatagtggatgacaacggcgaaaatacctgacttgtatctttcctatgacattaggcaagcttatcaaatattctgatcctccatgttgtcacctgaaacaaagcttcattactgaaggatatgggycaagggatgactggtcattcactgggatagtcatgatactcatttatatcccagtatcagtcacatttgacattcagctggagygatggcagatgtagataacatcggtctttcagtgtatgcttcatggaggataatgatggtttgcagctrttatgttcaaatgggacttagaaaatagcctactaattaaatgactaaatcaaataaaactacacattttaaaatttctcctttatttaaacttagcaaattatattttttgatcttctatactgagtttctgacttactcatctcagcccaatttgtgtatatctgagctttgagtggaatgtgcccttccaaactataatacttctatagaatgtgaatatttttacacgttgcttatggaacactcaacttcttgaaattctcatctgatttgctttgctcttacacaaattacatgtgctacacatatatacattgaaacaaagccacttttccaaacagcaagttctcttaccatggaagtgtgatccagttatctttgatatttcatttctcttaaatatcttttagcaacacacatcttagaaagtgttgtcattttttataaggtgatatattttaggtgaattttcatatttgtagaaacctattttttccactcttcactaaatgaactcagatttggttactcatactaaatgctctggctaaacatcaacgaacagaaatcatttatcagtctaaaccaactttatatgcatttatagaatatattcactttcatataaaattttacaattccgtatatattaaagcactatctggactcaaaatcactaaatttgaagtttctatgtaatataataacttctaaaatgggaggtttatacaatactacaaaggaaaatcatatttggatccatgggttttatttgcttttttgattttttttcttttcaggattacaaacaataagtcttactgtttttcaaattatatccttatttgctaatttgayttacaaatgcacatgatctttgagcacattttctttgcatcattccaatgtttacgctgctaacttaactacttagatacttgccacgtacagtctctagctctttatgagaagctacaatggaagaaatgtgtgacttgcattcatagtactgtgaatctgttcactcactgaaattcactaaaaacagaacctgttttcagccattccttgtttcaatctgcattccttgtctgaataactgtaataaaataggacaaaacaaattttgatgggcaatttcatcgtagcccatctgttcggttatgctgggaggcaggaacctagtcttatctgtcctgctgtttgcagggctgtcttaataaagtttggtgaatcagaactacaaggtatttcatttacttctatgtgtattcctgtgttttgactttccttcccctgcccttcacagtggagttaaagcaggaatctagtggcatcagagataggagtctaaatgaggttgaaactagaccgggtatcctattcaaggtagtcttgaaaatagagcatcagcgggacaagtcccaggtagccactagggaaaactgagattcaaacactaggaaaccaaatatatactccaagttcaaatgacaagagaaatttaaagtgaagtttcagagccaagagtsagcaggtgggcagagaccagatcagctctggagctgatcataatccagtagggagaattgctgcctgtagcgatggttcctggaactaccattcacctactggaggcttcctagaattgaaagatcatgaaaatgtggacaactaccttaagagctaaaacgaggcaaaggtgagacttacggtcatctcttaccttcctggtaaaatttctcagatcatctgatacaatgtaagacaatctgcttgtgatccataggccactcgttcttcctccaaaatggccttgtacatgttactatattttatttgaatgtaaacacaattaccaagcagtaaataatgattttccttacccattgattagtgcatgttgatactgaagatgcattgatttgtacaagcctagcttgaaatggagcagatgggtatgtaaaggtttactcaaaatcaawgtgaattagattgctgctcctcagtaaaatgaattataagttagaatggctattttctttaacttaatgtaatagaatgctgtmtaaggcaatctgttaaggtagacttactgaaaatgtagcctttgatctcaaaaataagcattcccaaaacaacatgatttaatgagcaaagacaatattatgtctaagaaaatgtagttaaggcattgtagcaaatgtcctggaaaaatgtttgacaataaacttgttttcttttaaaaaataataatcatgttctttcgagttatacagtattacactgactgctttttttccttgattgtttgtraatattcacatatacatatgttacagtggtttaatcactgtactgctcacagtgcagcagtgctgatggatagcttttgttaaagaaatatcattaacatttatatccttgtttactgctgttgcttacaatgtaaagaaaacaataatccatttatagtccactggctgtatattcaggctttgttcattcctttaaaaagaatagtccaaccattcatgttcctgaaatattaagggaataggccattctttgtccaacttcttaaatagatctttgagtttcggaaaaactatgggggagagaaatgtgtcaaaggaagtaccacagactgttttatcycagtatagggtgctgctttcgcagaaaagcgaaaaacattcccaaataagagtatatttttgttttgctactggaattattcctcagatggcttgtgcctgtttttagagtgatacaaatttgcaacgtgtacctatgtgtggatggatgtctcataagtctattgtcataaatgtgactattcagtatawctttattgagcacgtatgttgtaccaagtaacatactgtgtactagaaatttaaagaaatagaaagcagagctcctgctttcaaggaactcagtttgatgtggcaccatgatagctctcaggcaatttaagtctatacaagaattcagagaaggaaggatgagattaatccagccaaaaagggttgaggcatttgacttgggattataaagatgaatcatactttagaagcatggggaaggggagtgaagatggggttggttaaaaacctaggaaatttgaaaacaaaaaatgaaaatacaaaacacaatttggaaagatgggttatgtaaaacaattggagcatggagtgagtggtggggaagaaagtaaagtgatcttgcataaatagcctaatttctctacatatttttcatattaaacacccaaaagaacagcttatttttgtctgatatttaagttatgtttataaagattttattgagcagaatgtgatcaacactgctggtattacaaagcataggggcatgttgtagattaatttgtatgatgtatccatatacggtttatatgcatatatagcataaacgcttccttcaagattggtatatgtgtaacctaaattagtctctagctccaattctgatactgtttaagtatgtaacattggctaagttataacatttctaaaatgtaactagacggtctataattctttcagccaaaaccttttggagtgatcttatgactttgtgattcaaggctgaatatttggaatcagactgtcctggattgaaatcctagctctcctgcttgccagttgtgtaaactttatcattttgctgtaatacagtgyattctctaatcctcaaatccctcttatataaaactaaaaatagtgtctatctcataggattgcctttagatttagtgtaaagtgcttagcccatttctgtcacatagtgagtacttaacagatgctgcctattactattgtgcgattccatactgattagtaaaagaatcatatccacttaatttctgggcctttgaatgtcaaaaactaggcctgtgtcattctaataagcatgattaggctttttaaataaacattattcacctcagtcttgggcagtgatttctcatgcttgaattttagttttggctttcctaagacttcttagtttagcttctggcactctttccaagacttatttattttggaaaactaatatgactcatctctcaagataactggcccttgactgccatacttgatttagtttgcccacagttcttggtaaaagatcctgctactactgagcccagtcccatggaatcagctctaactaagctatcacttcagacatagaagagtaaagaacaaagagtaaagaaggcaatgaagataaacaactgagtgtccacaggaactggtggcaccctattttcacaaaagaattggcattaagaattggaatggtccttggaagtttctattctaacacatattttcagagtgtaaaaaatgatcacaaattctacccccaccccmaccccaccccacatcaagaagtgagtctatctagtttctcgcttcttgagtctggactagtcttattacttgcttttctgacatayatgacatagaataaaatagagtaggttttgattctcagactaaagatttgtatatttcatctctctctctcccccacctctcctttcatcttttcctctctctctttctctttttctctcggagaatgtttagcatatgagcaagccagtttaamctattggtgggtgagagaccatgtgtagagaggtcccattcatcccagtctttctagtcaaagtcatcttaaactagccaacccccacccaacccaaaagctcttgccaaatgcaagagaaaacttgatatacaagaagaaaaaataaagcccagctaagcccagacaaattgttgacttacagaattatgagctaaaaaaactggtcattgttttatgcactaagttttgcataactgctatactaagcaatgcatgaatcacctctaaaatactgcctacaagtggccaaatagctattgcattaaggaagaaattttctccccacattcattttcatgagtgtgaggatactatatggctcaataattagcgtaggtcaacctttcaaaccctttaaagtattaaagtaatcacgtgagttttcattataacagatttaaatcacaaatgaaattgtcagtttatttttgagttaccaaawtccttacacagcttttaaagttkcattgtacactgttttgctttctcatttactttaacccagaaatactttctaagcttaagtacattcaaaacttgtttttttctcacctgattctactgatctctgggatttgttattttcagaatccattgtttgttttgctaactttttctcgcactgtattacctttcttggcttaaaaacccaataggcttggtaagccagatgtaygcctgtccaaccagctcaccccagtttgaatcactactctttcatcttctctgccttcccagtatggcttagatattctcaagccttggcttgcttccagtcttttcagaacagtattctgaattatgtctatagcatttgttttaacttttttttgtggagcggggggaagctcaaatgttctgattatttattctgtggatttctgcagtggaccagtgaggattctgcctgtcatagttatctccatcaatccatcagctaattgcacgaccttttcttaaaaatgcaattttgttgcaatcactgttctgcacactctgacccattatggtgatgaaagaaaattaaaccacattctaaaatatgaaaaaaagcaaagaacagtrtgatgaaatgaaatggttatgtctatrtgctgaaatgtaaatgtgggcaaattctttttctgtagggagtttttatgtgaagctcttttggaataaatataaaagataaagactggagttaaatagaagtgttgaattgactccccagacctatgccttccacatcatgtttatgcaattgtgttttaaagtcaatgtctatattcatctgaaaatatcacccaagtgctttatcccatctacaaaaagaatcatatttgagaactgcctagtgggtaggcatagacgtctcaatccctgtatagccttgagatgaaactatctagggggtctaaaaaatgaaagtcttcaacatatatctttcaataattattttttgtgttaagaacattaaaaatccatcatccttgaattaaaaattgcatgagctaaaaatcacacaggttatatatattgaatggaataaaatgagaagtatactatattgaccagaggtaagatactgttgtattatccttacagaatttaaatgaaatcataatttctatttataggcaagctatatggtattgagacaaggaaataatttacaactgttatagttatagaaaggttatttctaattttatctcatggagttaaaatagaaacttaattttaagttaatctcacttttgggagtgtaatagtgcaacctctttgttagcaagaatatttttaacctaactgtataaagcattaacacattgtgtaatatcacttatcctgtaggaaatcatcaaaatctgatgattayggaagactggctttacaagttcaagggagaatatctcgactccagtaaattccatcaagactgagaaaagtgtgatcacgggcagttagaaagtatagcaaattcatatccttaggctgctttctaaggatatcagtgaaaatgaaatcagacctttcttaaaatgckgttatctaacacagtattttagaattaaacttttaatctgttttcttatatgactattgagtattgttatccttcacttttgttgttttgttttgttttgttttgttttgttttgttttgttttgttttgagacggagtctcactctctctcccrggctggaatgcgatggcgcgatcttggctcaccgcaactccacctcccgagttcaagcgattcccttgcctcagcctcccaagtagctggaattacaagctcctgccaccatacctggctaatttttgtatatttagtagagacggggttttgccatgttggctaagctggtcttgaactcctgacctcaagtgattcgcccgcctyggccttccaaaagtgctgggattacaggcgtaagccacttcaccaaagagttatccttcactttttatgtacatttgcattcttgtactttttgcaaaaatataactgccagtttagcacctactagacaaactagttcaacatcgttcaattttcacatgaaaattagcatcccacctagttggggtgatcttcccattctgttcttttttcttttcaaatgagtaaaatcattaacttcatagaggctttatttatccatttatcctattcactgaacacctttaccaagtgtgttactagtttagtctctgggtttctaagaatagatacgttttttcctaagcaggtcacaatcaattgttggatataaatgattttcatacaactaattcccaagcatacccttcaatttaaaccagagcaayacagctacccaccctcaaagacaaaaggaaaaatatatttgtgctctatttataaattgccaatattttaaaaagagaatgaaaaactttgaccttatgctagaacttgccgtttttattataaaaagttccacaatttcatctgtgcattactatgattcatcccaaaattgttttaaagggtaagtattcccaataaaattaagattcaatttggaaacaatatatctatttcataaagtaaggtggacttctgtgacaagatcatcctatagatgaattgagacttgactgaagtaaggaaatgtttcttcaccagctttattcagagaaagtggcttaagtcatcgacttaggattccattgtctgcattctttcctgttagatactcagtaaatataattagattgattaactgactaaacaagtcttacttactgcatgagaagaactatctctgtaaaaggaaatctcccttagcagccaaattttctgaatgatgtcttcaatgtgaagagtaataagtattttcctccacagaaacctgacccaatatcagcctggtgaagagacctagacctctggccattagtgtgaagtcaatgctattgacaatcatcaaagattttcatcctttccactagagtacttaagaactaaatatcattgatgagaactaaagcctgttgatgtgttcctgtaattttaattaataatacattaaatttttttcctgattgtatgaacatatatcatttaacaatgatttataccaaagccattaggaaagatttagtgtcatatcacagccagttattctcttttcttcttccttacccctaaaaaatgtcccagatgcagaaagtcataatctgatattcagatatttacatttaaaaggttcctgtcttttaaagagttttcaaagttctatctttgtctaaaatatatagtttagaaaatataatgtacatgtgtattgcatatatgtatattacaaatttaaggatgtatatgtcactcgctatatatgtaattaacatatttaatcatgagcactatgccttgcatatgtagcacagcctcagmcataagtcatacctagagaggagtgtgatggaaacaaccagaacctcgtaacaagattgagtaaaccaactgacatcttttagactgagatatcaagtacaatgagttaaactgttaaagcaaattcaaatctgctccaagtgagcattaatttttaacatgtattatacatgtcacgacttctgagcagtgttaatcaggtgagaattctcagatgagaactaaggttatatgtcaaggaagcgggaatttgcgcaccgtgggaagaattcctctgtatgatggacagaaacagagttggagtccaacaatgattactgtgtggaaagtgatcaccagagaagagggaaggcggaaagtatagttacacaaaaaagcaagtctaagtttcaatcaggtgatctcaaataagtcaattccaaatgtcacttaaggtacagggactccaacaaactgtgtcaaacatttaaggtgagcatatagggactgattagactggattatgaatgatatgtaaaggaagaaataccatggaatactctcccttagaccaggttggacactgtgaaatgaatgggtttcattgttgctactttttatgttcattattttagttaaataaactccttttttwaaaaaaaattgaaattatataacagagtaaaaatagaattcactttwtacagtgtagagagtttctggttataaaacagctgagatgtaaaccataaatgaggagatgaaacataagtgattcgaacataagcaagatcattctaaaaataactatcagggaacaagggagttcaagatgttaagatcccttatctatgtggaaaaatggatgataactttgtcaatcccctctctagaaatgaaaacaaagaaaaatttaaaaatgaaaaggttattagcaaatggtccagaagtaggccaggcagtagaaagcatgattttgttagccattagttacatagagcaggttatgtacgtccctacctggaaagtcataaaacattcctgaaaatcctagctggcatttccagcaaattgtgagagaacacagtttacattctgaagcccaagaagcattgtttttttaatattatgtaccatttcactacttaccatttcaagagtataaaataacaatagaattggccttctcattctgatattttagaaaattccacattttcacggttcctattgcaaacaagaataaaatcttttggcagagcctgactataaaaagatctagaagctattcttataatgtaaaaaaagagtatgtttttatgaccttgccaatttctctattgataaagagtaggaagtgtggatatgatctataaacatatttttaaatgacaggcatagataaagaattctctgaagcagaataatttatggaacaaaagcagttaaggatgaaaacatttatcatgggaaatgggaatactgtgagtaaaaagttcaagaataaagtatgatttatgataatagagattctcacaatattttcagaactatagttgaataaaaatatgtagtatttgattgaaaaccaaaacagtggattaatgtaactagaaaagtttgggtttgggccaacagcggacattgaaatatgagtatatttttagaataaacatctatatatagctccagtgaattcactttgattaaaagataattcaatggataaattggataaaatatgtaaaaaaaaaattctctggctctgatgacaaaaaggcagtttcacagatttgctatcagaaattactttttcatagaaacctacatatatttctcttttattctgatatgagcttctcatgtgagattagtcagtgtgaaggccagtatagctcagacaaagctgaccacagcatagaaacccctgccaacactaaggtcacacccctctctggggtgtgactgaccagatgcaggcctgtctttcccaaagaaccatggctgccacttctgtgggatgaaggccttttttaatggagaatatctagtcaaatgtctccgtaatattaccttcattgttcgtagagtaaaatgtaaagggttktaacttcagaggaactgtgcacaggcagggaggtgggtgaagttgacctaatgcagagatggggagccacagctcagggtcaggtttgtcatctcttaattctgtttatgccattgacttgttattggatggtgcacaggtaattgatttatctggctaagttttcttattactaaaatgaagttaacatctgcatcatacagttataggaacagggcctgggacagaggaaactctcggtaaatgttggctattgtaattattaccttagtatgacatcctcccgaattyttcataactttttggtaactggtaagagatgttgaggggtaacaagatcctgctggggtaccattctccttgacttccttcaaaggtcagattttgctggccttaaaccacaagtcatcagtaaatgtaccattgtgttccggaattgtaaagtatctagtggaggctttaagaagacaccgagttgttgttgttgttgttgttkttttcaggattatacttaatttagtcaagacagatttcttgtgatgtaggttccgtgtcttgaataaataagtacaattctggaaaaaaaatgtttcaaataatggtaatattagggagacatataaaaaatttagggagccctaaaaagcctgagatagaattggtttcagatgacactaagtatctcgtatttccaaggtactttgggagaggcagcatggcactatagaaagagcacaaactttgtaaacagactggactaagtcctgctcacttacatgtaasctggggtaagattcatttatagaagcttcaattttcttgactgaygtaatacatatgtgcctgatttctgtgaaaattaagaaatgaatgtacaataccaaaataatacttcagtgtcagctctcaggaaaggaaaatcaaagacctctgtttaagcattgcatgtttgctgataccatgtcagtaccacacatagcttcctcaaaccatttgagtaattcttagatcctggattctcttgggttctatggtttgaatatttggcccctccaaagttaatgttgaaatttagtccatccataaggacaaagccctcatgagccagtctcctcttaaagtgccacagtagagattaagtttcaacatgaggtttagagggggcagatattcgaatcacagcaggctgctataacagaataccatagactaggtagcttaaacaacagaaattaattcctcaaagtgctggaggctgagaagaccaagattaaggtgtcaatgaagtttcattccaaagcatcttctcttggttgataggcttctcgctgtgtgctcacatgaattctttacaatgtgtgtgtagagggggagaaagatayttaaatttctgmccagtctcttgaaagatcaccttggctttcatctcataattctcacctgatccatactgttcagaagtcttaacatacataatccattttagaaatkatgtggccatgaatcctattggattggagccctgccctgagatttcattttttaaattttcctctgaaagactctattttcaaatataatcatattgggggttagtgtttcaacataygaagtttaggtgggggatacaagtcagtctcaytgaagataataaggcataattactgagggggatttatatataggtagaaaagtagagtgggaacagatcttgaaggtcttctagactagtctaaggggtttgattttatcctaagagatccaaaaatcattgaacaggtttaaaacaacaaagtctgatatgcgtttttcaaaaaattactctggtggctatgtggaatattagatgtaaagaggaaaaagcataaacaggaaaactagttaagactacttcacagtcaaaaaataacttgggtgaggacagcagtaggagaaatggcataagtgaaatgggctaagatatgacatagagttagtcaacagggtttgtgaataaagttaatgaaagggaatgatgaaatagaagcacaaagtcttctaagtttcttatgagctgctgtgtggttagaggtaccatttgctaaaatggagaagattgaaggaagaacattttggggttgggttgggctagatccagagttttgtttttagatttgttgaggtgcccttctagatattcaagtgtaggtgtcaaataggcagacttataaatcttgagttaaatcaggcttagtgttaacttaagagttatagataatatttaaatccatgtaacaatttgaaaattatagctagtatttaaatccactggactaaatgagatgccctaggaagaaagtttccattaaaacaaaagagtctcagaattaagtctcagggcacaacatttagaaggccaacataagaggaggcaccaacaaagagaaccaaagatggctataaagttagaaaaccagaagaatgtggtgtcatggaagccaagaaaagataagctagcaagaagggaataggcacctgagtgaaaccctgctgagaagggaagatgaagacaaagaagtgactatgagatcaggttacatgggaggaattggtgacttagaggagtttcaatggagtggtgttgatagaagccacctaagtgtagattgaaggcagaataggaagtgtggaaatggaaaatgacaacatatgctagtgtcccttaaccccagatccacccatggaactttagagaatttccaatgcctgatcccataccagaagtagagggatgaacttgaaagtatttttgaagctggagtatttttaatgagtttccaggtaattataatgttgctgtcaatgttgtgaatcactattatagacaaatgtttctagaagtttttgagtgtgtgtgacagcagaggggtgaccatgtggcaagaaaagtatatgttgttattactgtagttktgattgtatttttaatagaaaatacaagaggatattatgaattcatgaggaaaatcctatataaagggagagaaactgatgattcaggattaagaggaaacaatagcaaaaggaaatttcttgaggagggcagaggggacagaaactctgcataattttagaaatcacatctgatggtaacaagggtaggcattttcgttttaaccactggaggaactcaacttgcttggtttgcacctatactctgatcctgagtasggaaaggtagaaaacaaggccttaagctttttttkktgtgtgtrtgctttaattaaatcttaatttcccatagaaacattagtcttggagtcatgatcaggaggtaagtcaacatacacataaaaatactcacctatcctttatttagttaaataagaatggacaatccattaatctatttaatacagaactttccaaagtttaagtacacaagtttaaccacttatacctgacatagacaaatatataaataaaatgaaaattcaytgcctaaactgatattcaatgagttattacaacatattaggaagagatgctctcatcaagaatgggaaataaaggttacttttcagtcaatagtacagaaagctttgaagattctaaagcttaatgtcttcataaaaaattagycttttctcagattgtaaagaagttacctggatttgtaaagaaaagaagtggtttaattcaacctccagaatccaccaaattgagtgagattttattgtcacactattttgaaattcgtctagttcaagagaagaatagaatttgctcagggttgtaatccaaagaagtcaagacctcagcatatggaagaatcctctaatccccmgatgtactgattgatttgtgcggctgcaaatttttcctaacaactagaggcaatagaaaatagatttctggtccctggagccctattaagaaataagtttgcattcagatatctatgtacaaatgcattcatgccaatgtcatttgtaataatacttgcacacagataaaatttaacaatcaacgacaggggaccaatcaactaaatcatgatacttctattaggttatgatacagccattgaaatatttacaaggtgtcttttattaagaaatttcttaggaagtgaggtaaaatataaacacacaaaatatagtatgtttttagctagccgaaaaagacatacaaaataaatatcaaaggtaatgttacatatgcttatttttgggtagtgaaattgtctgtgattatcactttttattcttccctttcagcatatttgagttttcacagtgtgcatacattgcttctatatttgaaaaaaaatcattccttttacacataaacctaaatcaygaaaattgtataaactccatttactttttgcccttttcaatatgataattttaaaataagttaaaagataaactcagttttttatttaatcattaatactctgtcaaaagaattcttagaacactttcctttttaaaggacactattcctaggagctaagataactgaaattatattttggttttaaaaagtcaaaatatttaaagaagtattttaatgtcaaagtcaattagagtactgaaaacttatataaaaaatgaatcatttgcaaaaatatttcctcagttttcatacattttatggcaaaccttcaacacttatttattccagatgctaagattaagacatctggtacagtgtgaggaaacactatttaaaaagaaaaaatacattgaatttagttgtgctagtaaccaaattaagtataagaaatgttataacaaaactgagattgtattacatatatgtacttgtcatttaaattgaggcttgaatcataatggcaccagrattttctgtttccttcatctttgattctgactgtccatgtcttgatcattcaaaaccttgaagataattttaaattcaaattcaaaaccttgagagctgattgtctggttcagaccttcaatctgcttagaaaaatgttgtccaaaaagatatattatttgttgaagagcatatagacagtaagggatagaacagacaacttcatcactggactttttgccctcaaaagatcttgtataaaaatcagacctgcttttaaaataaaagagcatcccatgtttccactgctttttatattgtctttacttacatcatcattaagtcaaaagacataaaacaggttttgattgcagaatagtaacaacaaacgttttcccatattgggcacaagtcttcccttggccttgtaatagccacttaacaggtgtggcaggagtactgttttaaggactaaagattcttacagagtgtgaacaataacaaagatactcagagctctgtgggttttgtttatgttttgctttattttatttaagatttcatrcttctgagtgccattttttggtctcaagaagtgaggctaaagttgtgttcaaaatttgctacaactcctcaaagccttttgtgagtgcctccttcagacttgtcaactgagacagttcaccarttataacatgaagtactgtctttactcccagccttcttcctttcccggctttcttccttcttcactcytgtgcagtatagaattgatgttgtgacttgggagactgaaacctccattttgcaaattggtaatatgatttaattatctatattgctgaaagscattgagatacagggtgaatttctaatattcggtaagcatcattcaaatattttatctagatctccctttgttgaagaaggaatacttattaatctggagaagttgtggtagttgttgtttttcaaatcttaattaagcaytattgcctttttgtccttaaaagcatatggggagacagttaaatgagttttcaatgaaaagtgagctgatggctcttgtttagtacaaggaaaaccgatgagctgttggaagagttagaagccattaccagagataaggctctaaattaaagctgaactataaacttcaaaattgagtaaggaaaaaaaggatgggagaaccaytacctatctaattatgatgcaattcagtggcaagtatgtaaagtttatttcaagtactctaacyataccagcagaagttgtcattgcacataattgtttcattagttatgacttgtaaacacatggaaacatgattcaactgccccttttgcagtcaaagaaaagtgtggcttccctgatgaagtgttgattccatattgaggtttgaactgacaaacccagcttatactgtactttgaaatgctccaagcccagatttttatttttttaactacccttgttttaaatatctttcaaaaagacaacgagctaaataaccaatctaatagatagatagtgatttaattaacctcaatgattaaatctgatcagttatttagaatacagtcattcatttcctggacagggaaatgtaaatataatctatagtttttcacagaaataattttgttgttgttgttgagacagagtctcgctcttgcccaggctggagtgcagtggcgcaatctcggctcactgcaagctccggttcccggggttcatgccattctcttatctcagcctcccaagtagctgggactacaggcgcccgccaccaagcccagctaattttttatattttttagtagagacagggtttcaccatgttagccaggatgatctcgatctmctgaccttgtgatccgcccacctctgcctcccaaagtgctgagatcacaggcttgagccaccgcatccagccagaaaaaaattcttaagactagtaagaagacagagaggacaggcccaagataaaaagatagagctatacatagggacaaggaggaaacacagtaagtcttcactttagcatcaccctccggaaaaaccctgggctactttcctttgctcattccaggaggatctaatttagagtgtccttctttgctcattgggcgcttgcttccaaggaacgataatggacggaaagagatgtaaccactagcctgggaaatttatcactgaaaaagggcaacaagaasgtggacactaatgcaggaagacaaacaaacccacgcagccaccaagagactagcttcaagaatcaatttattcttcccattctcattcacctcatgggggtcaagacaacttgactttaataatgcgattttcaaaccacttacaaatcacgcaaactgtggtctttctgatacgctcttaggagagggactgtttttttgcacsgagggattagcaaatccgactgcatgtatgcttttgaagcagctttaagttttaaaagggaaaggcttccatctactggatactttgagtaataaagactatgagaatccacatgacagatttcyttttgtgccggcartgcataacctggcatgttcacttagaggttttgtaattcttttaaaatacattttgktggaagracgtagttgttactgaatacgttcagcttttacaaaatacaaagcccacaatatatcacaaaagagagacaaaaggaatatataatttgcccttcttttcatttggaaacaattggatggaacagttaaatacccaacaaagacattctatttgttaagaaaatccacaataagcatagctttaactggaatatgaagatggttgaaacagaatggggtgtttcagtcacctcactttttttcttttctaaaaattgtattacttttaatgagcaaatctcatcttcattagagtctgcctattttgagttcmgctacttctatttaatgacacatatttttgctaatatattgcattatatagtcagataagaacacgggtcttttcctgggcatattttgtagaygggatacatttgagctaaatcatgtaatctttgttcaagtcagcacataaagataaaaaatcttttttccagcagatagattttttaaaagaatgtaagaattaatgcctttatttaaaacaaatttagttaataaattttttaaaagtacacagagtacaacattttagtgtctgagtcttaatgaaatctcttaaatttatatagaagtcaaaattaatatcaaaattgtactgaatatcttttataccaaagaaaacaagcaaattacaggttaatagtgtcaacttttaactrtgagaatattatggcaaaaaggacaaaactgaaaaatcatgagaatttttttaattcaaactcattaatatgtaggacagtattattcgtggattttccatgtttccataaagtgaggttgaagaaataaagcagaaaaatcttaagacttgccccctaaactatagtaaatatctaaggatttgcagatgcgttctctcagctttataccttcctttataaattaataaatatataatccctcacacctagaaaagactaagtcttgctaaagcagattcctgtcagggttactgtagaacttattttgaatattcttagtaccagaacctggaatataatacaatgttaggatctacctagttcagatatatctttataattctacctgcaggattacctcaaaatagtatttttgaaaacagtgaaatgatgtgctgagaataataggcaatgtaaattgttcatatttaaatatatattagcttggtaagtatatacaacaaatattaaattacagaagatactatgataattcctctttgataaggacctaaatcttttcattcagtgatatcttttctgggttgtctgggttctgttcattgtcttttttgtgaccaagctttttyacacatttatggcccatgctgattgacaatggaaatgtttatttcatttttgcaactgaaaatttcttggcatttacagaagaaagaaaagaaagaggatggaaagaaggcaggcaggtaggaagggagggagggaggaattarccttttctttgcacttgctcctctaactaaatcaagcccagaacttctaaatataacaataaaggaagaaccgctcataggctttagtccatacattcacctcaaattattcaaatgagacttcgctaaagcctaggggagaacacaaaagaaataaaaatgaaaagttacattggcgtagttaatctgacttaaaaataatagttcattcattcatcatttattatctaatatgtcccaggcattcctctaggtcctagggatctagaagtacatgaaacagacaaaatattttttcttcattgtacttmccttctagtatgaagacagacaataaataagattatgatrgtagctgaggaaattaatagatcatgaacaggaactgggtgaagaagcaaagtcattttagatagggtagtcagagaaggcttcacagaaagagtttagtgttttgatcatatgatgctgtgacctagaggaaatcaaagctcaatctctaaagacgtgccacccttttggagtgcattcctttttggctggattatcttggctttcttccttgtgactacatttatatgacccttgtccttatggagtgcccccaacctcatatacgctgctcagatttcagacccacagactattttaccttaagttccctgtctggagaacgaacacagagaacgccaattctctgtaaaggaaacacaccacatttaagtacaacccacattcaagaggttcactgggatcgcaggaggaggctgttctgctatacttgctcaatattcagattaagaagtaatcatttatcacaaacgttactgagactccttggttgactatcttaggaatgatttgagatgtgcagccttgtgccttcacttgagacaataaggaaatacgtaactaatattttaagttagggagaaggactcacttccacacctcctgctattaggaaacgcttgagctctaggaaatatatttcaaaaccattatccatcttctctgttgtaggcaactaatktaatgtagtttacacatgcacagaattgcattttattctgcctatgtttaacaatgcagaccgcagattggttgcaacaatttgctgtcttacaaaagtatgtawcaaatgtgaatttttaagtcacagataatttttcttcgyacccattgaccaacctctcacattcctcccctcccgattctctggtatcgactcttcggctctgcttctattaaattttttttttaaatttcacatatgagtgagattaaccctgatttgatcattatacaacatatatagtattaaaacatcaaatcgtaccccrtaagtatttacaattacaatgtgtcaatggaaataatataaatatttttaaagatacttttccttgaatgaacaattgatctgcaacattttgtcatgatgcctctactttggcttggattgtcaagactcttctctcttcatttaaaatttgataaactgtractttaaaatgtttcaggcccagtctcaaggaaatttcctgttacagtacgtaaaatgaaaccataataacggcagtaatttcagaggacatagaatatgtggctagaaatacataatgtgtgcttaataaatgatgctagcccttttaaagcagaaaacaaaactacattaactatgatattaaaaaaactaaatgttatgtcattcgctcatcttagtaaaatggttaaaaattttgtattttcatatgataataaagacatatcatattgactaaggactaccaatatgtcttaataaaataaactcaccttgtaaaatgctatgtagctttctctacttttttttagagccttaaactagattttcataaaccaggttttatcaaatgttcttaacattttcttaatcttactacagactatctttaatagtagatatcatggttatgaagctgtgaatgaaaattaagatattgcttaagtgcaaataattttaaagtaattmatttttggtctattaacattgtctaatagtctcctacatattcaattccttagaaggctgtttgattctcatgtatttaaaacaaactttaaaagtaaattatctagaaactacttaaaatgtaaaaacatactgatgttttaataattaatgagtagtcctataatgtctgtgttcttaaatattgaaactcagcattggtttattgtcaaacagaaatctataattacactatgtagtaactgtacaattttaatgctgttaaaatttacaatgaattctgcaacactgccttgctgagtaactcttaactcagtaaatactgaatcctgggcaggaaaacaattgcaaarttaagtatgcatttaaaaagattaaaggaattaagattactgaaccccatgaaaatattaataaaacacttatcttaatgactgttaagtgaagtagcaaatatcttaatctatgactaaaatcactgaaaattgytttcaaatttttttatctagcagaagaaataaaattaaacttaaatatttctatttatgtctaaaaattcaaaaagtggaataaataagacagtaacctgttattagattatgaaatactttaaagtttttataactgaacaaaaggtatttatcagktttttgacacgagttaacattctttaactctcactgtgccaaatactttgtatatatcattctatttatttcctcatgataatcccatgaagtattaaaaattatatgttttacccaggagtaaagcaacttataaagggtcatatagctagcatatgatgcacctgaaatttatactcagagggatcattcacatgaatgaaattaataatctaagtctccattgcttcatggttttctccctaatgctttttagattctaggatgacattttggtaaaaggtgatagcatatcttttttaatgtagccttaaatagttatgtgttaatatttccaaaagttcaactcttaaaatatttttaatgtatatattaagaaattaaatgatgacctaaacaaccttatagtcatccttccagaatttttttcttcattttctgggagattttcataagatgaaaaaggacttaatgctatcagcatcaaaagacattccaagtgaaatctgaagacacaaaggggcaacatattgtctatcaatatgtacaaatatgtgtactaaattgccacgaacttggtggctgaaatccagacatatttattatttctcaagagtctagggatggcctagctggggcctctgcttcagggtctctcacatgcctgcaattaatgtgttgatgggggctgcaatctcatctcatggctcwactggggaakaatctgcttccaattttacatgtcagaatttagttccttggagattgtcaggctgaaacctttagtttcttgtctgtttgccagcattttcttatgtggccctctccataaggcagcctacaacatggcagtttgcttcaccaatgccagaaatgcagagagtaaatagagttcctgctaacaagatgtaatataatcatcaaagtgacacctcatcatttttgtcctattttctggattagaagcaagtcataggttctacctacactcaagggcaaggggtcacacctagacataaatatcaggaagtaggggtaatagcctttttagagtctctttgctacagaaaataatgtggaaccaaacaagtaaacaatccttggaaatagccaaataaaaaccactttttatcaataaattcccaaacaattaaaccaggaggcactttctgtaatgctcacccactcttctctatctcatttcccctacctttatatctcagctcaaagatcactttcctcagagaagacttccctgaccaccycttcctgaccaccagtgaatcagttgcctattctttgcatttattctctgtacatctctcaaatacacttgtaatctcacatttgttaatttttgtgtgggctatcttattaaatcctgattaagctgatgaggaaagaaactgtatagaggttttgtggaacattgtatccccatcacctaggacagtgtgtaacataagatgcacaacaaaacgtgagggaaggaacagaggttaaggacactaacctggaagtcaggaaaccyagtttccaatgtgggttctttcacttactagctgttctgtttcacccaagtccaatcatatttccaagcctcaggttattcatgtgtgaaaggtcattttctaatgcaaatggttggaactttgatgcaattttttgattttatactgttgttaatagttacatttttattgtattgaaattttttccccagaatcttttggcagctgctgccttcatcttttgaccagtgattttgagatatgcccaaacagtttgcaacaggcaaatttagaggataagagaagtaatgtgagaagcttaaatcaacatttgtaaattacatatattttaagaaacactcctgatgctcttcagagtttgtgcatttgaatgccacagctatgatataattcaaaatgttttcctttcccctagacaaatgaaaacctcaccagaaaacaaactacattacacacatgttgtttcctttcaagatgttggcatcctgccttccccttcagctgcccaatcccctctatggacacagagggtttgttaaattaaatggtagcatagtcctagaccaatgatatcttgaaacaaatataaagctctaaaaaagaagagaggcatgttagaattctctatgtaacagagaactagactattatgtagaagaatattttagcatcacaatagtacagctgacatgcttggcctgctttcatcatgactgaatgttacccttatttagtgattactgagaagttctcataccaagcagtgttaagttcagtttttgaagtgtatcttatgtatgcaataaataactctgcattgttttcagtatcaattctttgacatgaccagtgctagaagaagataaatactgcatgggaaacccaggagcagtatgttactctaccattccctgaagtcatatgtcaaactcatggttattgaaattttcctcatagattgttccacagttracagtgcacagtgtcctgcgggtaactaatgattctcctgtagccttttccagcttactcatttatagtagtttaggacagaaggggaaaattggttgacagttgargccatgaatactttttacaattgttctttcaatccacaaataacatgttctcttaaaacgtttttttttttttaaatataagtttctactgttcttagtagtgtgtcttaactgagagactgtggttatggaatttgtgtttttctttgttactgtgtggcatttgtgtcaaaatcaccctggtacagaaatgtagataggagaaatggcaagtgcagagaggtggggagcatcagtttcatgtttattagtactttggggttagaaaaatccacgggccaagaccttaaatgatacctctaagagtgcgattctgagacacactggaggtgaggtatagtatgctgctcattgaaaagacatctgagccagagtaagtggttgatttcccacttcrttcatctggtatacaacagaagtacacaatcccagaaaatagsctagcctactcttctgttaggagatgatgtacctcctgaggtgcatatacacaagaaaacaacagacataatgggtaacatttagtgagtatttactatgcrtgatgcactgtttgagtgttttatatgttaactcatttcataatcatagtagcactcagtaaaaggtgctattattagcactgctgtataaatagaaatctttagatgtcataaagaacattcctgctgaaaaaaaaattatatgccctatgtttacagtctgcctagatagtcaacaattgactattcatagttatttatttccttggtttgagttaacatgttccataatataatctcagatgctccttgagttactaaattgtaacaacaattcacagtagtcttcctgggtcatactgtgttttttctttactaactcataattttaaaacataattagattttcttaactgctttgcaaaacagaatgctgactaaatacagactagaccaatgcactttaataaatattaaaatattactgttatgatattcttttatcaatgaggccaactaatactttgaagccgatttttcataaacttaytgctatctatatagctatatctatatacaagagtaatataaaatatatatctgaataagtccaaatcactttttagtaagtgtaggtagtaattctaagacataaaagcaaatatatagagatatatttctaaaacatacatatatatgtgtgtcagagagagagagagaataagacagaagagagggcacatgacagagctctgcaaatagtagttcagctaatatttagagaatgtctactgacaccaggtactgttttaggaactgaatgtaaatacacatatcagcaaatatgtgtttgctaccattgtcttggtttcattaaaaatttgtgattaaaacttgttaatggaagaatttgaaaagtacatggaaggaattatgttttgttcaaaaagatttttctctaatgggatcaatttatgttttgctagtgactaatatttttggttaaatatagaaaatacaacaaagctgtgtttctcaaaatattttcagtggagcactgttgtctcaaattctggaaagyggaaaatgaatctagaaaatgtgaatgcctttggttattcatgatgcactttaccataataaataaagacacctatttaactttgttttacccattctttccattaaaatataagcagattgtaaataattaaagaataaatatatttcatctaatttagactgccatcaattgaaagatcaccattatataatatatctctaagaaaaaattgtttaaactataatgcaaaacttcctttttacctagaattactttgtccctattaaaggaactcttttagacataactaattcaaaaccagcttttaaatcatatgtcattcatgtatatacataaaaatataagcaaaggaattgatcaagcagctttatatttgcaggatgactcttttgaatcacttttcaatgcaaattaactgatgttcatgtgtttcctacccactgtcattctcagtgccattaagaagattgacaatccaggctatcttaaaatcatgattcagtattatgccgaggatattctttcaagtccctgaaaccattcaggaaatttttatcttggtacttttttattttaccagaagggatcaaaggaagctttttcaaacaacaattaagatgcattaaaatgtcccctaatttaaatggccataattatctactgaaactgcagttggctactgattttagagatgggaaaacatatttgcacatgctaaagcagtgacgactacaataaagttgctttctcaccaacagcaatggtaagatatcattgattataaaacatagcactatttcagaaaggttcaaataagatagtatgtggcatataactgaagaaacagttatatctaactagcttcctgcagcactagtgatggatggggcataattttaaagcactttaggaaatattttcgtttgtcagtcaattgcacactgaaatcttctggcttgtatttaattgtcagatcaataaagtaactcattatatatgaattcaagtttgggatcttggatcaatcacactgatgytaggtcagggagaatttgcaacgtgagtcctatcattcaagggatgataattaccatgttctgtacccaggaaaatatttccctttataggtttttcaaacttcctccagtttcatgacccattctagtagagtgaacaagagcatggattttgatattagataaaagtgaacaacatttgaycctacttctgctattttctaagtatacttaataaagttatttaaccattcaaagtcttaattctttcatccttaaaacaagtaacaataataatagataaaaatgctatatagacttaatgagaatgtgtatccaaaagtgcttactatgtagtcgggaacatgaagtcccttaagtaatagtttatctgttgttccagtacttccggtgcctaactaaaccatactactccatggagggatagatgagtgtcctctttcaataatggtccaatatggctttctacattctaaattcttatgatacatgggaagaacatagagggatacctcatcaattataaagttagcaatatttgtcagatataggaagtcagttgctaaggaaaaacacagcttttcctgcttctgagtccacaaaagaaattactcytgagatttctaataaaaacaaaatgcaaaacaatagcaacaacatgtatgataagatagtcaaaggcctcagcataacacaaaatgctggtacaataacaagtttggtgtcactatttttttttgtactgactctcaatatcttaccaagacaccagaaattcagtcttaggtcctgctggttgctgcacagaaattcaatcaccaagacratgagtattgccagggaagaagacttgaaatcagtgatgcagctgaggagatgggagatagtctcaaattcatctcctcaactgactaaaattaggggtttatatagcaggggaaaaaaatgtaaccatgtgtgggaaaacagaataagggaggagtaaagaagtggagttgatccaaaggaagcaggtggtaagtaaggcaatcatgatgggtcagtggtctgtmatctcattgtccatatgtggtgatctggtaagtttcagttccttgatactatctgggtggcctgatggttggtttcctgagaaagtactcagataagacaaatataactttctcaagtttcaagactgggagggtcagtttttatgcttattcaaaagaaatgataagcatcagttctgtgggacaattggaccagtttcaaatgaaaaccaatatcataattccaaatcctcatttagacttgataggggtcaagataatgctgaaatatacagctatatattagactgagttaattctagataaaattttgatagcctgcagactgttcagtctgtgtttgtctcaatggatatcaaattgttcttttattttaaaagactactgcaaatactcacttttcttatttcccatattctcaatgatcttggaccaagcatttgaatatgagatctttattgtcacactgatctgaagtttgaggtaattgcctagaaaactcagcctcaagacctgctgtaacttttgactgtggatattagagttaaataaattgaaagttgtctgataatcctcttcctgtgtgacagctctgtgcagaagctatgattttgtaaaattcattatctcatttttactccattaaaataaaattgtggtaataatagtaaatgataaattcaacacataatcactatgtattattagttggaatagtcaatcagccagttaatgtagttctgtccactgacatgctaatgagaacttatgagcctgggtaatttgtatggrcatagggaatagataaaaaggtagattaagggaatagttttaaatttaaaaacaacaatgataattccaagaaatcgcctaaacctctgaaacaatacagtatcatttatgtacttacaggcttattcatatttttaattgacaagttttaacagtaatcataaggcacaatgtgatgttttgagattacacatacagacacaaacagtatggaataaataaatcaagctaattaacatagccataaccttgcttacctattatttttagtgataatgtcctagttatttgaaaatacacaatgcatcgttgttgactatagtcacctgatgagcaatagatcccaaaacgtgtttctcctatctgaaattttatagtctttgattaataactcctcattcctccctcctcatgcctgtagcctgtggtaaccatcattctattctctacttctgtgagtacaactgtattagaatctacacataagtgaggtcatgtggtatttgtttttctgtgcctggtttatttcacttagcataatgtccttcagcttcattcatgttgtcaaaatgatgggattttcttcctttttaaggctaaatagtgcttcattkyatagaatacaacactctctttatctgttcatctgttgatatacatttaggttgatcccatttcttggctattgtgaataatgctgcagtgaacaagcgagtgcagatatccctttgacatattgatttcatttcctttatataaactcagaagaggaattacagtgtcatgtggtagttctatttttagttttacaaggaagstccataccacttttataatggctgtactaatttatatttccatcaacaatatctaagaattcccatttctccacatcctctccaacatgtgtcttttatatttctgataaaagtcactctaacaggtgcgagacgataccttattgtggctttaatttgcactttcctaatgattagtgatgtaagcatttatttcatgtgtttatgggccatttgaatgtcttcttttgagaaatgtttgttcacgacctttgcccatttttaatcaggtgttctcttgtttttgagttgagttcctcatgtatttcagattttaatcccttatcagatccatggcttacatttgtaggctttctcttcactttgttaattgtttcctttgctgtgcagaagctttttagttggaaaccatcaaacttgtccatttttgcttttgttgcttgtgcatttacagtcaaatcaaacaatttttgtccagacaaatatggactatttctcctgtgttttagtacttttacagtttcagatcttaaatttaaaattttaatccattttgatttgatttttatatttggtataagataagaataagatctaatttcttcttttgcatgtggatctccagctttcccaataccatttacaatttggtatttagatgcaatagaatacaataattgctagctggattaacaatggcttattattatattattttaaaaaggagaaaaatgcagattcttattcatgaagttcayaattacaattactgagagtaaataacaaaataaagtccactttctatttggaatttagaaaatatcacaaaaaaattattagcttaaactgtatatactggtctactcctgtaatgtgaatatatatcattaatatgacatacataacaaactttataatcaactgcatagttttgactgttaaaggtaaaaaggagctttatctcaattttttattatttcatatattttaattacaatagctgtayaataaacattcatgtggcttaacatttttccatattcttacatagacataattattttaatacgagagttgtattttgtcaaccagatataactttgatttgcttaagcattctttttgttttgttttgtttttgtttttgggggggtggttttttgagatgtggtctcgctctgtcacccaggctggagaacagtggtgccatctcggctcactgcaacctccacctcccgggttcaagtgatactcctgcctcagcctcccaagtagctgggattacaggcacccaccacaactggccagctaattttttggtgtttttagtagagacagggtatcaccatcttggccacgctggtgtygaactcctggcctcaagtgatctgcccacctcggcctccaaaattgctgggattataggcatgagccacmgtggccacttaagcattgtttattgaataaaaataatttcccttttaagttatgctgcaatatgtattcttgtgcatgaaattgtaagctttrgcatgcattagggtattctttcttcaggtactttgattttagagagacagaactattagacttactagacatctaytaggggaagaatttaactgaaataattattatcattgaaatgccaggggtttggtctaaggcccattgcttgcctcacagaagtccaatccctgagacaatgagtattgccagggaagaaggctttaactgggtgctgcaaccagggagacragagagcagtctcaaatccatatcctcaattgactaaaattagaggtttatatagcagcaaaaaaaatgtaattatgtgtagggaaaacaggaattagtgaggggtattaaagaggagctggtcaacaggaagcagttggttggtttaggcagtcatgatgggtgagggggtctggtgtctcactgtccagatgcagtgatctggtaagtttcagttccttcaaaatgtctgggtggcctgatagttgatttcctaagaaaggaacttggataagacaaatacaattttctcaagttttaagactgagagggtgaatttctatgtttatataaaaaaatcataaatatcagttctatgggacagttgagccagtgtcattatgatcttccatctaatatctatttaaaatttaaaacatgatttctctaaagagtgaatttaatactataatgcaatagacttactatgaataaaagacagatttttttatacttaaattcagggtgcatgtacagatttgttacatgagtaaacttgtgtcaaggaggtttgttgtacagattattttatcacctgggtattaaccctagtacccattagttatttttcctgatactctttctcctcccaccctccatcctccaatagactacagtgtgtattgttcccctctatgtgtccacatgtcctcatgagttaactcccacttataagtgagagcacgtggtatgtggttttctgttcctgtattagtttgctaaggataatggcttccagctccatccatgtccctgcaaaggacatgatctcgttcttttttatggctgcatagtattccatggtgtatatataccacatttgctttatctagtctatcattgatggacatttagctggattccatgaaaagacagcttatttaaaaaaaataggarcccawaaattttatcatttacctattaatgaaacctgcaaacctggaattaattaaaatactcttttgttggtactcattatgcatctttatttcattgtcaaagcctttacatggcttttgcaagttccattgaaagacttgccttaaaaacttatraatttttgccacagcrtgtgtcaccttctaatgtatttactgtttatttaggtctttctccagtagaatataaactccatggaggaagataattttgttttgttcacagatatatcccaagtgcctagaaaagtcccttgtacagagcttgaccacagtaaatatctgttaccttaatcttggcttggcctctgctgtctatctttagatagtcttctcttttacgctcacactctatatctttccatatgtggatttatcttacttctatattggtgtcactttcataggcctttgttgtatggtagccccaaaaactccaggcttaactcatctatacagctacccagttccagaggaaatagagtttcaactttctaatagccctagtgtattctcaagggtatgcttttattaggctgactggtttatttgcccattcctgagtcagtcattgttatctgggttatatgtaaggaattgaaatagaatgctctagttattttgggtgctaatcaaaatctggactgagcaaaagcaggatcccttggagcttgttagaaatatggaccctaaggcccccactccagaccaactgaatcaaattgcatattaactagattttctggtgatgtgcctttagtctgtgctcacagatggaactggaagagtggggaaggcaatgaaaccagccccatccaagctgaaagtgaagtgggagtggtttcccagagaaactcaagtgcttttaccagagggcagaatggatgtcaggcgtgcaaaacaacagctatccaatgcaatatatgatgtgtattaagcaattattatattccagtcattgtactaaaccttttccaggcattatttatttagtagtcacaatatcttgtaagatattatcaggtaggataccttatccttcaaaaaagataactcatcatccaaagtttttgttgagaaggcagtgagcaaagtgatctgaaatatgatatcagatagtaataagtgccatggaaaaaaattaagcacgatagagggataaagacagacctaggaagatgagagaaagtgatcaattttgataggaaggtcagaataaacctgaagaagtaaattttcagcaaagacttggaccaagtaaagaacaactcatgaaagttgcagggtaacaccattacagacagaaaaaaakaagtataaagccttgaattgttgaattatgaatgaacgtgggatgtttgaagaaatgtaaagaatgaaaaaaagtggggctagaatgaagatgttactgaaacacaggggttctgtctgtgtcctgctgcttgctgcactggaagtcaatcaccaagacaaccagtatttacagggaagaaggctttaataggttgctgcagccaaggagatgggaaatcagtctcaaattcatctcttcaactgaccaaaattaggggttgatgtagcagggaagaaatgtaaccatrtatgggaaactaggaattagggataaggaagaggaattgatcaacaagaaacaggtggttaggcaatcatgacaggtgagggggtctggtgtctcactgtccagatgcggtgatctggtaagtttcagttcctttatattatctggttggtttcctgagaaaggaacttagatgagacaaatgtaattttctcaagtttcaagaccaggagggccattctttcatgtttattcaaaagaaaccataaacatcacttctgtgggacaattgggctggtttcaaagtgagtataaatgaattcaaaaagccagccaagagctattttctaaaggatcttcaggcaatggttaagacagattcaattattcttagtgttatggaaaatcacggtmcacttttggtcaggggagtaacatgatttgatttgtattttaaatatattgactaaggaacaggcaatagtgaataaaatataggtagaggaatgtaaaatgttttggggctagttaggagactattgcaatgctagtgtaagcaagagataggagaagttaggaccaggatggtaacagtagagtggctgaggatatattgtgaagtagagccaacaggaattcctaatgagttaaaaatgtatatgtgcgagagaaagaaaattatttgtttttccttgagaaaatcagtggatatttgtgctagatactgaaatgaagaaccttggagatggagcaagttggagaaacaaatttttgacttgtcaaatttgagatgcttagtatagatcccagtaaaattattgggtaaacaattggataacctactttgaagaggtttgagttgcagataagagtttggggaacaagtaagattacatatcaaaccatggatctgaataatctaattcaggctctacagtcactaaatcatacagcacaagaaaagtctctccatcttgtagctgcacccactgggatacaagtcctcctcagtccctgtggcaaaggaaaagaaagctctcatacttgctttcctatctttaaaatcagaagtgacataacccctttctctcacagtttgttggccaggaccagttagatgtccttacctaactgcagggacctgagaaatgtggaggagtacatggagtgtttgtgaggactgttgtctcttaatatgtctcacttctaasaagaaaaacatggattcagagagaaaaagccattctcaccaaaatgttaagatagcccaccatatttttttgtacatttctaaaggtaatttagcataattatctaggattagaacaaaagcaagttgcagtggaaatgccagggggcggcttagaggtggcaggataagaaggcttttgctttattcagtaatctctataattccccattagccactttttgccaaatctgaagtggacaattaatgttttctctgacctcatataaaatggtatgcaaggccgggcgcggtggctcacgcctgtaatcccagcacttygggaggccgaggcgggcggatcacgaggtcaggagatcgagaccatcccggctaaaacggtgaaaccccgtctctactaaaaatacaaaaaattagccgggcgtagtggcgggcgcctgtagtccyagctacttgggaggctgaggcaggagaatggcgtgaacccgggaggcggagcttgcagtgagccgagattgcrccactgcactccagcctgggcgacagagcgagactccgtctcaaaaaaaaaaaaaaaaaaaaaaaaaaaaaaggtatgcaaatgaaactttaaattttcatttcaatcagataactgctcagaaaaaccttctaggactttatcttttagagcagaggttggccactgtgacccatgtgccagaaccagctcactgtccattttttaatgacccaagatctgattttaagtacttgaggaaaagtcaaaagaatagtatttcatgacgtgaaaattatgtgaaattcatatttcattgtccataaataaagttttattggaaaacacatgcacaaagaaacccttctaggaagatgttatggagccagaactaccaaatcttaacatgatgaaaaagggaggatgttgatattaaataagcyacctcaattaaatccacccacctcaaaaatgaaaacagaacagtaaaattgactattgaattaagtcctctgaagatacagtgttttgcctccccaccaggcacaatgwcatctctttatatgattttgaggaaaatgtattcaattatttcaactgtaataatacttaacataatgagaaattcttctagtgatttatttttgtaaatactaaattgttttgagcttcttattttgaaggttgcattccggattggaagttctgaatagaattatttcgaaagcaaatatttatctgtttaaaaagcccaaagaccttgttttttctgcccaaacaccagctaggaaaatcaatattttctcttggaaggaaatggtttggctgcttcagcatcagaatgctttctaataacactatggcatttaattttgaaaaaacaaaagttctgaagagacaagaaggtcggagctagtgaatgatgagttttgagtgttgctgctttggaaaatagtggcttggtaatggcattagttaaagacatttagattgtctaaacacttgctctattttagacaacaattggctggctttgttacttggttgggatagaatatcctaaatactaggccattttgtgccagcatgttgcatagtggccttaaagaagaaagttaaacattgaaatattttcagaatattctaagaataattgctgtcttgtcacagttattacttatttcaatcaaatgccaatattaatattgagcaaaccaagttgtcgtaaaattttttataaaaattagtagcattattattcctcaactagaaaacattcttttctgattttcagtggaaatattcatttaaatatcaaatattctattatgtgaaataaaattaatcatttttcatatatacatgtgaatatatttctgttcatttgtttgttagtttctttacacttagatatttgctaactttttcaaggacaatggtagcttagaataactcaataaatcaataaaaattaagtttatggtaactagatagaagttcaagaaaaagaacatatgtacagtctattacgtgaattattctatataaatttcktataaaatctacaggtggtgaataagtgactctatagggaaagtgtgaatattaacaaaaacattggcactactagaattttttattaaggagaaacagacatattacacagctcagttaagctttgattatgagatactaaataccaatttacatttagttaattaattattcaatctaagtagtacaagtacttggtgataaatatttgtatttgaaaagtcataaccaatgggagaagtgttatttatatctatttaatgtactaattcgatggtagtaaaaatccagtggagtagcagctgcatatgcaattgaatttgctggaattatgaagaagaaaactgatagcaaagtaaatgtagtaaaacagtactaaaacaaaaatagcacaaactgatttgtgtttctctgaaaaattccaggtgttgtcaaagtggattatggagatgtgtcagtcagaaaaacactaagagaaaatctgaagtgtaagcccttttcttggtacctagaaaacatctatccggactcccagatcccaagacgttattactcacttggtgaggtatgaattayttattttggttaagttataaatatattttgcaaatggagcaatttctaaggagctcagtattttttatgttatgaaaatgctgtaagggatttttaattagatctgttttaaacaacttctcatatttcaaggaccatgaagtcttcatcataaggaatcataaaaatgagcagaaattttaacattgaacaaaaaaaaaatttttttaacagttctaaagcttttggtcatttacrttcttaaaatttactgtgtaccccaaacaccttttgttcatgtgggttacaactgttattaatatttactgtatttaaattaaaactgagaactttaaaacccattttttactaattaaacgttatataataaacaattacatgttaatgtaagtaacatatttttgaaaagttaatatattttttccaagcaaaatcaagtaatgataagagagtaccattgattgtwtttttgtaaattgcattaatgtctggcttaatagaagatagctggattgtcatatgtgcttcggtattccatctattgctgcaatacaaggcagtctattacaatagcctctagaaaactcttatacactcaggagaatgtgaaagtgaaaactgcaagtaatatcttggtactataacaaaagtggtattgacrttgtagacactctgagaaccattgatctgcaccattcttttctacatatctattttatcttgaaatacaaaaatgacttcattataactatacaaactgtatataatgtatgtataatatataatatattcatactatagataattatatataatatattcctgtattcatctcatagattgatgattatatataatatattcctatatagcatatatatctcaattggtcaaaacaagaattatatttcctttatgaattatatcctccatattgataattttccactgaataggaatcaaagctaccttaatattggttgtgattaaagcatttcaagagcaataaataggccgggagcagtggttcacgactgtaatcccagcacttcgggaggccaaggcaggcggatcatgaggccaggagatcgacaccatcctggctaacacagtgaaaccccgtctctactaaaamtwcaaaaaaaaacttakccaggcgtggtggcaggcacctgtagtcccagctactcgggaggctgaggcaggagaatggtgtgcacccaggaggtggagcttgcaatgagccgagatcgcgccattgcactccagcctgggcgacagagtgagactccaacgacaacaaaaataaaagcaataaatatgcacttaggaaataattatcaagtaaacatattcttagatttaaaatgccattgttgtagaccataatggtagaatatctgaaaatgtatatggtttaatctaatacttttttgggtcatctgccttaatgctctgtaactttataaacatatcttacttacaattaactagaaaaaatgaaagaaaaaaatacttgaggtgactggaaccctagctgaatcgtttttaatgactgatttaagtgccatattcatgccttattgtccaagtctccacttcctcattrgccatgtaaatatctctctatagagcttgatttacatatatttaactttcatctgaataatgtagtgaaaaatttcatgtgtaatagcattgattttaccactttctaagtgtatgactttagactagtcacttagtcccgtacctcaaagtatttttttgtttgtttttattggagaaggaggtattgttgctatcattttcaaatgtgtaacatcctcatgttggcactgatctcacagggatttatatttaatgcagaaaatatactacagtgctttttaaaatagaatagtctttgcatgttagttattacaaatcactgaagatctctgataaaatatytaatacccttatcactttattgaaaatttgtttgaacattcatgaacctgactatatcctcagaagaaaggagtttttctgttcttcttataaaatgtttctgtcactgttgtcagtggacccaaatcattagtaaacatcgattccyttttctaaaaggaggaatgaccaagggctataacaggacagaaatgagcaaagaggacttttggaaatcctctggggccaccaaggtgactcctgagaaagactcagggctctgtaamagaaytagatgtttagttccaagttaaaaatccaattttatgctgtcctgcactatatcaaggaaacctaattcactttctaaaatgtaaaaataaaatatagtgtgggcaaattcctttgtacaaactactgatttcaaattagctatcttctaaatggatcaggtgaccatattttaatctgtagaaatactttaggaaaagattttaaagagaggaattgagcctttcatagcatctaaaagaggcagtatggtgtattgaaaacattccagccccygaagtcaagcataggagggttcaaatcctagccttacagctttcattttgagtggcattaagtatcctctctactacctctgtcaacagaataaagataataatactgggttatagtgatgactgaagacataaaacatctagcccaatgcctggcaagaatagtagcmtaccagtagttacacttattatatctaccatttattgatttcctatgccaacagttattctaggtgctttagatgaattacrtagaaattagaacaactttcatgacttggattttattatcgcagggttaataaggaaactgacacacagaaagtttatgtgcttggcctataggtcacacagctagttaactattgaagttaggataaattacgtgctagtccaacactaaggctcactttttcttataactagaaggagaaatagatgattttattatattttaatcattcaaaatgtttttattaaataactaagagcatgaagctgagtgtgttggcaggtgcccrtggtcacagctattcaagtggctgaggcagtagtatggcttgaryccaggagttcaagaccagctgagtaacawagtgagaacccatctctatttaataaaaataaaaaaagaacttgagctatgtcttagtccattagggctgctataccaaaataccttagattgggtaatttataaataatataaatttatttgtcatagttctggagattaggaagtccaagatcaaggtgccaaccgatttagtgtctgatwaaggcttctaggatggcaygttgtcrctaagtcctcatatggaaaaagagrcaaatgatatatcctcacatggacaaaggggcargacagctcccttcaacctcttttataagggcactaatcccattcataaggatgaagccctcatgacttacacacttcctaaaagtctccacctcttgaatcttctgattcatagttagacatgttatctcttgggccactggtcctcttggctgcacctcttaataccactacaatggggattagatttcaccatgaattttggataaaggcattcagaccatatcaaactaaaccttttgttatatgttgaaaatacaaagtcaaataaggaaagacctttactcttaagcctttctaccaaaatagggakgcagaggtgggtagggcaagagagaatcaaacaagtaaagaaattcagtagaagtaaaagatgccctgcatgggttatatggtataacggctgtttaaaaaacctgatacatttaacagataaattaagttctgtgctttctggagtattaatgtactgtagttttccrctttaaaactagccttaaagaaatgcaatccagcatctgtttccatggaaacagaaggacaaattcaccaagcactacctcccaattcaattttgcatggccacgtatacataatttaagatggacattttgataatgagttagagttgaactgttaatgaacaacagtcattttctaaagctttttccttcttactgcctgttattaacctytattggaaaaatgtaaaaaggtaatctttccttatgtataaggcactttctcttaaataattagagtcccaaagcaatatcaggtgttcaagctacttgccatcaaaacaagaacaatatttctttgcagtatattcatttgtacttctcactgaatttgaaatgaaattgggtggctttaacaatttatrtatttttaacttcaatatttttcaaactctatttgatattgctgtgtattggtgaatataaatgtttccttgtcaatttccttttataactttccttgctgtattggaatatatagaggcaaatatggtattcagtttytctattatataccatcaccaaagtcaatagttattgatatcagatatctgtatcttaatttattttatgtttgcatcttactcaagtaattgaaatattactttatccagcccatgaattacatgcagtttccaatgggaagttaaaagctgtgcaattgctttgaactaaaacctttaagtaagttaatgaagcatgtgtcttttagactcagtaagcagatcataatggaataaggaagttgagctctttgcagcattaaattctctcttaactagccctgaagcttatgtagatttaacatgctcrgttctgatcttgtaaatttaagtgtragattgaaagaaatggcattctaaaatagaatgtctcagcccaaatttttgggttatgacaggctttctgaaaaaaaaatacwttgtgaactaaaattgaacacaatctgagggcaaatgaaggagatgaggatttcaggagccaagtgacaactcttggtgcttaaaatttgcatttgcatgttgctttgaagatgtttcgacattagcatatgcattttgtattgtgtacttaacctcggggtttctttttcctcttgtatcctttagccatagtaagtagttaaagtwcttgcctatattggtattgtatkccttaaatattgctgaagagcaaatttacataatggaaaatagacatccatgaagctgctaggctgcagagattaagggtaaaatcagttactgccaaatgcagaagctaaaacgcttaaaagtttaccctttctgttggtaatcagatctatttatagattcacagtcttcttggccctttaataggatgaccagcaagaaagccttattttaggtgacttacgtaaatgcggacatttttctgttcattttatttccaaaattcttggggactcagtagctaatttttatcccagggtttctgaatatgtgtatgtgtaaggagaatatgtcaccctttattkgatggctaccttaaagtatgttgggctaggcaactcacctgtgaacaaagtgagctatttttattacttgaaaatattgtayttttttaacttcatatttctaataaactaaaattcattcyaattttattacttaaatgtgtattggcasaaacagctgcaacaaactatatgccagtttggcatttattcaattctctcaggattttggttgtcactgtttttgttatccaccaaataaattaaattgtttattttgctatgttctttacttttggggggaagggatttcagatatcagataacaataatttttgaatctcacagtcattaatcaaggaccttctaaatccagttctscataagtgaagtcaacttgaattgtttcagtatacagattttgttctcatctttctgatttattcacaattagattaaacagaaaatatrctttaaatgcatatccacaagagcaatcatattatggaaatattaacattaagctctggaattcactgcaaatgtgcttatttctgtctttacaaagaaaagagaaaacaaatgaggttgacatttgtaaaataatgataaaaaataatatgcaattgaaggataaacrtatgttgggataattaaagtaaaataatgctagtttaagtttagactgtcttatctttagaatggattttctatgagtttttaaaacggaaagattggtggtgggggcgtgggcagtatatatctctctcttttagaaatggaattctcattgctacttgcttttacattccagcagagggagcaaaagctagtgaacaaattatataagtgatacgaacactaccaatgatgctgcaatgcacagaaacatttagaaaaagtcttgctgatttcaaacatcaaaacacaagkgggaaaaatgccctcaagtttgtgtcattaagaattgttttcaagcaataaaagattatgtgtaaacatagaaatctcaaagcagacagccaattaaagttraaactatcttggccttgtgccatatattcaaacatatgtaacatatgaatgagtcaaaaaagtttaccagatcttagagctaccagtgtgcgctactattttgattcaagttctggaacagactttgtgaagaatttttaatggataaagttctttagttgttggttgctttgatttttctcaggattaatgacatgaccaagccattgttactgtcaggtaatatggtaccgttgacaaaattgcatcttttctgaaattttacttcttcccttgaacaacattctttgtgagtatatatttgaggtctcaaggtgttcttagaaaagttctgattttaaaattatacatgatcatcctaaatttgattatcctttacatctcaaaagatgagatccatagtttcaactctcccatatgctagtattgagatacatgttaagatttgtttgttaagaattgttagaaaacaccagtgaccatttttgtattttgaagacaatatagcagatgcctacagggttgggctcgctcactcgggaacaatttatgtgcttctatctgccccctaggtgtgcatggctttaaaaaaaatctgaatattttaggcctagtgataaaaacctttcagattttaggccaggcatggtggtttacgcctgtaacctagcactttgggaggccgaggcaggcggatcacttgagatcaggagtttgagaccagcctggccagcatggtaaaaccgcatttctattacaaatacaaaaattaggcagttgtgatggaattccatgcctgtagtcccagctaattgggagactgagacatgaaaatcacttgaacctgggagttggaggttgcagtgatctgagatcacactgctgcaccccagcctgggtgacagagctggactccgtctcaaaaaaaaaaacaaaaacgaaaaaaaaagctttcagatattgtctctatcccaggtgatatgtccctcttatttgtttaagatggcaactgatatcctgatttcctgacactctgtcctccacactgcttatctctcaggtcaccctggacatagatagaaattatttgcctgacctcagctcatcaggatggcactaarcataaagaatactttgtttttnggctttttgacctggtcccccaggcctaataccaggttgcctttatgtatcttttttcatgtgtcttcacctgttgtctagataacctctggttagctctgtttaagcagaactgagtcctcccttgctccttccaggcctccgttctaacaaacactgcctccctgtctggaagtcaggactggcaattcccagactccatagaatacctttacgttttgttttggcaaattagttaacctctctgtatcttaatgtttttgtttgtaaaacgggagtaataggttggcacatacaattcaaatagtttctaatttatattattattatcatcatattggaggtggtagtggttgtctctcttttctccctgtggcaggtttcctaaaccattgactcctgtctattgctattctcccagattctacatccagccagacttgacttcagttcctattttgtatccacttagcacctgctgcattctgaaggacaagtaatattacacatccacaaactacaaaaccacattgaatgtggagtagttagaatgtgccagaaataggataggcttcttttcatgcagtccccaagataagtctattctggaattctggaaaaattggtggcagcaatgacattatgtgtgaatctctgaattttcccattaaaacagaaaacgactagaacagcaaaacttaaaagaatgataaacaattttgacaacaaatttaggtggcaaagtgttctcacanattctcaaatatgagctgacattgtcatgacccagatgatactacaatttttgtaggagacaacagaggaaagcaatgaggtatttgatggaaatgaggtcaggataacacccaattttctaatagatactcatgagaaattgtttcaggccaattggataatagtagctgaaaatgggagaagtactttgcwggtgagaaaaaaaactcctctctaatatctgaagggtctgaacagtctgcagtctgtgaattcttgaaactcactagctgaagctccttctcagaagacactttggggaataaagcccaactagagtgggaggaaaaggaaatgaatggtccagattaaaatgggtgaggtaaatggggtcaggaggtctcaagaaatagaagggtaatttttttttttaacacttcaaaaactacagaaaraggtgttccatatttgtgaaaatagaaatggtcttttgatcaatcatttccccttaaaagactaggaaaattgatcttatgcaaaaaaggaaagaaggaaggaagaacaaaaggaagagagaaaagaaaaactagaaaagcatgactgatgtaagaaaaagatagtaagaagtagaatggtatctctgcaaacaatgcaagcacaccagtactttatgctcataagacagaggaaaagtgtaatctaatatttcaaaagatgctaaaataaatgctctaaatgatagaatatagaaaagaacaacataaatttagaaaaactgaaatgygcaagtataatgcaggaaagaattagaaatcaaagactaaatcatttcagaaatgaaggccaaacttgtaagaacacatgagtgaataataccgagagcatgccataagaattttagaaaagaaaaaggagcaactaaaaatataaaaattggaaactaaattgttcaattgaaagtgacacatatagaagataagcaacaagaccmaaaatattaggatttcctaaagagaaaaaccaatgaaataaaatgaacattaataactataggcagggtgcagtggctcacacctgtaatcccagcaccttgggaggatgaggctggtggattacctgaggtcaggatttcgagaccagcctgaccaatatgatgtaaccccatctcttctaaaaaaaaaaaaaaaaaaatttgaccaggtgtgatggtgggcacctgyaatcccagctacttgggaagctgaggcagagaattgccaccactgcactccagcctgggcgacagagtgagactgtatctcgaaaaataaaataatgactataattccgggaaacttttctgaaaataaaattgcaacgatattgtgaaaaggaacactacatccctgcgagagtgatccataatgagtaatgtcaagatacattgtaggaaatctcccaaacttaaaagataaaaaaatcagtttggcttcgagggaaatagatacttgtaagaattaagrgggggaaaatcccagattgtcatcagagttttcaaaggaatcctttactctggaagtaaatggagtaacatttaaaaggtagtcaagtttggtgagtcatggattttagatctatcaaagtgattttcaagtatagcagccacagatatatttatcaacatgcaagaactcaagactattgttcctggtaaatagaratagcatttgcccactcrttcaggcccaaagcttggcatgtttcttgatgtctttatttgtcttataactcacattcgattcaatggaaagttccagtggctctaccttcaaaatatatctgaaattggaccttccacccccattgttattctgttaatcaccatcatctcttgctggcatgactacagtggccttcttccttgtttctctgcttccagtctttcctcyctctaatctgctctttgcacarcagccacaataagctactattataccatgcctatgctaaaactctcatgattccttacattacttagtctgggatacctctctaacctgccccttgctcactgcagtggtggtacaaggctagtccrttatttcactcagtactgtccaactacagggagcatccatttgctgttcccctgcccaaaatgtccttccatagatgaaaatatggttgctctcctcttcattaaacgtcttttcaagtgtctttattccaactgacctttcctttctaaaatagtaccatctccttcactttatctacccttacttactgtgctttatatttcttcacaggacttcttgattttctgacatattacaaatctatttatttgttgctctcttcccttctaaaacataagctttatgaaggaagagactgtgtttattttgttcctttctgtctcctcagcacctcaggtagtgcctggtatgagatatacattttcctgatactactactcaattgaataaatgaattcacaagaggtgttacatactaaaacattaaagtgttatcttttgtagaaaatagatcaataataggttgttactgaaggcaaaatattttggagccattcttaaaggtwtttcttaatttgtcaaagagtaagagggcatgcatctccgataagtccctttccagtaccactgtcagagtatgtactaggctgaatatggctttgaattttctgctttccagcagagagagaaagccttacaaacaattcaagctgtaacccctgtaattattaattagtgcctattcaagtaccatgtacctagcagagattcttctaatcagattgcataccttacatctaaaaatgaattcgtcattttgtgagatatgtatttctctaagtataatggcattatactgtcctacactcttttaggaactaaatagcaataatgyataatcttattttcaagaaatcttccttttatgaaaagtcaataaaatctgatgtaagggatttaaaaataattcaacttatataatttgatcagactatgtgcaacctataccatcctatttactacatcatactacaatttatcagttgttaccttccttaatcctctccagctgcaggtcctgaaaggtcttttgcctataggttcaatcccttctagtgtctggaccacctgaaatcagattgagaatatatttcagccctatatgaacwggtacgggttttgcttctagaagcccgtgccctttccttgtaatattcagtgtgtgttttgtcttttttaatgggttgctgctcagatttttttatgaaaacacatataactctgctctaaatctcagccccttgaaacagggcttgatgactctgtccagttttttctaacatttaccaaatgggaattctgatccatactattctcagttattgatgggggccttaatgcaagtcataccactttccccaactccaggtactagtacttggccatgaggttctgcaccacagaaaaagtgaattgtataaaccaaattcatcctctatatgtttatgtagtaagtttcctgtcttattcattrgccaatgtgaggaaacatgtactcagagcatagataagtaaatatatgtgtccaataattctaccaastgaacagtaaaatatgcatgtctatggttcggagatacaaacttttcaaaagcagagtggacaagcataaatacatacttggggttgagactaagtaaaaatctgaaatatcccatttattagaaggttgaaggtttttttcttttttgcattcatttgttcttgattcagtgagattagtatctttaaagtcaattattggttttgtaattacatttggcacaaatatgtattaactttatgttaattatgggactaatgccatgtttgaatgtaaaccaagaactttatgtctgtagtcagcaattcaatcttgcttttgaggaatttgtaatgtgaaatcactgtttagcattgtaatagctttccttagggtcaagcacttcccaataagtttgacattaggcatgaaagaagatgcatgaaaatgttttactcacagatataaacagtgtaatctttattaacacacagaatggaacatacagtaatgaagcaatctaaaaagaacataaatttcaatatttagccaatttgtttttatttccttccatgcaatagtataggagttcaagaatagtcaatggttatttgagtggaatatgaaaagtgtgtcctaattttcagaggatttggggaagaattcctaattcataatatgcagctgcttccttcttctatgatactatgctatraacagggaatgtttcttgattagatgccaatgccaattctgttcaaaaacttcaggaggagtttagaaatgtatacaggttaagaatggacactgaaaaagacaaatatttaaagtaatatgtttttcttggagaaattttcttatgaagttgtattattcagttaacaatagatagtaacatgagaaggatttgatgacttaaataactgtctgayttatgttttatccccccccttttgtgtgtttcctttagataagaaatgttgaaaccaatcagtgtttagacaacatgggccgcaaggaaaatgaaaaagtgggtatattcaactgtcatggtatgggaggaaatcaggtaaactctccctttttatcagcttcatnttttagagggaaaatattgttaaaactatcagtggagaccatggctcacatgttaataactataaactgagcttaataaataaatgtacactcaaatctagaactaatttggctattttattgtcccaaggatcttaaaggagagctgaaaaattaaaataaaaagagcaacactttcagtgtgcctacagttaatgaagatatccaaatattttagacacatctcattttatcatgtattagcaaatgagaggagtacattttattctattaactgaatatagaaaataattcctcaacatctgtgatgttttcccaatggttatttttatccatctcttttcagatttttatgtatgttatgatttttaagagcttttgaagtttaataaaatgtttaagtatatagttcagtgttgaaagctgactaaaagtcttagacagcctttcttgtgtgtgacaagagttcttgtgctcttcttaagcattggaaaaaagctttgcatggtgggccacatggaggctatttggctgtgagtcttcaggacagagctattttactgccatggccactttgagaggtagaatttggagttcctgggaactataccaacaaagcagagtttgaggtagctaatcctctgtaaacaagttatctacagaagtttaggagaaccaaaagttttttatccagaggtagaatttctgagttagtgtgaaccgaggttgcaaaagttatcctgtccagcacaattatggttatatttgtgtcaagatttattacaaaaatacttgttgattcttgtactataaagaagaaaatgaactctgttgagttttggcgcaccatacttcaaacagggccggtgttatttaatggagaacattaaaaggaagtttctcccttaaaaattcttaatttaaaaaatcctaattagtgttccaaactgtcaatttgagcaagaaaatatttaaaccaaatttctaaattacagcatgggaaattgaccttatggaggaagaggatagaaacaacataggcagactaatgacaaagcattcagaaatgattccatttattgtttcactgattcataatgaatgtgacaggcctctactgccaaaaaccaatgaagtcctgatgaattcagctggaaacaacaaaatgcttaactataagaggactaaatgtgtgagggtttaattttctcacataataaaaattctgacatttgtttaggacctcaatgatttcataaagaaaccaaaaactttatgtctttccattctttagtgtttagagttaacttttatcatcagctggtcagaagaggactgctgaaattccagacatcatatccacattcaaggcaggaatatcaaagtcagggaagaactgcaatagccatatctgtttttcttttaggaaaagcaaaagccttcctagaggctctacacgtctcagtgtatctctctttaggtaaaaatgtgttacttggacatccctagtacaacaaaacactgaatatttaaccccacactcacaagtagctgcttctcacagttcatttaccaagatattggggagacatttagaagtgccagccataatctgtttgaacaacttatggcaaaaaaaatcagctaattatctgctccataatttcatacagaatttaaagaaacactacttatgaaatctctctcattctattgcttatgaaaataagaaaggtaccccagatgaattctctacatagaatcattacagtgccatattaaaaattactttattcatctgcacgttttcaaatacccagaaataagctatctcactctactgcaaacttcttgctggcagtcctatatcttactcctgttttcatacccagcacctgctgcagtcttggaacatggtgagcacctaacgaatactaggcaagtaaatagatgaaagattgtattgccagaacagtagatttgtaccttagaactttgtagacattgccaagaaataatgagctgttattttcatagtaactaaaagtatataaaaacagctcagggattcataaagaaagtgatcaaataataataagcataaaatctatccctacttttattctaatgtgctctacaagatcaatttaataacaagataaaaattaaaaccattatttttccatctacatacttaattgcacatacacacacacacacacacacacacacacacacacacacacacacacacaaatgtttttggagccctttttgttaaaacacaaacaatggaaacaattcagtatttaccaagaggggaatggttaaataaagcatggtatacgcacagtatagaaagctgtataccatcaaaatgactgagggaggtctgcatgtgtgtcactagaacttcaaaagagaaaaacaatccagacaacttattttcaataatctcatttatgaaaaaatatttgaacaatatatagtatctgtatatttatatggatgctatgtaatctattacaaatctataaaaatctatctggaatatagattgtatctggcgagtggatatctggaaagaagactgagttggaaaagaaattttcctttttaccgcacatttttctgcatacagtagtacatgtatttccttcataattaaataagaatggggaaatttaaactattgagactagaagaacattgttgtgttgcattacnctgatctgattaattgggtaacttatggcaagttacataatatttttgagctttgatattgattgtccataaaatgaacaaaagatttcattcaaattttttctaacactaggaaaattcattaaaaaaattaacactaaacatggcacatactaaacatgcaatgtgtattgatccattgccattaattagcccctttacttgttatttctattgatgttgttaattctcttatttctgaagttaaaaaatgttcgttcagtggctaatgtcacaagcaagataaaagcacaacacttaatttggtattgttgatttcaaaacgatgaacaacctctcctgtaactctaacaaatacagattatggaaaaatttaaccatcatataaaactcaattattatgaattctgctctgatggaattcaatatttctaagataattaatactaggaacctgtttcaggttttgtctttctcactttaataaaaaacagattttagaattttattctcagaattaccctccctggttttattgctattcttttatgttaccatggaagcagcaattatttttatggttatttagttttgactgttttataagtagcccccaacccataaaaatcactcaagcttctctctcttgcttttacacaaaaatcataacaaatgttaaaatccttttttaacttagttacatttctaaaaaaaggtattttttttttgtttgtcracaattataccttaaccatttctccttgcataggagttttgatagtttaggggttttttaaggccttggaaacatcaggaagaaacttacttttcagtagttgttagaaataattttcttaaacactcagatttcccagcaaaatctaaatggagttaatgaaagtttttgtagcaggaatactgcaaaagctaacaactggagaattattattcaattcaacatgaccattttgaagtgctctttttttaaagccttataaataaaaactgtcttactcaaagaataacaaaattcagcactccatttatatctattcttgcaatgatttattttcattgtcaagcaacttcatgataatcattaacactttgaaaagaataagaataatttgattaacttgaatataaacttttacaagtgaaagacagaagttacaatttactgaaataaagtatagcagttgtgagagtgtcttctctgtacttctgaaagatggcatggattcctggaagcacttccatgtcccgtacaatgttaatgactcagatttacatgtacagccccaacctctctcctgagctctagaatctatagccagttaattatcgttaatgtctgcagacatctcaaacccacctgtttccaaactgaactcatttcctttcctttcacagagtcatccaaaatggaaacctaacatagaaacwtacttctgaagtccgattagtcaccaaatcccaacacttctatggaaaaatgtccctacatcttagtcsttttataaccaggatctctgcctttgttytagcctatatctacttttacccatatggatttaaaacctcattattttcataactcataattcatgctacattagtttaacatctcattaaatattcagcagctttccactgcccaaagaataaaagccaaattctttcctatgatatacaaaacccctcataattgtatccccatctggttttccagcctgatctaccttgatgtcccatcggtctcctgtgctctagacatacgtctcatratttctcattccttgaatgctttcagtgttttcctatcctagcagttcacttacactgttctctgaaattgagctgttggctacactctgctccactaaaaaacttaagacacactcactgttgaaaacccgataatttagcttctcatttgctagctattcattagcaactccttaacctaaacaggacacatttttaatggataaactataattgatttattcattgttttattgtttaacatacaatatttataaaagttcattgttataaaccaggcccatcaatttccttgtagctaaaatctggcaagcgccaatatttacttctttagaaatatctctagaagtacatttgctacaggacacatttttaatggataagctataatttatttattcttttattgtttaacatacaatatttgtaaatgttcagtattataaaccaagcctatcaatttccttgtagctaaaatctggtgatcactaatatttacttctttagaaatatgtctagaagtatgtttgctcaatcaaaggttatgcaaaattagaaggcttttaaggtatactaacaaattgttcttttttcttaagatttcagcaaataagactaatagctaaaataaaaaggactctgataaacatttaatacaaattaccctctttgagacttacaatgatctttgaagtagatagtgttattatcttattttacttacgaatgtaatggaaatcttgagtgattagtatcatgattgaaatggtaaagccagtgtgaacctaagtctgattccacaccaggtttatagtcactgtatttgcattgatttccaaccacactttccaggattataatcgcagtggccaaccctgtgtattatattttttttttgttttttatctttgccattttagtatgggagaaacattttatcttgtttcaaccatatttctagcattatcagtgcatttaatgattttaaaaactggcatttaaacatttcaaaaattgttattgcaaattttctagtgatattgttgcttatgtttccattgggggttgaaaggggtcttttttctcttgtcatttataagaatactttgttaaatattatcgccctggtcatgcattttgcaaacatttttctgactttttgtttacagttttttttatatacagacttttcaagtttatatattaaaaccaatgtttgccttaatactttctcttttttgtgtagaaatgccattcatttttaaagtgctttgaaaaaacatttatatcatcataaaggcataatatcaaaattggtactcagatcatagtcttattaggaatatgttatatctactcaaactgataytaatttttatttaaaatttacataaaatagctgggcatggtggcatgcatctgtagtaccatctattcagaaggctaaggcaggaagatctcttgcacataggagtttgagtccagcctgggaaatgtagcaaaaccccatctctagaaaaaaaaaaaactctaatacataaaatatattcataattaggtaaaaattaaattaacataacatttataacataaacattttactttgaaactaatcactgtaacaattttaaaaattcaatgctgtttccctctgaatagcagcacatctttaattaaaaatgaataaaaatagccccatacacattgtaccttttccttttaaaggcaaaaaaatgtaaagtaatggaaaaatattcacaaccctagtgaatgcatttataatgtttctttttctccctggagccactcatttgaagacagctagaaagcacgtggaaacattccatataatttattgcggtaaatgattcagagctatttttcaaggtagcaagcctttaaggaagcttatgctagccatttgttaaaatgctgttttctgccaagattaaagaagagatcattaggtatgatctacacttttatacaaatatctcctcctcgtctaacatctgattacttaaattgaatctaatcttatgacaggtgtattaaaaatttagagagtaaacaaatactttgtttcattacagatcctctcctagagaaagcttaattattttattaatatgttctaatgtactcacagattgtaatgaatacattcaacagatatatattcattttaaagtttgcatttttataagtactgtaattacttagaagccatttcaatactaatttggtccctttttagtagcttgcacagtggaattaaaacttaccagggatttcacagagtaaatttgcaagttaaatasaatggcctatgaggaaagaaggaaaatctaccattcattaaatgtttaaatgagttggatacatgcaagctagaagaaagcagggttaccacaacttctatagaaacaggaattattacaagagcctttcattatcattaatgcttgactgggagaacttctctggtctttgctgactttgtcctcctgtcaggagattatactatacttgggatggaatgctgtcttagtctatctgggttgctataataaacatacaataaactgggtggtttaaaaacaacagaaatttattgtacacagttctggaggctgagaagtccaagatcaagacaccagcagatttggtgtctgatgagggaaaagttcattgagmcttcttcttgcatgctcacatggtgaaagagaagagctagatctctgggtttctttcatgaggacactaatctcattcctcggggcagagacttcatgacttgatcaccttctaagggcccagacttctaatgctatcaccctggggactggatttcaatgcatgaatttgggaggggggactcaaacgtttagactacaacaaatgataatttcagtcaatcattcatccaacaaaacctgattatcctagtcaataataaacactctaggtagtatatgactaaggggaaaatatccaaagaaaagaaacgtttcactttggctagctttttgggggatcatgagttatctctttaccctcaagttcttcaaacaatgaagtttgaagttttcttttaagtaaatccaataggccctgtgatcatttgatcagtcaggtgtcaacaaagtcttaggatacttttacatgtcagtgaatctcttattgccatgctactctgttcagtcttgattcttcacattttatttttctgcaaaattaatcccctcaagtttaaggaggcgtcaaagttgtaccatatcctgggcttgcagccattgtttcaaactcagtgtgtctataattaccttttgtcccaagccttttgtcctctaatctctttctttcatcttttacatttttctctctcatctttcatcaccccatgctcactacaaactggacctaagccctggggattcattctactagtctttttaaaatctatttcttcttttcttccattaataactcagctttctaaatttgagccttgattgcctcagacttgaattactacaataattttcagtgtagtttccccaaactccagcctgtccctatcttcattccaccttccttaaataattaagtgatgactccgtcgaaattatcgctcccagttggaaaaacaaacaagcaccaaaaaaaaaaaaaaaaaaaaacctgaaagagttcctagttattacaggataaaattggcattgtttacacaactttgacccctttctgctctactccatcaactttatggaccctgaccagacttgtaaaaaattgttattgttagttgttgtttttcttatagctttgccttttcttaaacccatttgccatgaccttgccatgcttttatttatttatttatttatttatttatttatttttttraggcggagtcttgctctgttgcccaggctggagtgcagtgacacaattttggctcactgcaacctccacctcccnggttcaagtgattctcctacctcagcccccccgagtagctgggattacaggaacccgcaaccatacctggctaatttttgtatttttagtagagacagggtttcaccatgttggccaggatggtctcgaactcctgaactcaggtgatccacccgcctccacatcccaaagtgctgggattacaggtgtgagccaccgcgcccggccacttttagaactatgtaaattctatcaatctagtcgcacttcaaaacccaccatctctatatagtgctgtattttttctgcttttcaatatacatttatatttcctttgaacttagactgcagaattttttctcttgtttttaacttatatattatttctcaatattttattctttaatcattatgttgtcattcaattatgtatgtttcattatcctatctgcaaaaataaattgtagtcttttttggaagcaagaatttgttgtttttctttttaaaaaatccccttacaggaataaacgcttattaaaagaatgaacaagtaaacaattgttataaaaatgtttaaagttacacaagagcctgttatcataaaaatagcttcaaaattctgactacataaactaaaatcatcttcctggaggatgaaattgttcctctagaaatgtgtggatttggggctttggtaactgaaaaatgaatatcaaaagatacccatgttctaacccctggagcctgtgttttaccttatgtggcaaaaaakattttgtagacatgattttgttaaagatcttgagatatggagataatcttgtgttatctagatagccgcgctaccacatgtatccttataaaagggaagcagagggagaagaaaaggtgatgtgaccatagtggcagagcttggagtaaagcggccartaagccagggaatggttgtagtcacaagaacctggaagaagcaagggctagattttcccccagaccctctggagggaaagaggccctgctgatacctgattcccacccagtaaaactgattttggacttctggcctcctgaaatgtgagagaataaattcctgtttaagcttccaagtttgtgataatttgttttatcaacgacaggaaattaagggctcacaaagaaaattctagaaacagtatagctcagagttcataaatagccaacttctttggacaaaaatttctaagatactaaaccttcctcaaagttggaaacatacatgatttcatcctgatacttctaaacatgttgtgatagctagaaagagtggacctcagttatatagtactgattcttcagaaagttttaattgtagaatttttgtttttagagattctattttaactcaaatttttgtattctctaccatcatagtaattgtaaataacattgtcaattataaatcctatattaataaaaatataaaataactaaaatgaaatccttaaaatattaaatgataatggctccttctgttaataaatcctgcacaggagtgttaaaattattttatccaataattgagcaaaaaatcaacaagtaacattttcctaattcaagaaaattatatcagaggaacatctatgaaaacttggagttgataaaaacttgtaggaacttgtgatctgatcctgccgagtgttgcctggccacagtgttttctagcatagaaatgttaaatatgtcatgtttggcccttttctttccctgacaagagttactcaaagattgtaagtttttgttttctttcttaagatctcttaaaaattgaaaactagtattggctgttttttagatttatcttttaagtattgtagagtctcattttatgtttctacattttgattgttaacatctaccatgtaagacattttttcaaaagtgttagaaaaattgtcaattcaagtcaatctagaaaacaccttttccattttcataagatatttaaaattcatttcatgggatcctacattgatttaaataagtcacaactttggctctatgctttctagctatgagcacaaagttggttatatgattccttgtgtccataatattaaaaaacagcttcgtaaaagttcagatattcctggtgttaaaatcataaggatatctactgtgattatcgataagaaaagcagtacatggaaaagggactatggcaccaacaagggaaggacaccagaccaaattggagaagacagtgtctaagaaggcatcttagaaaatagcaaagtatgtcagtgcaaatagtaggacaaaatattattctgttgattaattggttaaagtatatcaccatcatcccatgcataactgagattaatattacatttctataaggcttaaacattaaaatgatattctgttttttaatgtacataaatgtgtatcagttttattaatgggattcccagaatatttggaaaaactccccttaaagtgaaatatcacagtaagtgtataaagcagaacgtttaatactaccctggtttaataaaaccccactacatacacacacacatacacgtagacacaaaggcgtacctcaaccatcaggacaacttttcttactgaaaatgggaatctgttacctgaaaaatttactaaaaggaaaatgtgttgctactaacagcatccactttgtacccattgcccaccaatttgtctcctctaaagctcctgttatatacagatggactgcaagctctctgctgactttaccaagatgaatttgtctccattaaactagatatttatttccagcagaacttattactcctgtgtactctttaatcttctgaccctcattcttttctccaccttgtcttcaaatagttttctcctgttttatgcctaattcgttttgacttgaggctataaccttactcattactgtgaaatgtatccttgttcaagtaaccttccggccaacattttatcatatttaatacttttttaattaaatgatttgaatgcatgagtctactatatgtgaagaatattarggtctttcgaaatactcttctattccccatcacccttagactagctgtatgcctatttttcatcaaggacataattattttcaccataaccattttaagcactctataatagataatataactttatcttggcttaatccatgtagtaaaagtcagtttattattttctaggtaaggtaaataatgtctgtgatttctaaattaacagcgttgcctagcccacttttatattcttgagaagccaagcagaatccatacttatgattagttgctttgctgtacctgtgattgtcttcatcttactgcatttgcaattccatcctagttattaaattgttacagttttggaataaattaggcaaggatattcctagttttttttgctttttaaatatgaaaacttattttttcagaaatgaaaagatagcacaataaggccaagatgacataaaactatacaagaaattcatgttcaaatagttgactaggcaatactaatactttatcccgggaagagaaacattaagtttagaaaaagaagacatctgaaaaaatatgcaagtgaaatgaagatatttgatatattttatagcacaaaatacattttatattctgtataagattttttaaagattccttgcttaaaacttaccaatttttaaaaggagtcatcaaatataaaatattattgaaagtagcccagtgtaaggagactaatcaagtggaagctacacatcgatatggctaaaacacaatgttttagatatgtcatttaaagttaactatatatcccatatatattttgccttgctacaaatatagacgtagtagtcatactatgtcagcaaaatatcttctattataggttttacatgccctaattatatactcatgatgtcaaaaaggaattggatctgagatatcatgagattgtcatttttctgtataaatgatgaagaaaaattatttctaatttttttccaaattaatctattcttaacattaaaagctatctttatattgaaatatgtctaatacttttttctttgcacaagaaataygttttctaggattttattgcattctacactaatttgaagcatgtgttagcagtatgaaatgggttttttcttttaattacatcatatataattatacatgcaagaaatatatatatatttgttatagatagatatcgctgtttaaatccactttgaaacaagatgtaatataaataggcacacaaaccatatactcaatctcatagggaatacaaaagaatcattaacaatacagcaagcattcataatgctctacaggaggcattcaggaaaagttctgataaggacaggaatgggtctaaaagactccacaaagcactcagcgtgcacagagagcagagggtgagtaaggacagcaaggacactgccacaaatggaattgaaagtctggagtgggacagtggaaaattaagttttacaagtagaagagctaagattacaatagaaggtaaatgtcaagcaagggaattttgacttgaggggacaaaagaagcaatgagctttcagactacaaaggttgtcaaaggatcgtgtgtaataagcatcatgaaaatacttggactgcacttttgttattaaaaatgacactgtgaattcagccaaatatgaaaagggcttcttattcaygttatttagtgttgaagtctaatttcacagcaagcaggggcagactgtagaaactttttcaattcatttcttttattctgctatcaaaggatttgatccaatacaaagcatgaagctacatgtggtgtatacagaaatgatacctttccattaaaggaaaaaaagcttcagtaggtaaccatggaaacagcctagtgtccattccaatttcgartagaaaatcttagtcttctaatgaaaacctaccagatagacatacttctactccagctctctagttctaactctctaaaaaggtttggaatattcattttatttaagaaagtaaaatatgtgtttatgactgtaatatgcaaaatttgattttttcttttagacaaaaaattcaaagatgcattttaagaccgtaacaccaaggaatgatcaaagtggtcttgatagctcaccatagccagtgtccaattcatggtttacacattactgagagcaagtgccacttctgggtggcagaaattgtcatgttccaatccacctaacaaagagacctgattttttttcttcactcagtgagttaaccaagtgacccgtgaggtggacttattttttttattattattatactttaagttctagggtacatgtgcacaatgtgcaggtttattatataagtatgcatgtgctatgttggtttgctgcgcccattaaytcatcatttacattaggtatttctcctaatgttatccctcacccctccccccaccccacaacaggccctggtgtgtgatgttccctgccctgtgtccaagtgttctcattgttcatttctcacctatgagtgagaacatgcggtgtttggttttctgtcttgtgatagtttgctgaraatgatggtttccagcttcatccatgtccctgcaaaggacatgaactcatccttttttatggctgsatgctattccrtggtgtatatgtgccacattttcttaatccagtctatcattgatggacatttgggttggttccaagtctttgctattgtgaatagtgccacaataaacatacgtgtgcatgtgtctttatagtagcatgatttgtaatcctttgggtgtatacccagtaatgggattgctgggtcaaatggtatttctagttytagatccttgaggaatcaccacactgtcttctacaatgactgaactagtttacagtcccaccaacagtgtaaaagcattcctatttctccacatcctctycgagctggacttattttttaaatgtatgaatcttaatgtggtgttacttataaatctaacataaatacatagcccccaatttcttactgaagctttaagagacaagttaaaattgwtctctgggatcccttgtacagaagaatttcatataagttttgtagcttactccaggaggtataacataaccttcccccttccctggcatgtgtgctgtgttgactttcttccaaagattacaatgtggaagaggatagtggcaactttacaatggagaaatattggcaaatactaccttgagtatgtaatcaagattctataatgtgagtcatagtgataccgtgcacccttgaagtgatgggaatgacactgtacctttgwggtcttccacccccaaccctagacccctaatccagccatgagataaacattagaaaaattcaaactgagagatattctataaagtgcctgataagtatttctcaaaaccatcatcaaaaagataaaagtctgaacatctatcagagtaggctgagggcatatgatgactaaaaatatattgttggatgggatcttggaaaaaaggagcatggattggattcgtaggggaacatgatggaaaacctaatgaaatctgaataaactctagagtttgaaaagtatcaccaagaagtgaaatgctaattgtgtggaaagaacatgggacttggagcctgacagaccatagttcaaacactggctctcccacttgcaaacggagtgactttgtagaacttctttaacctttgcaaacctcataatcctaatttgcaaaaaaagaataatactgtatgtgctatatcatatttaawatacagtatattttaaatgaccactgtctttcgtaacacacaacagttgctcccaaaatgttgtttctccccttgcttccagcccaacatcaaaaggctagcacctctgaccctctgggggtcttttaaccaaaagaggctgctttgcccatcagtcacattaaattctgctccctggaagctcacctcaagcaaaagctgagggcagatgatgtataaatatctcagccctgtcactctttgagggactgactccgacgtgcttattctacactggttgccagggatccccaacagaattaagctctagttatccacagtgtaactaattagataatttaccatgtattagcctttttctcttccctaccaccatacttgtcttttctgagatcatattcctaacgaacgacttgcacttgaattactgtctcagtgtctgcctttgggggaacccaaactaaatagaccctgctcttagtttgcagcaatactgacagatgctataagtaaataagatttctttaaacttgaagccatctagaaaactttggtattatttgcacccaatgcaagcattgtggtaataattscaaggtaaattttgaatattgtgtccggtgaagagtactctccctttacagatagagagttgtaaacaatacataagtatatcattgtgccatttaggatattataatttggcttttcagaatctttatatatgtaacaattttatctaattacatgcctgaatatatctggtatagtatataccagrgttttaggaagtgtctaaagatacaagtgaaaacttttaaaattgtatgaaatgttacaaaaacacctgtaaaagacattcagatgggatagcaaaaagtcttttatcattatttttcagctattgaaacaaacactaaaatacartagtttatctaggtgtcatgtgaatgatatatttattgttgttatgtctgttttacattyacatgcttagatcagtaagaacctcaaagatcaggtatcttgctgcataatggtaccaactaatgagactggcataaagggaaactatgtatgcatgtatgttgcccattgctaaagaagaatatctcatttaggagtcagtgttcttgccttgaaatatatgttcaaaagccagttcttcacagaataaatacttaaggaatgatccagttgagaaaacataggcgaatataccatcaatagaaagataagttgccagaagaccattacaaaaagaagagagttcaaatgaggttggaatagtgggagaaattcttacagaaatgataacactcggttagatgtatgtgtattgaattcagcagttcatgaaggtgatgtgtaatttggataaacaagacagattaaacacacagaaaagtatgttgaataaatagatgattgaatagctgagaaatagaatgatagagatgggtcatgggagatgatgtctcacatggtgagaacaattctagtttttgcatgtttcctttttcctgatggtcccgtattagttttctattgtttcataacaaattactacaaatttagtggcttaaaacaacacaaaattattatttcacagtttgtaagaggaattcaggcacartgtggctgggttctctgctcagggtctcacacagctgaaatataggtgttggccagagctgtgatctcaactcagcctcaggggattcctcttccaacctccctggttcctggcaaagttcagttccttgcagctgtaagactgacttcctatctttctttgttgtctggctctctgccagggttgcgctctgccagcagctagaggctgccctccgttatgtgccatgtagctctctccaaatcatggcagttttcatcttcaggccagcaggagagtccctctcttcagtgctaacccaaggttgtatctaatatctttgtaatataatgtaatgtgatcttgaaatgactgtcctgtcatggtcacagtctgtcttgcacttaagggaaggaggttatacagggcatgtataccaggggatagaaaccttcggtcatctgcaaattgtacatcagtcacataaaaagcaatatgtgtacattcaagcataactcgtgggatatattttggaagggattcccaactgagcttaaatttgcaatttatattcttcaatactgcaatagtaaaatataagcatctggagcatgtttataaattagatttcccaaattgtagacttcctttaaaacccttcagggcagagtcaagtattaaaattacataaaatttaacattggtaatgtttaaaatgggaagatttaacaatgaagtagaatagaaatgtcagtcacattttgttattatattactgcatgtggcttattgtattatcttgcactgttgctctgtttcccataaagactagggaatttcaaagacaaattattttcatttcaattcaattcataattgttggacactactctcctactagaacagtttccatagggattcaaaatatatccttagcattgttattgagtccacaagatttttttaaaagaatataaaaaccaataggaaaagatgagatagaatataatcaaatgtagattttatgcatgaatattgcacagataatcactaatatttagatattacttgaggcaaatgctttgtttagagcttacatgaatttggcttattcagtctgtaaaatagcctatgaaagaggagccatatatttatcctttttctcagatgaggaatccaacattttgacaaagactcccagtaaccctggtcctgagtgatacctctcaagcttaggtttgtgtaatcttctagagcccattgttgcagtattgtccaattccaaatatatacagatatgatacctacctgcggtacaatggcagataagctatctgggtaaaaatggtaagagagtgctaaatgaaaaaactgaagaatgtatgaagactttaaggagattagccttttgcttggcaaagcggagtgggaaggatagtcctagtgatgtgatcagcacatacgaggtcagggatggaagaataagctggcttgctgagtgcaaattaagcatcacattgttatatattgttatattgaggtgaaagcagaaagagtgaatgctttacagatgatgttgaggacaggatgagaatactgaacataagatgcatacccacatcctgtttttagttgtagaattttagagcattaaagctgtaaaaaataagtgatatcatstagatgtgtaagagtaagttaagagtgtacagctagatgctacttactcctcctgaccctcctctgaacaaaccgctgagctaacagcctatagatgaaacctgaaatcaattcaggcataggaaaaggtactgtctgggaataaacttggcagctccactggtgacttcaataccatctatgaattctccatgctgacttcaggatggtgtgaatatggaggaagataatattttaaaaaataattcacattgctaaaggtataatttttgttgctaaacagttatctctttgatttcaatacaaattttcttgggttatttttacagatgagggagaaaatcattatgacaagtttattttcttacaagttttatttctggatttttgttgacacacttttcgaattgactgcgttccaaatacctaaagagatctcccasaggatgcaaaggtccanaatgactaaataatgggtgtgtaaagagaagtttaagcccgtggacaaatagtggcaaatagcagagcttcaggttcagagagacctccgtcactaagcagctcggacatattgggaatcctgtaacttctttggcttcagtttcacttagcgaagcagttggcaaaattcgatatatatcaaactgtgaacttttatagtaaatattgtcctgatgaactcgcacaagaaaagtattttataatttaaatgtagggaaatcaaaacctatatgatagagctgcaccaaatatacatgtagacattttgaattcaaatatatattcatttgtaaactataccttaataaaaataaaacaaaaatgaatacatgtatatgtatctaggcatacattgttttattactctttgctttattgtgcttcacggatattgcactttttaacaaattgaatgtttgtgacaaccctacatggagcatgtctattggcttcatttttccaacagcaygtgcccactttatgtctttgtgtcaaactttggtaattctcccaatatgttaaactttttcatcattattttatctgttgtgatgatctatgatcagtgatttttttttttttwttttatttgagatggagtctcgctctgtcgcccaggctggagtgcagtggcgcgayctctgctcactgcaagctccgcctcccgggttcatgccattctcctgcctcagcctcccacgggcgcctgccaccactaactattgttaattgttttgtggtgctgcaaactgtacctatataacaacagtgaacttaactgatgaatgttgtgtgtattctgactgctccacagactggccattccctatctctcgctccacagactggccattccctatctctcgctccacagggcttcctgttcctgaaacacaacaatattgaagttaggccagttaataaccctacaatggcatctgtgtgttcaagtgaaaggaaagtcacatgtttctcactttaaatcaaaagctataaaagattaagcttagtgaggaaggtatgtcaagagccracacaggccaaaaagtaggcatcttgcaccaaacagctggaaaaatagtgaagggaaaggaaaaattcttgaaggaaattgaaagtgttactctagtaaacacataaatgaaaagagagcaaacagccttattccgtatatagagacagttttagtggtttgaatagaagatcaaacaagctatgaaatgcctttacaccaaaacttcttccacagcagggccctaactctaattctatgatgggtgagaaagctgcagaagaaaatttgaagctagcagaagttgatttatgagttttaaggaaagaaagataacataaaagggcaaggtgaagtagcaagtgctgagggagaagctgcagcaagttatccagaagatccagctaagatcattgataaatgtgaatacagtaaacaacagattttcaatgtagataaaacagcacccaattggaagaagatgccatctgggacttccatagctagaaaagcgaagtcattgcctagcttcaaagcttcaaaagacaggctgattctcttgttaggaaaaatatagcgagtgactttaagtcaaaagcaatgttcatttatttaccattccccaaatcctagggcccttaacaattatgctgaatctactctgcctgtgctctgtaaatggaacaacaaggcctggattatagcacatctgtttgcaacatggtgtactaaatattttaagcccactgttgtgacctatttctgaggaaaaaaagattccttttaaaatattactcctcattgataatttactcagtcacccaagagctctgttggagatgtacaaggagattaatgttttcatgtctgctaacacaatattcattctgcagaccatagatcaaggagcaagttcaattttcaagtcttactatttaagaaatacgtyttctaaagttctcactgccatagtgattcctgtaatagatctgggcaaagtaaattgaaaactttatggaaagtattcacaattctagataccgtaaataacatttgtgattcatgggaggaggtcaaaatatcaacaatatcaggagtttggraaaagttaatcccaaccctcttagatgactttgaggggttcaagacatcagtggaggaaataatttcagataaggtggaaatagcaggagaactagaattaggagtggagcccgaagacgtcattgaatttctgcactctcaagctaaaactttaatgaatgagcattgcttcttatcaatgatcaagaaaagtggtttcttgagatggtgtctactcctattgaagatgctgtgaacactgttgaaatgacaacaaagtatttagaatattacataaactcaagtcgataaagcagtgtcaggttttgagaggattaattcaaattttgaaagaagttctaccatgagtaaaatgctatcaaacatcacatgctacagaaaaatctttagtgaaaggaaaagttgattgatgtgataaacttcattgttgtcttattttttaaaattactacatccacctaactttcatcagtcaccactctggtcagtctgcagccatcagcattgaggcaagaccctccatcagcagaaatattaccactcaccgaaggctaggataattgttagcatttttaacgataaaatatttttaattaaggaatatacattgttttttgagacacaatgctactgcacgcttaatatggctacagtatggtgtaaacataactcctatgcacaggggaacaaaaaaattcatgtgccttgctttaaatgcgatacttgttttattatagtgatctgaaactgaacccacagtatctctgaagtttgcctgtgtatatgcatgtacatacatacacactcacacccctcttcatctatggattaaaaaaaggaaagaaagaaaccctgtggcaagataaagcaagtaaagggcatttaattcctgagatctttgcagaaagagacaagattcaggtcccaataatacagcaatgcctttgctttcttactttgtaacgtgtactgctggaacaaggtttcattagcacaggctcatgctagagatttgagaaaacgtttgtttgtagtttttstaaagggtcatgaaaaaagagtattttaaaagaagtaactrtacatatattaggattttaaacataatacaactgggaaaaaaaatgtggacacctagtctttcattatataaaattaatttaacagaatattttagatccttctcacagaagtccttgaaattatttagatgttttaggtatttgaagaattgtaaaatgtctttggacattctccctaaaaagaaaaatccagaacaaaccatacatgtacgtgaaaaagaaagaatgcttaccatctgatatgatttggctgtgtcyccaccaaaatctcatcttgaattgtagctcccataatccccacgtgtcatgagagggacctggtgggagataattgaatcatgggggcaggtttttcccatgttgttctcatgatagtgaataagtctcacgagagctgatggttttataaagggcagtttccctgcacacgctctcttgcctgccaccatgtgggatgtgcctttgctcctccttcaccttccaccacaattgtgagcctccccagctatgtggaactgtgagtccattaaacctctttcctttataaattacccagtcttaggtatgtccttatagcagtgtgagaayggactaaaacatcatctatgaaaagaaaaatacagagattaaaaggaattgagatttgaattggctttatatgtagtatcatccattatagatagtactcatttgattacaatataaattcagaagcagaaatcattacgacttcaataaagtatacataaaatcaggaaatcacctagtcacattataaaacacctttatgaagatacagctataatataaaagtattttgaaaatggttgattttatactattggaaagtakaactggatgttaaaatttcagcccagataccaagatacaataaatgtgaaatgtaaaatcagatttccctatgcaaaatttgcaatgacaatctaaaatcagattttcctgtgcaaaatttgcaaagacactttggaaatctgatttcgtgactttagacacttcaaccagcatgaggaggaaaaggaggtatgttggtttgctggagctgttgtatcaaattactgcaaactaggttgcttaatagaaacctagtaaattgcttaatagaaatttattgtcttatagttctggaggctagaagtctgaaatcaaggtgtcagaagtgccatactccctctgaaacctaagggagaatcatctttttcctcttctagcttccggtgtttgccaacaatccttggtgtcccatggcttgtagatgcatcattccagtctctacttccatcatcacatggctgtcttttctctgtctctattctcttataaggacgccagtccttttagattaagggcccatcttactccagtatgacttcatcatgaggactatctccataagtgtgcacattttttggtactggtggttagtacttcaatatatcatctggggagccacagttcaacccataatggaaagtatcagaatatgragaagattacaagattttgcctggagagattagttgccctccctctagaggagatgggctgggattctagcttccagtaagaggaggattcaaggccaggaagttcttgagcttgcaacccatgcaatcacacagatccctacaatcttggaattcttggtaattttataaaaataagttctgcattttcattttgyactgggacctgcaaattatgcaggatgccagttggagagcttggtatatgcttctggtacttgagaatatggcaggctgtggcctgactcacacatgataaggctggcttgtgacaactgaatacagggagctgactgcactgcctaaggttagcctgcctcccagagttttcacaaaaagtggctcacttataaaatatgcattgtcctctctctttgcacttcagttaagaggtgctcagagatgggaatctctaagaaaatccaaatggtctcaggacagggagctttaaatctctggcaggccagagaacaggaaggagttatacaaaccagttcaagtaagacctctcttacagctttgccactctggaagaataaaaaaataaaaaataaaaaataaattgattagcagactgggtgaatttaggagtgggtaggaacagtgaggaataaaaaaaaagcttaagtcgtaaaacagaaaaagcctttgcctctgcaggctgccaacataaattaggcccaatgtgaagaagggggaattatttgatattacattacatttagagttttgattagtactactaaacagtatattctaatttctgaattgaatcccaaggtgatctaaacaggttagccaaaaaaaaaaaaaaaattcatgtacaccatgtttttcatttaggaataaggaaagatatgttatctactccaatacattgtaaagggttagtggtgttgtggcctgaattgtgctcttctagaaattcatatgttgaagtcttaacccccagttccttagaatgtaaccatattagagatgagtctttaaagaattttggcatcattagggtgccctaatctaatgtaactggtgtttttataaaaagaggagattaggacacatgcaaacagagaaggaagaccgtgtgaagacacatggagaagatccctcttacaagccaaagagagtggcctcagcagaaaccaactctactaagatcttgatcttggacttccagcctccaaacctgtcaggaaataaatttctgttgcttaggccacccagtccatagtactttgttatgacagccctagtgaactaatacaacagtaaacaataaaaactgagttattacagtgattagtttgttggtttgtttgttttttttagaggagtctcgctctgtagcccaggctggagtgcagtggtgtgatctccgctcactgcaaattccgcctcccgggctcacgccattctcctgcctcagcctccagagtagctggaactacaggcgcccaccaccacaccctgctaattttttgtatttttagtagagacggggtttcaccgtgttagccaggatggtctcaatctcctgacctcgtgatccrtgcgcctgggcctcccaaactgctgggattaaggcataataatcaacaaggtccataaaatggagcatagacatcatcacctgtatcattatcaccgtcttataagatagctgagattaaaagagttgactcaaaaatggccattttagtggttgtttgtagacctagcttgactgaaggactacatgagaatatatgtgatactagatagctcataattttacagttgagacaacatgaacattaagtgtgaaacagaattttaaaaacactataaattactaaatccataggattcatacaaagagctctacatgttacattttgcagtactgtaagttggtatacattcatagaaatataaatgtaattgcacaatagaagaatagagcaaatttatttaatgtaatatatacgaagcatagaacacattttttaaaaaaggtagtgttcaattaatgttaactttctccctgtttcctcttttataatggaaggaaaggcacagaaattgattgtttttccctgcttctagtcagcttaatcaaagtgattagactttgarccaattaattgtcattaaagtcaggctgccactggaacaaatggaaacatatgctaaatctatggttcatgtaacacagttctgctttactaactattggtaaccgatgataaagcaatttgagagataattagaaaaggaagaagaatagtttccattattttaagagaatgtacaatgagattttattaatgaatgaatcaatcttgtatcgtgtagttatcagtatatgtgatagtttaaggtaaagtgcttcattggtgtgcaggttagaaatattttaactcacatagtcaggcataaaggtttcaaccacagcaaggacaggctgggccttacacatactaactgagagtgtctgtggagtagtgagatggaaaaacaagcaacagctatagggaatagctgcttcctaggaaatacagcatgagatttggagattgtccccaaagtcataaaggaactcataagtagttaatctagagggtcataatacaatgctgaaattatcagaaacatctgtcatcaggtattataaactctctctcgggacttgtgtagtggccaagggtcagcacagacaggcaagagcaaacattgctggacccttatactaaaatttcttggcagtattgggaagaaatcctcaatttgggattaactccaagactgggaataataactctaaatatcagctactgaattttgtctgtgtgctagaatctctgcaaagtatttcacatataatgttttcagtatacccaaagtgaattccatgaacctttcacagtagyaaacatgaaaaaaattttaataatgacaattatgggttaaaaagctaatggatataaatgataaataattgagatcaaacctaataatttccagataaaatcaagaaggatatgtatatactgacatgcactgacttttttattattatgaagagtaaaagacatcctagaaacaagcatacaaacgagattatttcccaggtacacaaagcaaattaatcctgattttacattaatccaagaaaaataaggaagcattatctacagattgtttttaacattgcttgtgagccaaatattttaacatctgttaattttttttcaagtacaaaggccaaaaaaaatttagcagacatataatttatatacacatataagtgcagaaactgttctacagatatatctttcttaaatgtacrttacttataactgtaacaaccacaaatgaatctaaattagaaattgaggatcaagggatatatggtagactgctctctgaaaggttcaacaggtactgtttccaaactatcttaagasactggagaagaatacactgtataaaaacggcctgagccattagaaaattaaggctgaaatggatgttatgatgtttccttttacactggcatttgtacactttaaaaggaagcaattctaatgtcgaagactatccttcagtattgaaataatcctataatgaacaaaagaaatttctctagaaattttcttctctcagcttaagattctcacttgtgtaattaaataagtttgtaattgtgtttaagataatacggtttggggaggatatgaatatttctgtttgatgggtttttattttattcttcttaggtgaccatatgttcttcataaaaaacatatgaacatgaaaaagtaaagaacctagaaaatttatttgtgaattgaatatatgaagtctgtgttatattttacataattcaattaaatgtacttcacatttctcaaatttgtatattattgagaaaatgtataacctttgtgaagaattttctgggttttgttgttgttgttgttgttgttttgagactgggtcttgctctgtcacccagactgagtgcagtggtgtgatcatggctcaagcaatctgccaacctcagcctctcccactcagcctcccaagtagtggggacaacaggcgtgtaccaccatgcttggataattttctttttattatcgtttgtagagctgacatctctgtatgtttccctggctggtctcaaactcctgggctcaagcartcctctcgccttagcctcccaaagtgttgggattacaggcrtgagccaccgaaccaccgacccagccccccataatttccttttaagcggttggcagaagagggtatttgtgttctgtcattgattttgccgcttcctctcaccacttcttgtggttttcatagaagttctgagtagcaatgctgcagaggcaactcttccaagactaactcgttcagyttacggagctccagagtttatgttatttgtaaagctgacttcctcagatttcatcagatatctttgagaaacaaaaagaccctgacatgacctttctcattatgtattctgttgacattgcaaggagaaagaaaaacccacagaatactgaacaatgcttatcgtagttaaaagaagaaaacacattcyataattatgtgcttaataaccctcatgaggctgggcatggcggctcacacctgtaatcccagcactttgggaggccgaggcaggtggatcatgaggtcgggagattgagaccatcctggccaacatagtgaaaccccgtctctactaaaatacaaaacattaggccggcatggtggcgcatgcctgtagtcccagccactcgggaggctgaggcaggagaatcgcttgaatccgggaggcggaggttgcagtaagcccagattacgccagtgcactccagcctgacgacagagcaagactccatctaaaaaaaaaaaaaaaaaaccctcatgaaaccttaataatcaatgttgtaaataaattattcacaccaggaacaaaataataaagattattatagttcaattgaattatctaacaaagagtccataatccaccgtgacatttcttggatattttcagaagaattgatgtagttaagcttaggcaaaccatattagagagataagtgtagagcctacctttaataagatctctagagaagatacttctacaaccttcagaagctcactgacagtatttaataaaacttacacgaygtacttatgttatcagaagaaagatttaaacttctatatgaaaaaatgacattgtagaattggagaactggtcatacaatagtaggaacagggactgccttcactgagctccatgcagtttgtaaactttattttayttaacctattgwgagctttataatgcaagtatcatgaaagaactacagtgccagcaaataatgggtatttaaagrtttgttttgttaaactgaggcctcaccaaaacatcataaaacagatgactttgtccctattttgcagttgaggaaaaagactcaaagagatgaattagctttctcaagataacataccagcaatcgtttgaaaacacaagtttatctgatacgaaagcttccctggatagatctgctctattgtgacattttaaaacatacattttttttattagctgaatttatattttcaggtattttcttacactgctgacaaagaaatccgaaccgatgacttgtgcttggatgtttctagactcaatggacctgtaatcatgttaaaatgccaccatatgagaggaaatcagttatgggaatatgatgctgaggtatagtattttcttaatttacttattatttgatgcttaagctcagttatatatttcaacattcaacatttaaatcttaagctgktttttatctacattggcagarttagattttcaagcatgcaggctcatatccggtaanattaggatggcatatcatataaacaggtttcaccaaattggtccattaatataaaatatgaatgaggacaataaaatcagttttgtgtatgacaacttgttatctccatgtacatgccaaacataaattaggcaagaggtaagctaagcctatctgagaggtttgtrtgaagatgtgcatacaggataatattgacaatatgtccatattttcaaattttaaattttacaatactaatcactgacatttatgttcctcaactggaaggaacaatatctgacaagattaacaagatttctttactgtttacagttgtaaatattttgcagaattcagtaaactaattagtcacataaaaagttgagtagcctcttctcaatatagcacacctttctgacagagaagagggagagaaaaccacaaaattactgttggaaatttatctccaggcagtgtgtaaaaaccagatcagccatcagatggagctaataaaaaagaaatattttcctttgcataasgaagcttactcttgaaaacagcttcatttctttcagttttcttttttgattaacaaaatgaattggttgtctgtgttacatttcccacattattaagtggtaggtgatttatttaaaaggaaaactaaacttcgttctgcttaaaagataaatactactatagaggtaaatgagtctcacagatgcagtattccatgcaagcctaaaattttctacaagaataacattttaaaaaccaatctacagagtttttggtattgttgatattttagcaagaccttttaaaaacctttttgaatgtcgttttaatatttgcatgagtctgtagtttcttaagttgaatactagaaaaatttactgaattctcataggatttgaaactggttgtgcagggttaattttgggcctaacactcatacagtgttaccaggatcttaggacacaaaatcatcttctgggccataattgagrgcaaacactgagaattcttcctatgttgtaccagtgtgattaagatgctactgccttcgctatatcttactcaccttgtctgaccaccaatttttttctcttcaactattatttattggtaccatccttgatattaagcctacagaaaacagtgcctttgcaaaatacatgtaggtaaatccttcatcagtactctcttctatgaggaaaagtgcagtaaaatgtacagatatagtagaaatcctgtaagtgatatttgtttttaaataaaacttgttcttcttgttgttactgttccgtttctaccaggaacctggggctctactgagcttatgctaaaaataagaaaatctagaatatatttattaagaaaggggaatgatcgtgtacatttttataaaagcaagcagtgtggaattttagaataccacttttaatctttaaacttttccataactcttgagtgaacaatgtcataactcaaattctttcatttctcaaataactactgttagcaatttggtgtatattttggtttacattttctgtcagctagtagcaatgctattgaatactaaggaattttaagtaaaaagtgaaaaaaaaaataggtagcttcacataggtagataaataaatgatttctataaatttactcttttggatgactagtagttatctgttgcagtatttcagagcactataatattttgtgtcatgtttactttgactttggaacacacgcacaaaaagcttataaaatgtcataaatattgagaaatttttattttaaataatttgatcatctgaattatatagcttaattaaattctcttatatgtttatgttttcaaaattaactagtgatgtttacattgtctaatgacagcactttgccaaattaaaaaatgcataggtcataatctaataaatgacatgagaatagagcaattgtaggaataatacattgcctttctggaaatttcagctttgatgtgcgattatatttttgagaaggtcgttaaaaaggatkttttttaaacaaaattgaaatataacatttattactatgcttttcagtttyacatttagggtttctttagttcacagaatggttccaccccttgctacccacagggtgattccaggagtagtagcatcacctgggaacttgttagaaatgcaggatccgaacccatgctaaacacactgaatccaagtttgtattttaacaaaatctccgatcattcatatacatatttacatttgaaaaggacagggtcaaatatctatgtatcttccatagtctttttatacactggttaaagaatgttacaaatttaggaaaaggcatgaatacaatttggaaaatggcaaggcctccagaggggagcagagagagggaaagggagcaaaaggataagaggtgttgagatgagaaagaggaataattgctcagtggttctattcttctcatattccaacctgtggaaagtaaatgcgcactgcttactactttaactcaattctttatcttttgctggcaaggacaaaattattctttgaaaaatctctgaggtggtgcaggttcaaggcagaataaaaattgttggagttcatagaattacagaactgaaatgtaccttaaagttctctcctttaagcctttatcaggaggaactaaagcayaaagattacaccgctagcagcagagctaggattcaggtcctaataaagtattccaagcaagctagctatcagtacaattgtgaatctcaccatgtgaacagcacaaatattccatcaccttatctcccatagtcctttcaatcttagaaaagaaagtcataaatagaagcaagattgttggaatatccagagaaaaatggaaacagtgtcatgaagcctcaaaagatggaatctatccagctactttggttttgtttacttcttaggtgagtgggggaaaagagaaggaatacagttcaacacgtatttatctgttttctcatgcaattcttacaatagtcttataagacagttattctatttttcacattagtaaaatgaagcatagggtaaatgcctcgtttaagtttgcacagccagattctggcagtaaatccagcaatttttctactacactacattgcctcttgatgttgtcgaaaaactggaaataattagattctctttcagtggttaagatataataagctaaatatacagtatttcaaatggaatagctaaatgctatcagttatttgttatgccaaattttgaactaaaatttctcatttttttaatagggggaaaggtgttctacaataaatatggtccatttagctaaataagcagtcataaaactactttgtcattttgctctaattgcttacaaacttcagctatacatattcataatataatatctaattgcttatccttgtaattgaatgaaactaagcacatgttagtaataaatgcacttctttggtcaactttgatttcaartgtagtttctcacacccctaactaaatagtccttaaataaccacgaattcaattcactgtcatcttatatgtggcctaacctgtttgaattgagggcatcctgggcatcattagcaaaattgtggggtacctacgtggtctggaagcttaaataaattgcacaaacccttctgtgccatgaaatgcctattgccaggattaaatgaaragaaaaaaattcatctcactgagacattttaaaaattatttttataaagttctgtcatccattaattctattgttttcaggtgttcttatattctgtttgaacattataattatgttccaatcaatttagaatatttccctatgatatgtgcacataattacatttctttttgaataactaggcagctacatacagtgtgagaatctaattttagatcagaacacttatgttcaacaaacactatgcaacaaagaaaaaaagggagaaaaatatgatactaaaaataacttatttttcatgtgactgagcaagttgacttagaaaatacttgttgtgaattctatatacatctgtatcaaataatttccagagtcacaatataaggaatttttttccataggtgaaatgtgttagattaatatttagactttacttacactaccatcttttatttacctttattagagagcaggtaaatgggattataatttcaaggtaagtgatctttaagtgcatcccagccattcccctgtgtagcattcctaagaaaaacaatggctcaatttaccttttgaaggttgtgtgcattacacagttattacctttccatattcctattgacccatagctgtgatttcttattagaagtagtgagtaggaatttcaatagattagcgtcatatttgtagttcctatatgttaaatgattacacttcatattttataatatttctgttcgactgaatgcgtagattaccttgtctggagatcataattaatgttttgagtaacaactttgttatattaatttttaattgttattctatgcttgattaacagaagaactcctattatctttgctattaaattaaatatagtacaaatttatacttattttgtatatgattatatgtaataacataattgattgggttttattttaatcttttactataccaacttttaaactgagacctgtgcgattggctcttaaatcaactatgcagtcagttcattaaaatatctatttttttaaattagtatgttttaataccaaggtatggcctaattttacaatattaatggctcttattttgtcaccaaaattgtttagcctgattccagttggctttaagtaggaattatatatttggaagggtaaagttagagatactccacgctacattttatgttagtcaaacttgcaaatatatttaaaggcatgaatcgttaatatttttcttatgtatttttacatgttacgattaaaatattctacattgcaggcaataccaaggctttrcattctagaggagaacaataaagtaatactatattataaacaaaactcaatactatcttagggtttagatgatcctatttttagtcaatattttaaataaagctataggaaaatatatttggcagtaagttgcrtgtcagcctggatgtcacattgtcttcaaagttgagttaatatagctggatgtagtggcatgggcctgtagtaccagctacttggcaagctgagatgggaggattgctagagcccargagttcaaggccagcctgggcaatatagtgagaccctttctctaaaacaaaacaaaagtagactaattaggcatttgcaacaaaaacagatawaactaagggttgatatacctaataaagagcatatcaacccttaattactatactttttgaaagggaaatagtataccacatatagaaatgtgcaaggacttgaataaacagcatagtagaaatgtagccaaagaaaatgaaaaaaagtttttaaaaaacataaataaaaatcattttatgtgtgttactgtattcatttcttgcttatcctttcaatacagcaagaaatgtttttagcagcaacatgtaatattggtgaagatgcagtgagactgacacccataaagtatcctggcagatagcaagcacaagaagtgttagctgctgctgctattattacaaaattactgttatagatatattttaaaggactttgctgatatgtgttaaagtgttcatgtatttgaccttgcaatttcacttctaagaatcatttccaaagaaataatgacagatgtagacattgatgttcagagatatttgccatgtgttattaataatgacaaatatctctgaatatcaatatattgatcaaatatctctgaaatacaatatatttttgttatttgcaatagctccaaattggaaagatattccctgcaaataaaaaagttaaatggattttggaaattcattttagagaaatagtttatttcttaatagtatgtttgtagattattttagtgatagaaaaaatgcccacaacatgaataaaagaatattttattatatgacctcaattgtataaatacataaaattattagaacatacatacaatattaataattgttatcttttcaaacagtatactgagaaaaaaatgaactatgctttgttttcaagcaaatgaagacactaaataattttgtgtgtttttaaatgaaaaataatttttgtctcaataaggacaagatttgtaatttttcttctgggctatggctttttagaagtacctggaatgaaacttctktgactattttttcatggccattcatttgataaacacctttgggacatatgttacagtcatttttttaatgaaaattctatattgtatttatgccctggggtcatgtttccagaggataagcaaaatcattttgtttttgttttatgtcataaaaataatttttcttctatattacaaacataattaacatcatttacactaatatctttgttgttaaagtggcattttccaagaaaagttcacttcaaggagaaatatcacygagagtagaggatgatctagcctagcagttttgaacagtatgggtggaaaattcatgtttggtttaaaaacaaaaatataaactagtcttcttaaaaaatcaagctatatagttaacaatattatttatagttacagttttaatattaactacatagttaatattatgaatacaatgttattttttctttctttacaaattatgtactattttactgtggaagataaatccttgaaaacataaatccaataatttgtgttcattaagctgcctgagagaagtagcttaattttaacaggatttattgtctgcactggtctttcactaagtgtttgaatcaacagacttacttagtgtctcccaagggcaggcacggagcttcaagatgtaggtggccatagtctgtggctttcctggagcttatgttcctatggaggaaatagatggagagcaagaaacagacagataaattaattaattaaaattgtttggagaattagattaagagttaatctttttctttttcctcccttcattatctacctttctaattgacatctaacaaaggtggcaatgtacatgtggaacacaacccaggttagccttgtaaaaacataagtgggagcaatttgagtaccatactgttcaaagtaaagccttaaagctaaattatcctcygaatttgtccctgatatttatttaattttagggtgaaagaatgaggaggccaagggccatagctggactaatcaactattttgaatatccactcgcaaataactcatctggtactaaaaagcattgtattactaggatgaaggctgagaatataatcttttatatctaaaataaccttttgccaaaaatatttcattatttwatygtaagcccctctccatattctcagtcttatcttcatttactccttccttatagggttgatattaaagccatctaaaaaaatgtggctcacagctccatggatacaattattgtgacatgtgccttccatctttatccagtagaaattgcatgttgcctaggatgattgatttattactgtctttgtacttgattttgtcattattcgttattttctttgtcaaacagacccacactcttcttcatataatcacccagtcttgtctctcagtgaacaaagtagctgatggctcccagcatcctactgtggaaacctgtaatgatagcactttgcaaaaatggctactaagaaactatacaagaatggaaatttttagaaatatttttgggaattctactgattacattctctaatgatttttggaggtttgtgttgcagattttattaaatttattttagcatttttgttatgttcagttattgaaatctggaaactcctttaaaatgtggttaagaaaaatttgtatgaccttttctccatggagttaactctctgtcttttacttcctagctactcattaatttggggactgcatatattaagttgtgtttagtctatccttaatgagtagggktttttttgttttttttctttattttaaacatatatatgcataaatatacttgatgaacgatattatgaaatattaactctctttgaggcaaactatagccatgtctatatgacaacaggttctgcgtcatcagatctgaaaaaaatcgattaaaaaactaacagggcyaaagaaagtattgtttctaagacactggaatcatttatttttgtttctttttattcagatactttggttaaatgcaaatatggcatatcctttctaaagtatcttattattttaattaaaacactaagcaaacacattattaaagactaagatgtgatttttaatacctttataaagaaaattatttctaagcatttctttgtggttgcctaagtgaaacaatatttttttaagttgtatcttttatctctcacttttaygatttgtgactatcttttcagcaagcaataaaatgaatcattacacaggtcaartcaacaaactgatatggaattcttgtaaagagtgcaaataagaacatgtcctagcttttagttttaaagagtgtattatccaataattaaaggattttactttgtcccagaccttacaatgagaacacaaggaagattggggcatttttctggttcagatgaaccacttaaagattgttagtggaggaaacaattgagctyagaagtcttggaacaaggctagaaatgaaattatggatgaggggacaacatatggggtactattttacttagaactatattcaagccaaagacattccaaatgtaagagttggtaaagctggaaaagtctaggtcttttgcacaaagagaacttatgtacagagcaatttatgtgtattatcttagtttgctttcagagcaaccaatcctgatacgtgcagtgccaaaaaaggaagcttaggcttaactaaatatttattctcacaagtctactgtagagtgctagagcagagaccacagagtgcttctctccataggagaaattggagcagttcccttagcagttcttacagccttctttacaggtaacagtctgttgcaaggagatgagatccacatcaggcagatgtcaaaaccatcctggcttattagccttatcctcacagaagatgatgtttccttgtaacaactccataggcctagcttccaggaaccaaataaaacatttagaattacaagtctgcatttagaaaagcccgaagtttgcttttctgttagtatatatatgcaatttatcagttgcagatgcagtttatcaatcagagttcacttttaccataaacaatgtagcctagaaacatagttaacatttttaccctttcaaggttgccaggggattacagttagatagttgactgaaggtcaaattttttaaacaaaagggaaaaactgtatttgtaagcatgtttaagtctaagtattttctgacaaagaacatgattcctcagaataatttgaaacatgcctgagtgttcacagccagtaagtaaaggacaggaatttacctgagtctaaaaggtctggttttccactgcactacattataaaggagaagtatttagttgtttgtctctgcagcagtgggttttgactattagtgaattccttcaaataaatcatatattgtttagaaagaacaataataactagtgtttttaaaattattatttgtgcagttgacaacatctattcaacatgttccttaaagaaaaatctccctaagtctgtgctatattttgaactaaggtaactgataattgatcaaagcattcaactactatgatatgtgatcaattgcaataagacactgggagtgctttccggggtagcttaatgggcaatgacatatttgatatatgaaaaatcatactttttttaaaaagggatctaatagaagtatgcaatggtaagtgatatttttgaaagagaatatatacayaaaagaccacaggtacgtaacaaaaatgaaacaattttgttgatttttaactagaactgtctagaaaaaatacatattgtttttgttatgcatctttattttttcaagctggctactggttgaatttctggcataataagcataaatcagccatcttcttgcctatctttggccatttattcctttctttgttttttagtgtaaatagcttgattccatgttttgaaagagcaacaacaaaggtctcaatcttgaaatctcctttgtatctaattgccttgctcttttaatttcctgcttgctgcctcttaggcctcttccgccacaaacctattctccattccatcatttcttacaacagtgcagtccacgatgttttcagtcctaatctaagcaaactacaatcgtctggctgctgttcctctacsatttttatggcccaccccttacatttactttcatcccattttcaatgtagtatcatgagccaaaaaaaaaaaaaaaaaaaaaaatttctttgcctttaattttggtaatttgcaaaaaaaaaagtatctagagtgctattttcaagatatatttgcaaatcatctctcatacattcaaatacttcgcttctggttggagaggttttcatataatatgatcctargtattgcccatgaaatagcagaaatatatataattagtatgtataaatcatgttgatttaaaatgtatatctgaaaagtccaaaaatgtgatttccaatgtacrtaaaaatgccaaagagaagatatataatgactggttaacatacaattattggaatttatgaagaaactaaaatataaatataatgtttaaaaatatgtgatcatcatgcccctgtttttatgttatatttttaagattcttaaaaatacagaccaaactattgtaaggattttatcaagtaagacagattattttttgctctgataatcactttctacaatgagtgtcttacagtcacagatactatagcttgtttagtattttgaaatgggaacatctctagcagttttgttcatttgggtcacagctgtgccatctatttgcatgtttaccaaatggttactgaataacacatgcctaagaaaactaagcttttgcaaaagcttgttaatatttgcagtcctcaactgaactcggagctcacaaatgggctttttgcaaaggagcctgaattcttggcaatgcttgataaatgtcagtcagtttctttagccatctgcaaataaaggtatattagacaatgatgacttcataacagtcaaagwtgtataataattaatccagggacacctgtgcacagttccttttacaaagctatcacagtgtattrtactataaaaatcataaaggattttttaaagaacagattttatctgatgtgctagcaaagctaaagaygaaataagctgcactgattattggttatcttttacagagactcacgttgcgacatgttaacagtaaccaatgtctcgatgaaccttctgaagaagacaaaatggtgcctacaatgcaggactgtagtggaagcagatcccaacagtggctgctaaggaacatgaccttgggcacatgaagatcatgtcctccaagccatgaaagtgtctacgcttttgtttttccattatttcaattgggggaaaatattaactttgctgaattgaaagttttaaaaatccttttagtattctaaaacacaattgtttctaattcgtttctagaaatgtttgcttatttccctactaaaatttgtatctgatcaaagcacataagaatataaataatagcaaactactattaaacaacagaacaacttgtaaaacaaattgtgtttgctttaagaaaaatstttattgcactcatgtcatagggttaattggaggttattttatttttggttgtcatggtgattgaaagagataatgtaaatgccttataaaatcttcattatgaaatattatcagttgctttataaactcactctttttatggatccttcatggaaacatgtttgatttctgtgtctacaacagggccacatattaaattacttctgaatggtgaattcatcttacaaaatgttccaagttttggacaaggaaaaacattacattggatattgaattcatrgagcctttacagaagcatcacatttaaaccaatgtgaattcaaaaaagagaaggaaactttttaaattcaatttagagtacataaaaaaagaaatccgcgaagcattgaggggaacaagatgagtctaatccgcagcacttcgatcactgtgagagaactcaaagtgggttgcaatcattcctaacacaggctgaaactaaacaatcttgctcccagagtttatgttggatactcaattcttaaccaaaatcttggtctccacaaactctaccatcccttttctcttcactctatagacagtggcatgccattgatgctgtacagaattgcaggtgaaagggagaattttagacttaatttttaactctattgcacttaaagattttagttaggttaccactgtcattttcattttctatgttaaagaatacctttcagtgctgtgctccagtatctaaaaattttatcaccaggggaataaactcaatacacattcattaaacttttgttgtaattaaactgctatatattgtttgccatatattatggcccaaggaatatagttataatcaggctacattcacattttcttttctcatcttaaaaccctttatgttcaaaatacattagcagaggccatgaaagtgaaaaaaaatcagatttttgctagtaagtttttatatttgacatcattttaaatgctcaaagagttgccctatatatgcatgttatccattataaatgcactcagcagctaagagaaatttgagaggaaaagtggaagaagtgttttctggagcagaagattccacttctttggtcctcatctttacttaaaaagctcttatagaaaggattaatcattttgactgcatacaaactatgtctctgacatgcacatacactgctttataatgaaaatgaggacactttctgatggtcagtaaaatcttaaatgatttttgccactggtattccttcctcttttgactttttattggtacaactgtagggaagaatctacaacctggagcatttcaggtttgctctttaaatatagacacccctcaccatgagctctctgtgaatccgtgaatttcctaaaattgtaagcaaaatgttgaatatcagggcatttttttttctgaggtgggagtatgtcactcacagcaaacttggaaagaaggctatgactcccaagaggcagtgaaccattgccttaaattaatagcagcctctcaagtccattgaggcctcatgtaaaattcccatttttcatctttacactccttttctcccctcatttcctcttctccttactaaggtaaaaagaccctgcacagcattattacttaagttgaaaaagcttcaactctcaaggactcatgtataccatatgttccacttattgctttgttagtcaaaatgcatgttatgtagaaaatggtcaatggcaaatttttataaatacagctaccccatcaaagctgaacttgaaacgttttagcagaattttaaatatgtgaaagttcattgtggtcatggtgagaaaactaaaactacatgagtttcatgttagaaaagaatttttaaacaatcttcagatggcttgaacacgtgccattatagtatctaacaaaaagtggcataaaatattacaaaacatccaacactagaaagcaatgactaacatttaatttgtttacaaaaatgtttattgtcttcagtacaaaaagttaaaaccatgattggattcataatgcacttgtcttatcccttatttatggagctagactgacatatttcaaaccaatctcttctgtggtcttctccatctcagttaatgcaacttcaaccttccagatgctcaggtcaaaaactgaaagttgcttttgactcctctatttctgtttcaactctcgtctaatccaacagcaaatccccttgatgctacctttgaaatataactagaaaagaatgacttgccaccatatccactaggtgtcactacctctaacctttttaatcgcaatatgcttattatttagttccctaatttcccagtccttgtcttgaacaatcttttctcagtacaacagccatagtgattctgttaaccatgaatttgattgtgtcacttccctgctcacaatcttccaatgacttctccctccggtggccttcaaggtcctttatgagtgttacccctctacacgtccacaccactcaccacacatacatacacatgcacacacacacacatgcaattctacctttttctaacaccatctcttatctctcattattctgcctcttacttaccctattatggctcccaagaaagttcctgctttagtgttttgttccctctgccccagagagctccccttagtgatctcagttcaaatattatcttatcagtaagacaaacccttctcccatctgccttccctatcccctgtacctgacaatctatgagtttgcttctttatttctgtctatacttccccctccccagccccaaacatgcccatcacatgccctagaaggtaagtcccatgaaggcaggggctttgtcagttttgttcatttggtatttctggcatatatattctctaaatatttcttgaattaatgaactgaaaaatgtgtgttaaagttgctaagtgtaactgtatcatactttttttgtattttaaattttaaaataaaggctaatatatttagacaggatttccaaaaactttgtcttcaaattttaattttcttcctaatattcttcacattaaactatggactctaattttctggataaaatatcctgccttatggaaatgaaatatgaaattttattaaaatgctgctatattacataagttgcttcattaagctaaaaatggtttttattttttggttgtgtccaatggccacttgaaggtataagattttgactttcagaggagagatatcactgtcttaaaaattatgtattttcatgatttcttaagaactattactaaatttatcttctaagtgcagtcaatggaataaacacagagatttttaaaggactttacagatgaccttgtcttagtttctctgtttatagataataagactgaaacccagatatgtaatataacttttctaaggatcatatatctaaagtggtgttgcctggaccccttattgttaatataaactaatactgtcactcaaaaaattatagaaatggaacaataatggaaaaatatcttcattaaacatgttatggggccaggcatggtggctcacgcctgtaatcccagcmctttgggaggctgaggtgggcgaatcacttgagttcagaactgcgagaccagcctggccaacatgacgaaaccctgtctctactaaaaatacaaaaattagctggatgtggtggcacgcacctgtaattccaactacttgggaggctgatgtgagagaattgcttgaacctgggaggcagaggctgcagtgagccaggatcacaccactgcacttcagcctcaagactgtctcaaaaaaaaaaattatgattagtatattgattctttagaaatatttaaattcttactagtcatttaaataaaattagttctttaaaataatacaagcactaagacctacagcagaaataaactagaaacagcatgattacaggaacatccaagcatcatttggcaaactgggtttcagggaagcaaagccttttcagtagtaactaatggaacatactcactttcattttccttctaattatcttcaggttaaaagtaaggtttggcctacagcttgcacagagaattagaccacctattactgtgaagattaggttctatgttatggagcttcaaagactgcagggaaatcagcagagatttctaggcttcccagtggagctctgtaaactctggtaaacacaatccataaatttgattttgccatggtgcttagaaacagtctaataaaaaggaaaaaagtgtacagagagagaaaaataactacactaaaacagaactgtttttacctttttaaaaaatttggtgggaggttaggatcatattctgaattagttcggtaaacctcaaaatactgtctcccaccgcacatggtttcaccacttaagaaatgatgatcgtatctgctcacaaccattttacttgcatctcatttacagatgctaaatctagtctcagaggaggcaaaacatgtatgcattcttaagttataaagtgtactgatttcacaaatatgaagaattttagaaattcaaatttttaatggatgtgtcaccatctacagctgtcatcctgcatggctgatatctgctgcaaatcttgaataaatttccagttcagttgggcagcaaaaactcaattagctctaaaggcagcttgtgtttcaggattccgccactgcccattttccccaatatgtcaaaatatggaataggtgaaatcagcccctcttatgtatagtacatggacacatctgttgtgactacaccatgttcgaactgctactaaatatcagctattgtatgaatttatggtgttgaatgagcaccagcaatgtgttttaaataatttgtgtatatgtgtagcccagtttgttttatattggtcaataaattctaaagacaattttcactgtatttgttttaaaagaaaaatccctctgaaatactggtgaattcaggcagctcttttcttaaggatcctttaagataaagaccacttctgcgatacttgtgttacgttatataaagttattttgtttttgtttttagctagggagaacaaatcactcaatattctgtttttaatgagttagaatgagaatggaaaattagatgattaaggctatatctataatgttttttaaaaatgagattttcatcatgcattccattggtgtgaaaacgaaagtaagctgctgcttggttccagttgtgctgaaatttctgctaaaaatagcacragggggaaaaaagaacttgatgattacatgtctttttttgttttttttttttgtatttcagctttttttgttttgttttgttttgttgttgttgttgttgttgttttggtcagtgtagccacagctagaaaggagtaatttcaaaaatgttttagatatatgcttggcacatggttctttaacatttataaaagtagattgtgcataatgacagattttaaatactgtaagcattattagatgatataattgttcttttgctgtaaatttaaatatkyatacatttttgtagagttaaaatatgccaatttagttttcctttggtatatattgcctttttggaaaataaatggttaacatttcaaatagataaacaacgtcactattttatgcttaacctccatgtttgtggattatttaaataaatgattaagtgcctatgaatatctcctagcaccaagaaaatgttgtgttcccagtacaattttgttatcaaaatatataaaatagaaacactaaaatatgcatgattttaaagcatttatttttatttatttttgattctgaaatgatttgaggtggattttttttctttctgttttataaaaatgactaaaaatagaaaaatttaaaagtctcacatcaatgataaaaattatttttcagaatatagaccatacccaatacctggcttctgagactggaatcctaagacagtgtgtcagggtgagagaagatggagagaagctgcccactccacagcacagcgcaggatcaactcttcagtcttaaccactaagataatcaaaaagagcatttaattttctaaggtggagaaaggaaggaaggggaggaagagggaagcaagaataaagaagaaggaaaggaaaggaaagggaaggggaggggagggaagggaagagagaaagacgatgctaataatctgttttcataattttattctgaagagactcatctgaaatttcctgttcagaagtccattgatttgcaaacatgaacacctcgctagttttccgcaacttataactgtcagcaagtgtaaaggacatttctagattttgtcccttc

SEQ ID NO: 94114 - DNA, 14590 bp, Homo sapiens
gctgagtaaatgtcagctgttattattactacactattatattcagttaatcactcattccattcagcattcctaataagccttcctttagcttttttctttaatccaaaagtcaggccacagaatatcttgaaatcatgtttttggtccccttccctattatcctttcccataaggatgactagaatattaaagattagtttgttttatcagtttacattggctcaaaactttgctagagcttgaaatctagtatgcgttttgactttatctcataaactccaaagctgcattttatactaatcattttgagtatattgactattggggagtcaggcgcggtggctcatgcctgtaatccagcactttgggaggccaaggcaggcagatcacctgaggtcaggagttcaagaccagcctggccaacgttgtgaaaccttgtctctactaagaatacaaaaattagccgggcatggtggcaggcacctgtaatcccagctacttgggaggctgagacaggagaatcgcttgaacccaggaggcagaggttgcagtgagctgagactgcaccattgcagtgggtgacaagagtgaaactctgtctcaaaacaaataaacaaacaacaacaaaaaactactaggcccttggtttcccagggcctaatattcatcttcctccacctcctttatcacaggaggttccatcactagtcaactggggtcaagttaatcaaataacagaattgtaattttctaaatagactcattggccttaacaaactataagaaaaaccaataaacaaaacccacaacaaaaactcatgactgaaatacaagtattccaccatagctttcatattaaacctgctcactttagggcatcttggctttctcagaaccataacttaatagagaatcaattaatgctaaataagcgtttcttcaggggtccaggtatgtctagtcttctatttactggactgaaaatgcaaaaacatcatcactgtcctggaaggtctggaaaagcaggattataaatacataatactgcttttttgttcataaacagtctaaaaccctaatactgcacaaccttctcagcatttccctctacttttaacattttttaatctgcctactcaagaaatttaaagaaacacacacataaaaataaaaacctttcagttcagagactgtgtgtgtggtagagggaaggaacagagaaaagttgggagggaatcaaagaggttatcaaaagatctggactgaagaccaggcttcacctagaactagctctagttaatgtgaagaaaaccacattactctagactttagttttctcctctatataatgaagggattactggacttggaaaaaagacccgtgaattccaagttaatacattttatcttcacttagttctctgaaatagaattttagtgttttctgaacacttccagttcacataaaaattacagctgaaaatgaatttattaaagggaattattaggtagtaaacttgaagttcaaataaaataaaatctcaacaaagtatgatttttttaaaaaaatgaaaccttacccttcccttctctagttttataagcctgttaaccactttgacagtaaaaggtgaatgaatgactggtaatgtcctccataacaggttaaaaaataataataaattagaattcattcttgtatttctacacaggaatcattagctgaaaagaataatcttagccgggcatgatgggcacacctgtagtcccagctactcaggaggctgaggcaggaggattaactgagcctgggaggtccaggctgcagtgagccataattgcaccacctcactccagcctgggtgacagaatgagaccctgtttcaaaacaaacaaacaaacaaacaaacagtcttcatcagaaacatcaaagaggcggggcacggtggctcacgcctgtaatcccatcactttgggaagccaaggcaggagacccttgaggccaggaatttgaaacagcctaggcaacaaagcgagatccagtctctattttaaaaaagaaaaagaaacatcaaacaattggaatgcatgtagatcaaataagttattagctcttcaaaatcatcactaaatactaaattaaaatgttttttaaaacgcaaatgaagtcgaacatatgacccggcaattacacacctagatatacccaagggaaacgaaaacttgtccacacaaaaaaactgtatatgaatattcacagcaactttagtcataatacctcaaaaggagaaactcaaatacccatcaattgattaacagactaataaaatgtggtctatccacactatggaattttatttggcaataaaaaggaacaaagtactggtaccatgttgtaacatggatgaaactttttattatgctaaatgaatgaaaaaaaaaattcacaagaacccacatattgtatgataccttttatatgaaatgtccagaataggcaaatctagagagatgaaatgaggctggtggctgctgctggggcagtaaagaggtttatttctggggtgatgaaaacgttctacaattaattattgtgatggttgtacaactctgtaaatatactaaaaaatcattgacctacaaactttaaacgggtgaactttatggatggaatgtaatcttttattttatttttttgagacagagtcttgctgtgtcgcccaggctggaatgcagtggcgcgatcgtggctcactgcaagctccgcctcccgggttcacaccattctcctgcctcagccttcccagtagtagctgggattacaggcgcccgccaccacgctcggcattttttttttttttttttttttttgtatttttagtagagacggggtttcaccgtgttagccaggatggtctcgatctcctgaccttgagatccgcccgtctcggcctcccaaagtgctgggattacaggcgtaagccaccgcgcccagcccggaatgtaatcttaacaaagctgtttaaaaatacaaattaaggcataaaaactgggatgactagatacagattaagagtggttgatttgctggccgggcgcggtggctcacgcctgtaatctcaacactttgggaggctgaggcgggcagatcacctgaggtcgggagttcgagaccagcctgaccaacatggagaaacccggtctctactaaaaacacaaaaattcgccgggcgtggtggcgcatgcctggaatcccagctactcgggaggctgaagcaggagaatcacttgaacccccgggaggcggaggttgcagtgagccgagattacgccactgcactccaacctgggcaacaagagcgaaactctgcctcacacacaaacacacacacacacacaaaagagtggctgatctgcaagagacgttctgaatttaagtagcaaaggtagacccgatgaaaaacacagtgcttcaggttctgtaagaagcctgtgttacgggttttccatcctagcactctaggaattaggacatttcctcacaggagacaatcagttcttccagtcacacttcctaaactgtctcccaaatcctaaatgaagttcaccatctttagtataaactgattaagccaaaacttccctttcccgaaaaatcctcaaatctggctttaacaaggataataacaattcggggaaatttcagctaattaatatggacacacgtctagggaaaatggatgggggagataaagaatcaggaagctcgaatctacatttcaggagactggatatttgaaaaactgcacaatgatataaacgaagtataactgctctgtagaattaaagttagacttactacaaaagtcatctatggccgggcgtggtggctcatgcctgtaatcccagcactttgggaggccgaggtgagcggatcacaaggtcaggagatcgagaccatcctggctaacacggtgaaaccgtctctactaaaaatacaaaaaattagctgggcgtagcgacgggcgcctgtagtcccagctagtcgggagactgaggcaggggaatggcgtgaacctggcaggcggagcttgcagtgagccgagactgcgccactgcactccagcctgggcgaaagagcaagactccgtctcaaaaaaaataaatcaataaaaatcaaaagtcatctatggcatacactgtatataaaatttaatcatctgctgattacatttgcgggagtgatgttaattttgctgcagagccaaggctgagaatcgccaccacttagtaggtgtgtaacctggaggaagttttttctcaaaatctcacgttttctcaattctaaaatggaattgaaaaggtggttgtgtgacgggacatatttcataaaaacccttagcacagtgcttgatgcacagtaagaactcaacaatgttctctatgttacgtgaacacgaagtgaatttcggtagctcatcacccataactgattatatgggtccagacagaggatagtttataacaacaaaataatcatcatacttaatataattattatacttaatatttctaggcaaagtgactaaaaagggttcacgaatagatgaaatagaaagatcacccaagtattaaaaataaactggttcctacctcttgccaccttaaagaaatcactgtacctctctgaactgcatttaatcaactccaaaagaagatacaaaagtcacaggatctcagtagatcctatcaaatttatccagatcctatcaaatttaatccaattccagcaaaaagaattggctgggaaccgttcgcctctaaaaccactcattccagacaagtatgattgattttagctgattgtatagctttctttgcatttcatggacaaaacccagaaagctctcaccactattaacttaaatcttgggcagctgtttcttaattatcttaaataatcttgaaaattacctatcaaaaggtctactccgttttcctcttaaatcactatgtggctcatctcagcactgcccccttccagcctacaatcagcaacccatgaggaaagctgcagtaaatggatggatgaacaagtcacgggcaatttctgctcagaatgtttaacacaacacagacaagtcccaactcccaaagccacggtgatagtcgtttactttggttcagaactgccactagactaagataagcaccatgagcattacataaccacaacgaacttaaatattgttattcccattttacagacaggctcagggatttaagggacctaggcaaggtcacatatcctgtaagtggtgacgccacgattcagtctcattgcttttttgcttttccctgagaccaagctctttccagtacacggccaggctcgcgcccctcgggagcgcttgtgggaagcgcaaccctcgcctgcccgcaccaatccacaggtgcgcgcaggagccgctcgggggccctggccctggcccgccgaggcccggacagccccgcaggccatgaccgcaaccctcgggtcccgaggcgccgctccaggcgggagcgccaactcccacggcccttccgacccccgcgtcccattgttccgaatctcactcacctcggaggatgccggcgcaggcctggctggggcgctcgccgcgagctcccggcagcccagaaagctaggtcggtgtcggcaggatccgcgaaggcgtacccggcgacttctccgcctaccctccgaagcgggagcaggcgggggcgcttcaccctcctcgcgagacagcggagaccccagcggcggctgcgacccctgtgacgcaaagggctcatcaccaatggcagctcggaagcagggcagagagcgagacccaccccccagctcccgcgcatcaaaacacaacacccgccttcctcacgcatgcgcagcagatggacgccggcctcgggggcggggctcagcgcaccggcccaaatgcggcccctcccccgccgctccagaccccggaggagggcagcgcgaccctccccatcttgttactggtactcagccactggggacactgactgaatgttcgcccctaacttacccggaaaacacgagaactagttcgatgtcgtttcaaccttaccaaactctgcggaaacttaggaaattatctttagtgtctagataggggaattgttagatggacttgaagtctctcacctcctgttgtacgcctcccggaagcaacaccaggagtccaacgggatcccaaaccagagcccaaccagtatcctataaagtcttcagagagggatcccctccaggctggggagaaacaggacaacctaacaaaacagggcctggactcctccctaaacagaccacgtttttctccgctcttccccttcccactccctgaaatctagactaaaactcttttaagataactgcgaggtataaagaacgtctagagcctaagcggcccgttgccagattctactcctcaggcctcaaatgtgagcgccccaaacattctagagctgaacctggtacgctcgcccaccaaactgccgtgctcggggcttagtatctcacgcgcggcagttcaagaacatcagacacgctcaacaaacacttgttgcttgactgatacattatggcgggtaacgcgtcccacgtatttcttcttagagatatacattacgctatacgtttctgaagaatggctcgatttacaggggttcccacaacgatttgtcacatataaaagagtgggtggtatttttacgtcaaagatgaacaggcgaacgtccatctaaatcgtgtggtatcagatgcggggaggcgtgggggagggagcgggggagaaagcgttaattcttccagctttagagccagacgtaatatttaaaacgtggattgtttttcaaattaacttttaaatggacacgacagcaccttatcctgcattaatattgcattgcaactagaaagaaaaccagtggaggtacgcctatctccytagttggcaaaaaaaaaaaaaaaaaagcaatttttaacattttctcgtttattcccctctctaaaaggcgggcaaggcccccgatcacgtgataccgccccccaactccgggcggaagaggccagcgacagcgctgcacgaagcgagtgggcgggcgctcgtgcccggctaaaagatggctgctggcgcctggcagccaccgcctgggaggttactgtaaggcccgcagctcccgccagctcccgcggactgctgccgcctccttaccatgaagccagtaagtcgtcgcacgctggastggatttattcagtggtaagtcccggggatcgcgggyccccaccgtgtcgactcactgggcccgcaggcggaaaggccctatttcttcagcacccagaaactccaaaatccattcctgaattaagcatttcactccctcacctcgactccgcctcttcctggaggatacgatcttccgcttcttacgtaagggctgctgggtgtacccgccactggaaccccatttattcgactttgttactttaattcccaccttagcaatggcaacggyaacctgacgggggcgaggggaaatatcaggtagatttcacacctcctttgcgatttttggtttagttgctgcttgccatcgttttaatctcctggggctgcatcatctatgcttcgatggtgtctgcaagacgacagctaaggaagaaatacccagacaaaatctttgggacgaawgaaaatttgtaactcttctggatttaattatctgaaaatacagttctttccctcatgcttatgtagatataaaaataaaattcataatgcaaagttcccaagtttatttttgcattatcctttataayaagcactagtatgcaaatttttcacttagagattttagtattttacattctcatgacaaaattaacagcaacctaaatctgacagtcttgagtgtcagatcatagttggaataagcttttcaatcaagtttctraattcttcaaaaatgattcggaaagctttttttttttttgagacggagtcttgctctgtcgcccaggctcagtggcactatctcggcttactgcaagctccgccttctgggttcacaccaatctcgtgcctcagcctccgcagtagctgggactacaggagcccgccaccacgcccggctaatttttttgtatttttagtagggacggggtttcactgtgttagccatgatggtctcgatctcctgacttcgtgatctgcccgcctcggcctcccaaagtgctgggattacaggcatgagccactgcgcctggccggaaagatttccttaaaacaaaagtgcatggaattgctgttcttacatttgtttattgtgatatttcactgttgcataccctgataccaaattagtgtaagtactgtgtaagaaaaaaacaaacaaacatgtaactaaatacttttccataccgttttccaagtcaagaatgaccagaaaaagtaggtagtctctcatatttgtttagcatgtccactttttacttattgttaaattactcagtctcaaattgtacaatgcttgaaaacagatatgacaatttctgagattaaactttattaaagttacttttccagaaaattcagtaaatatggtaatataggaacaaacttaggctcataagccttttaactttttacataatctttaatgatgttgatcaggaaattctttcattggtggaattacttctccagtctccagaattgtatcaccctaggaaaacaaagatacagttagtacaaaaatcttaagtctacagaggtgatagttctattctgttctatgttcatcagatctcacatggaaaatgtacttgagttctggcattccctttaaaaggaccctagacaaagtagaagctgactaaatctgaacaatcagtattcaaaattttaaggtatagtgaaataatagggaaattttcactcagaaacaaaataatcaaaaagggcacgaaaattgtgttctctaagtgataaagggataatcttttattttgtatgaccccaataaatggaggccccagaaagaagttgcaaggaaacatctgcagttccagataaggaggtaatgtacccccagcaactgaatgtgttacgcaatcaccagttttctgattggcttacatactgaatacagaatacaaactttggctaggcagctggtccagatgtcttttcaattcttgatatagatgtgggcaaaaaggcatgggcattgaagccagaaccaagtggtaagaatcttggaacctccactgacaagctgtatagttttaagacagattattcaatttcagtttcagccatgtgtttaagatagattctgttagcctgccagtccctgaatgactgggaagagtagaattgtccccatacccaccccaatccctgccattccctgacctggtactgctcaggattatagtccaatgaaaaaataaatatgtttatgccattatacatttgggcaacaatttgttagtacagctagcattatcccaatagaaatcattgccttgaagtggcactaatgctgctgtaataaaaatcaagctatagggcactggcttagcagtctggtagcaaagataaagatggaaacaaaaggcagtggcaaactatttagcaaaatatctcctataacttggaagctgactgcctaatgaacttgaggttctagaagaagtagctgggaaaaaaagttatagtatgtgtttggatccttgggatccttggatgccttgggaatgtactttaagaagcatgagctcaggcaaaaagtggctgatttgagaggcgacataaaaatggagaggacgagagaacactttggtgcacgctagagactttctgttcctgaccaaaaaaaaaaaaagttaatagaatctaaaaatttgggccagtcatggtggctcatgcctgtaatcccagcactttgggagtccaaggcaggaggattgcttgaggcccagagttcaaaaccagcctgagcaagagtaggaccctgtatctaaaaaataaataaaaaatcaggaccttgtggtattgaaaaatcacactacttcagaattcctaaacaataagttaacacaagaaatctgagcaacagaagcccaataaaactcaaacagagggacacagccctatggcaaagatcagtttaaaatgaaggtagcctttgaaccagtctgcctcagatggcctccacatagctgccacagaggtgagagaggcagatgcataaggacaaagaaatgagacaagctggtaactgtgtataggaaaaacagatactggcatgagaaactgactagaagtaaacacattagatgtctaccaaatatttttcttttcatgcttctaaatgttaagggaaatggatggacaaaccaaacatatagtttacagaatcctgccagaatgtttgaaattaaaacaacctctggcattcaacctcctgcaagcaggtggcagattctgaagcccatacagccccctaaggagggcatgcttcccaataccatttagatgtggtctaggtagataatgaaaagaacaaaccccctggacagagccaggaaccaggaagaacgatggataaaggtgttctttcaagaaaacaaaatcagtgcccattcaagtaatttctcacacacgggttaggagtgagatttcaggattgccaagaaccagtgactactatgctatccaaattctaccactgaacaatgggtgtggttgggggacaaggatacagttaacttgtcttcttagttcactgatcctcagatcaacagaagtcatatataaacctgacatactattttacatcatctggagatcatggatttggggccggggtgcaatgatggaatgggactttgggatttctccctaaggagagagactaagtgtgttatgcatgggtaaagaaagaagccaagagctgtttggtgactagaaagatggaatgtagcagaaactccatgaacaggggtctgggaaatagcaaagagcacacagataatatttgggaagatgacagtgagttttagctaacagaatttgagcagaagtgatgtaagctacttctaagcttagatcctaaaaatcatcccctgagacatcctgccgtatctttgtatcacaatcttggaacctcatattcgataggcacagctgtaagattgaggaagatcacctgattcacagtagtctgtgatgtcaacaagaaataaacctctgttttgttaagccattgagatttggaagtttgttattacttgtcctattctaaacatatatacaatgagcattcttcagttcctcaaaggggtcatggcacagaaacaagaaagaaccacagtggcaaaaaatacagaaatatgagaaatgctacaggatccctgatatggtcttctgaatagagctctccttttcctttgaacagtaaatggcaaaataaattaacatttaaatggaataaatggaagactaaataaatataaattgcccagctggaaaaaccagcaagataatttcctattttgagactacctaggctgtaacacacatcaatgttacacaataaaacaaaaggagaaatcccctactttttttttttttttttttttttttttgaggcagggtgctctgtcgctaaggctggagtgcagtggcgcaatcttggctcactgcaacctctgcctcccaggttcaggcaattcttgtgcctcagcctccccggtagctaggattacaggcgtgcaccaccatgcccagctaatttttgtatttttattaatagtagagatggagtttcaccatgttggccaggctggtctcaaaatcctgacctcaggtgatccacctgcctctgcctcccaaagtgctggcattacaggtgttagccaccgcgcctggcccccacttttttttttttttttcccgagacagagtctcactctgtgacccaggctggagtgcagtggcgcaaactccgcacactgcaacttctgccttccaggttcaagcaattcttgtgcctcagcctccaggtagctgggattacaggcgtgcaccaccacacctggctaatttttgtatttttttttagtacagatggtgtttcaccatgttggccaggctggtctcgaacccctagcctcaagggatccacccacctcggcttcccatagtgctgtaattacaggcatgagcccccgataccccctacttttttttttcctttttcctttttttttgagatggagtttcactcatttctgaggctggagtgcagtgccacgatctcagctcactgcaacctccgccttccagtttcaagcaattttcctgcctcagcatcctcagtagctgggattacaggtgcccgccaccacgcacggtaatttttgtatttttagtagagacggggtttcaccatgttggccaggctggtctcgaagttctgaccttgtgatccacccaccttggcctcccaaagtgctgggattacacgcgtgagccaccgcgcctggcccctcccccaactatttcttaaaccagcgttccaactgggaccgctggccagttttggtggcccttcctaaaattcccctgttgcaacagataatcattactgtgactaagtcatttgattaaagcaagaatcacacttttgttatttaaattgtgtacttttgagttatgatagttcattatctgtgactagaaatagacaagaacatagtatgtattctactatgctaaacaataacctcacaaacagctagtaaataccaactgactactgagtcaccttttaatgctaaaataactcatttcaaattagtactatagctcacacattcatagtatacattttttttttttgagacggagtctcgctctgtcacccaggctggagtgcagtggcgcaacctcggctcactgcaagctccacctcccaggttcacgccattctcctgcctcagcctctcgagtagctgggactacaggcgcccgccaccacgcccagctaattttttgtattttcagtagagacggggtttcaccgtgttagccagaatggtctcgatctcctgacctcacgatccacccatcttggcctcccaaagtgctgggattacaggcatgagccactgtgcctggcccatagtataaaatttaaaacacccattagtggatattaaattcacagatggagaacttaaggtcaaatcttgaaaatgaggtacaaagccataggacatgagagtttggaattaataacagaaattcagttgctgtcaccatgcatggatgtttgcttaggctcatgccctaagctctttacccaacatgaaacaggacacagtgaaaaacttttggtactttcaactccctttaggaaaatcaaggtcacaaaacacgttttacagccaggttgaaaataaatgtgctcacttcccatttgaactgtaattgttacctcacggtatttcttcctgtttttttttgttttgttttgttttttacaagaatacacaaaacagggacttaaaccgaaagtgagaaggaaagaacattttaatctaataattgcttggaaagggaggaaaaggaaagagaaaaacaataaacaaaagaaaaatcagaagtgttaagacttacagggaatattctggacttcttttcaactatgccatatggtttttcctgtaataaaagttaactctgtgttaattatggtgttaagagtttcttctgaaaataagaaataggtcataccccaaattttaacttaagctccaaactttcacagaactccagattcacatatccaactgtttactcaacatctctacttagctatcaaacaggcatctcaaacttaaccaggtcccacacttaacttctcccatccccaaactgttcctccccatgtcccccatctcagtaaatgacactcttattcccccagttatgaaagacagaaaccttgactcctcagcagagcctgttaattctatcttaagaatataccctgaatccaactggttctcatcaccagccttgtccaagcctctatcatattttcacctcaactaccacaacagcacctactagcctccctgcttccacttgtgccctcctatgcaaatgaaaagtctattctccacacttcaaggcagagtacactgattcttttaagatatgtcactctgctcaaagtttcataattcttagagaaaaagccagtcttttctccctcacttactctactacagccacagtggctccattcctaggagtccaattcagtcaagcctgcttgtgcctcaaggcctctgtacttcatgattcctctacctgaaatgctcttctcctaaatactgcttgacctgtatcttcatttcatttatgtttgtcttcaaagatcacttcctcagagaggcctaattaaaatagcaagccttatcattctctagtttttaccctgctt

SEQ ID NO: 94115 - DNA, 82977 bp, Homo sapiens
  misc_feature (1)...(82977): n = A,T,C or G
ttaaaggaaaagatggtttaatgaatgaacagatagtggttctcagctgagacatgagaagtagaaaaaagaaacaatggaaatcctggaactacaaaaaaaaaaaaaaaacaaacctaaaatgaaaaagttactggaagccttaacaaattggagaagacagaagtgaaataacattagttggaaaccagtgtttaccagaggcaatgaatagcaccagaaatagcaaacagcatggaaaaacaaaaactaatttttttcttattttacttaaaagacaacaagctataacaaggtttataacattgtattattgtagtatgtattttataacatatagaagtacagtttcagacaatgatagcaaaaaggatggggtggaattacatggttgtgatgatcttatattttacctaatgtggtacaatattagttctaaatagattaagttgaggatacatattataatccttagtgcaaccactaaatacacacacacacacgtataaaataatatgtagagtgtatacaaatatatatgtgtatgtgtgtatggagagagacctatagctaaaagaatacaaagagttatagctaaaagaggttaaagttatatttgattaacgtatatccaaggagtccattttactggatgacacagcaaaaccctgtctcttaaaaaaataaaattattgaattaaaagtttgttctttgaaaagatgcaattggtaaatccctggcaagactgattttttaaaaaggcaaaaaagataataaggtctatcacgaacaccatatgccaatacatttaacaatttagaggaaatgatcaaattccttgtgttaaaatataaacttttccacattaaaatttcaagctggccaggcgtggtggctcacacctgtaatcccatcactttgggaggccaaggtgggtggattgcctgagctcaggagttcgagaccacccaggcaacatggtgaaacccagtctctactaaaaaaatacaaaaaaattaactgggtgtgatggcgcatgcctctagtcccagctacttgggggccgaggcaggagaatctcttgagccctagaggtgaaggctgcagtgagccaagattgtgccactgcactccagcttgggctacagagtgagactctgtctcaaaaaaaaaaaaaaaaaaaaaaaaaaaaaaaaaaaaattaaggtgttccagcagtgattcataaattaagcagctacaaaccagaaatggtttggggctctgttagagggggttgaagggacacagagcaaagaaattgtttcattggttaaagtttgagtgtttgccttatttggactatccaagtgagaaatttatgacaatataaccaatgtcccagttagccaactgtgattggctaaactaagtttcattttcctcatgagggtgttacagctacatcagtctaatggcctaccaattattttaacacttgagaagcacaatttatcaaaactgattaaagattaaaagtcagaatagctttatatctaattgagaaattgaattcattataaagaatcttcaaacaaggaaaatgtcaagcccaaatggttttattagtgaattctgttaaacatttaaggggaaaatgataccaatctgaaacaaactcttgctttatgagactagcataactctgatatcaaaacctgataaacacattacaagaaaataaaattattgactaatattcctcatgaacacagacacaaaagtatttatgaaaatactcatttggtcatgatatagcatcctttgtatctaaaaccaaatgagatttatcccaggaatggtaggttgggtgaacgttcaaaaattgatcagtgaaatttggtatgttaacagaatatatgatcacctcaataaatgcaggaaaaaacatttgaaaaattcaacacccatgcattataaaaactcagcaaactaggaataaaagagaacttcatcaatctgataaaaggtatctaagaaaaatttacagctaccatattatttaaagtgattattattacattgatgatttccccactgaaattagcaataaagtaatggtgtcaactgtcaccacttttattctattttctataggaggctctaggaggtaccataataaagaaaggaggcaaaaagcatgaagaccggaaagaaagaagtaaaactggctgggcatggtggctcatgtctgtaatcccagcactttgagaggccgagatgggcgatcgcttgagttcaggagtttgagaccagcctgggcatcagggcgaaaccccatctctacaaaaaaatacaaaaattagctgggtgtagtggtgtgcacctgtggtcctagctactcaggaggctgcagtggaaggatccttgagcctgggaggtggaggctgcagcagcctggttgacaaaagtgagaccctgtctcaaaaagaaaaactataatgaaaggaaataaaaggcataaagattggaaaggaagaagttaaagtatgtattcacaaatgacatcattatttatctagaaaacttagaggaatttacagaacaattactagaacaaataagtgaagttagcaatgttgcatgttttaaggtcaaaaaacaaaaatcacttgtatttctttttttgtgtgtgtgtgtgagatggagtctcactctgtcgcccaggctggagtgcagtggtgcaatctcggctcaccacaccctccgcttcctgggttcaagcgattctcctgcctcagcctcccgagtagatgggattacaggcgcccaccaccacgcccggctattttttgtatttttagtagagatgaggtttcaccatgttggccaggctggtctcgaactcctgacctcaggtgatccacccacctcagcctcccaaagtgctgggattacaggtgtgagccaccacacccagccaatcatttgtatttctataccgtagcaacagacaatttgaaaatgaaatcttaaaaacaattccattgacagtagcatcaaataacataaaatagttcagaatagccaggtgtgatggcccgtgcctgtagtcccagctactctggatggctgaggtaggaggattgcttgagtccaggtggatcccttgagcccaagagttcaaggctgtagcacactataattgtgcctgtgaatagccactgcactccagcttgggcaacatagtgagactccgtctgtaaaataaaatgaaacaaaactaaaatactgctgagagaaattatagacctaagtaaannnnnnnnnnnnnnnnnnnntcggtggcatatgacatggtgcgcatagcgtctcggtcctgagtggctagacaagagatgcggaattgagtcgtggcatgatatcgtggatctgctaactcaagcaacacgtatgcatgtctccgcgacgatgcaagacaatatgcgatacctctacattgtgacgtgacttcgcgggagtcgtcgatgcgacgcggcaagcacgtgcgacggcggcacatggcatgatagcggcgattcgttataaggctctttctcgttatcactattaacttcactagacatattatcaacggcagtcagccaggaggatagtcagcggtatgtggtgcatcgatcagaggtaggcagaagacaaacgagagactaaaacgaagcaccatgaacaatgaccccgctagacatctaagtgagggtcaaccaagtccgtatcatttctactctccactattatcatatgagtcacactataatttacacactcgatgggtgcgcatgtaataattggatattgtaggaggatagaattaaagatcgtgatgacaagctgtctaggatatacagagcaaagaccgtctcttccatgactgtgatgcagcgagtagatagagcataaagatcatgttgcaaaaagaatacggtcaaaggtccggttacagataaacaggatctcaaggtatagaaattttttttagtgcacgaaacaatgagagagtctgccacgtgaacttctttgaacacagacacgtcatccagccgatttgtcaatcttttccccacctttcctgcctttttatttctcatagctgccattgtcatcctggcccgatatcaatgagctgttgggctcacctcccagtcggggtggtggccggtcagaggggctcctcgtaaggagggacttcgaggccgtggcctgccctagaggggtgaagtgtgtgctgagtcgaaaatgaaatcttaaaaacaattccattgacagtagcatcaaataacataaaatagttcagaatagccaggtgtgatggcccgtgcctgtagtcccagctactctggatggctgaggtaggaggattgcttgagtccaggtggatcccttgagcccaagagttcaaggctgtagcacactataattgtgcctgtgaatagccactgcactccagcttgggcaacatagtgagactccgtctgtaaaataaaatgaaacaaaactaaaatactgctgagagaaattatagacctaagtaaatgaaaaggcataccatgcttatggattagaagactcaatattgttaagatgtcacttctccccaagtttatctgtaggttcaatgcaatcttgatcaaaatccccataaactttttttgggggaaggaaggggtaattgacaagttgattcttatttcatatggaaatgcacagggattcaaggttgcagtgacccctgtttgcaccactgcactccagcctgggagacagagtgagaccttgtctcaaaaaagaaattaaaaaaaaaaaaaaaaaaaggaatgcaaagaatctcaaatagctaatatcttcacagtgaaaaacaaatttggagaacttagtagtacttgattttgagacttagttgaaatctaaagtaacctagagacaatggtattgtcaaagtagtaggaagtagaatataacaagagtcagaaatagacacacatacattcaatggacttggtttttttacaaaggtcccaaggctatccaatgccaaaaggaaaagttttcaacaaacggtgctgaaacaattagaaatatggaaaaagtgaacctggaccccccatctcacgccacaacaaaattattttgagatagtaatagacccagaagtaaaggctaaaaatataaatctaaaaggaaacaatattttcatgaccttggggtaggcaaagatttattaaagaggacacaaaaaacaacaaacagaagaaaaacctgaaaattgcatcaatataagtgtctgctcctcaaaagacacctttaagaaaatgaaatggtaagccacagactggaagaagatatttcgaatacatatatttaacaattttgtatcctgaataaataactcctgtaaatccataaaccaaaaaactccaaagtcaggcaaaagattggagcagatgcttcacaaaagatatatgaatgacccagtaagcacatgcaaatgtgcccaccattaattatatgggaaattaaaattaaaaccacaataatataccatttcacaccgaccaagatggaagttaaaattaaaaaaaaaaaagaaaggctgaccaatgtgtctatctactggagctctcctactgcgggtgggaatgtaaactggatgtaatcagtcattttggacaacaggtggcggtttcctataaagctaaacatagacttaccctggcacccagccgacgtgggagaactgggtacacaggtgtacactttacaaaactcatcgaattgcacactcagattgtgtgcattttactgtgtctaaacgttagcgctataaaagcaaaacaaaatataagatcataaaaataaaagcaattcctaggggtcctctccgttcccgggcttcctcggtgcggagggaaacgaaactagcccgaggcaaaacagcctccgcgaaccccgcccgccgctagttgcactttcgattttccctttagttattaaagttcctatgcagctccgcctcgcgtccggcctcakttcctcggaaaatccctgctttccccgctcgccacgccctcctsctacccggctttaaagctagtgaggcacagcctgcggggaacgtagctagctgcaagcagaggccggcatgaccaccgagcagcgaygcagcctgcaagccttccaggattatatccggaagaccctggaccctacctacatcctgagctacatggccccctggtttagggagggtgagtgtctccagcggcgccttctcggcggaaaacaattgaggacttgtttktctcttgcttcgttcccttcttttaatcaatgcagakagcctgccagactccccaggtttgtggtaagatctccgcagcattttaggctasaggttgccagagtttgaggagccctcggaggyctaggtggggaaactgagttccagcgaggtgaagtgacttgcttaagggtgctcatctatttaggttcaaagctggggaagaaattttctgtttcatttattttcactaatattaaagtctactgtgtgcttggctgggtactgacagagattgagaaataagataagggctcttccttagtatacattacagtccaagggatgggacacaaagggcagataattacagtactgagcacaaagtgcggtctgagcttaaaggaagttgatgcttactctgccgaatcttatttgcacgcctaaagaagtggaagctggagaggagccggacttttccagaccgaatagctttaggctttaatacaggtgtttccatctaacttcggagacaggtgatcctgggtaatgaccattttgtaaatttgtatcgaattactttgtgctggagatgagcagaggcttctgggaaagaggtgaaaggaggtggtacttaaaagatatcgatgaggccgggcgtggtccctcacgctgtaatcccagctgtagagcacccgatgctgttgctgttcggggtgccactatgtaacccgcacggacctaggggactgaacaaagaggggcgaacgcgggaataaaagacaagagacaaaagagtatatctggaagaaggggtcagggggcaccttgcctctagtggacaagggccctgagctttacacagcccttcttattaggcaaaagagatagcgagaaggggaggtgcttgttggctggctgcttgattcacagcaggcttgcaagactgcattctttgaacaataggtgctagatttctcaataaataatttcaaggagcctggcgccagggagtgaggcgctcagcaaaccatttggtggcaaggcagtgtgagtttgcccaggtgctgcattcatgataaaacagtttgctgtttgatcatatagcctccagcggaatgctgagttggtcacatcccaagggccttcggctccctgcagccagcactttgggaggcctaggcgggtggatcacaaggtcaggagttcgagaccagcttggccaatatggtgaaaccccgtctctaccgaaaaatacaaaattagccaggcgtagtggtgcactcctgtagtcccagctactcaggaggctgaggaatgaaaatcgcttgaaccagggaggcagaggttatggtgagatcgcaccactgcactcagcctgggtgacatcgtgagactcttgtctccaaaaaaaaaaaaaaaaaaaaaaaaaaaaccgaaaaacaaaaaaaagtcgatgagagggggcctgggaatcctaaaagtctccaagtgccagtctttcctgatgttattgcagtttttggaaatggcgttaagaccggcaactaacttgaatgctaattgctctacaaaactaaaagaaaggttgtggaatggcattctagtgaccagtgtagcttggcacctgaagaagtacttggaagaaacactaacaactggtgtgaattccattttttcatgcactcatatattgatttgatacactttgatggaataaaataagcaactcgtgtcagtattatgttagcattggaggtaatttactcagcacctattacctaatagtgtcattgaaagttgaggaagcaatgatgagcacagtagaaactgtccctgccctaatagtgattagtgtgtstatgtgaatgcaggtaacaaaatagtaaataataaagtgcagcagtgctttgatggaaaaaagctgggatgtctactagagtccaaagggcacagccaaagcttyccagatatttggcatttgaactgaggtctaaagaaagaggaaaaattagctggaaggagacaataaattgcagttagagggctccttatgtgcaaaggtccaaggtgaaagagaaactagagtgttccaggtatccagaaaatattagtatggtggcattgtggagagagaggcaggagttcagagagatgaaacttgacaggcaagcagaagtgggatatgaacagttttggactttatccactgaaatgtgataaggagaggggaccaaaatagaatttgcattgtagaaaaacgactttgacttcagtttgaggaatggcttgaataggtacaagacagggagagagagaatggcagatgcaatgatgccaggacagcagagtggaaaaactggaagcaaggataccagttaggaaaataggaatccggaggaatggggagaaatggatggattcaagacacatttggaaagtataatcaataggtctcttggggagttgtggtgaggaggtaagggtgaggacagggtggaaatgacttccaggtctctggctttggtccttgggtgaataaatggtagtttctgagataggaaatgtgggaagagggacaggtttgcaggaggaggagaaaaattcggatttaggtatgctgggtttgtatgccttggatacatccatgaagagatgttcatcagattgttggctgcacaggtgtggagttcaggaaaagggtccacagttggggagacattaatgtggagatccttgctgaaacaatgagagtgggtgcaattgttactgaaacaccagggattcagcctaggttcttttgctggctgcacataaagccaatcactgagacaacaagttttgccaaggctttaattgggagctgcagcaaaggaggtaggagatcagtctcaaatccatctccctgacccgttgaaattaggggtatggatagaaggaaagaaatataactaggtgttggaaaatggactctggaggggtaaggaagcaatcatgataaatgaggggcctggtgtctcattgtctggatgtgatggtctgatgagtttcagttcttttataccttttgagaggcctgggggtccttttcctggggaaggaactcagataaaacaaatataagtttcagctttaagatcaggagggtcaatttccatgtttattcgaaagaattgtatatgggactattgtgttggtttcagtccccctctttctatttatcaattcctggatcatggggaatctgatcctcaatctttctggcagcttcatgctgaggaatggcgtggtgggcagttccatactatgggtgaccacgtggccatccaggaatcaaaagttaatctaatactatagttttcttctgagacacaatctgtatcattactgttccccgcttccaccaaagacatatcacagctggatgggcctacctgcaaaataagcctcagttacatatacttggcttatttacccacacaaagtgcagcaaaaattattgtccatatgggctctcctaattggctttgctggaacctctcacaaggccatttcagtcaaagccctgggaaaataacttgttcctccaactgtgtccccttataaaagaaaacagatttttattaaatgtatgcaagaaaacacattgccatgaactaagaatattcacaaatagtttataaattctggagaaattagggagagagaaaatgcctcaaattctgtttaaaagggtatactctacttaatatactgtattcttaaaggttatgaagagcttaaaagaaaaaattctccagattccaaaaaacaaaaattctccagactttttcaaacaaaaccataaaaaattatttcagtcccacattagttcagtccatgcaatcaactcctgctgtgyttcatattgggttagtaatctttataaacatgtcagccttttaattaagagggactctaattaagagtcctagaagttttctgtattccagtggcacagtctccaaagttatcagaaatctgcattcaagactccttttcatgaagtcccctaaataaacaagctctggactatrtctgattataagtcactttttgaaaagaatcaatgcaaaacaacaattgcaatgacaaaagtcttaggagagccataaagacacagttgacaaggaaatttttttttctgttggcatacaacaatttaacataataatcatcattactgacaccatatattaagacatatcagaattttaggaatctcatatagtcctgcaacacatattaatagcacatctatacaaatataacccaaaggaagttaaataccacctcacatttgataatgctgcctgtataattctaatataccaaagaagcctaacatgtctgtctgtattggaattcaaggaagctaatacacaaaaaagttagtttgaggttaaaaaaaaccccctgaatttagaacttgaaatatttgctgttgggaagtctgtcagtatcaaagatttaagacacttgatatcacaaaataggatcacaggtcgctacaaaatagttattcatttagccaaaaagataaaacaaacacatttaccctttgataggcgactcagtttcccaacaataaggcctaataaagacagcatgaggccaactaaatgtctctccctcttccttttcttccccccacagttcactcaaaaggtaaacaaatattttatgtcaatattatacaaacattttattcaaaagagaacatcaaattttacctttgtatggtatatttttaatgttaaagctaattttaataaaaccttatrarccgaattttaatcagtttgactataagataggatttctgtgaagtttttttttttttttttttttttttttttttttgagatggtgtctggctctgttgcccaggctacagtggtgcgatcttggctcactgcaacctctgcctcctgggttcaagcaattctcctgcctcaacctccctagtagctgggattacaggccatgccaccacacttggctaatttttgtatttttagtagagacggggtttcaccatgttggccaggctggtctccaactcgtggcctcagctgatccgcctgcctcggcctcccaaagtgctgggattacaggcgtgaghcaccasacccggcctgagycaccacacccagccatctttttataacgttttacgatttcctattaaagagtagagtaatgctccaagaaaaccctgttatgacacaggggcccagacattggccttgcatcagtgtgcttttgatgttaatgtttaatttatagaaaaaccctgaactaattttataactcaaaatcagcccttacaagctcacgtgctcaccttttstgcaatagttcctgggcgtagagggattgaatggttttaatttctagccctatgtctcatgaaagcagttcattttgattgtcaccttctcctgagtctgaagacgaggcttcatttggtgtcagtgctcaagatttagcaggtattggtgtcttttttggatccaggagtcaaaggcctttgaattactaaataattgtttcctaagaattatttaatagcatatttatactgcaggaaacctcatcattctctctaatatgtcacaaaataaaaccctgggatttggtgcctagtagttactgtctgaaacacttcaacccattatacaatccattgtattaaagtggttaggttactccttgcatttatctgctagcattctagtgacaaaactgtgacctagagcctcaaaaatgtggtaagtcctgtgccaaacttaccaaagtaagatagttaacttttctttccatcattaaaaaaaaaaatggtaaatgcaagtatcagttttggaaattcaatatgaagataaatctttcatttaaaaagtatacaacaaaacaaggacaaagtgacaataagcacacagtaatttcttttcagctattttgaaagagcctcatcatacatttccaagattggtttctagataaagtactgacaactgatttaagtgacttacaccactagaatcttcaaactggcataacacttgtatgtacatattttgttttcaagtatacatgtgaaggcccatcagtgataaatggcttaggataaaaaaaacactagaaagtcttataattttttttatgacttaatccaagtaaatgttatttaatcttaataatagtaaacacaactaaattagtttgagagaaagcccaatcaatataatttccttaaagacaaagccaatttttttctgaatattaagactttgtacccatatagcagttttgcctcattaaaggaaaagatctgaaacygctattgtttattgaattgaattaccttggaaataaacaccacttaaacatttctctcacctacttttccaaataaccaataataatgtactatttctgttcagaacttagaagaataaaccttttattattttttgccaggaatcttaaagttcttatagctctctagttcattagaggtaagcaaaaccaaacaaattttaaaggctggtgtccaccaacaatttttggaagcttgaaaaaggtagcttaggaactttggataagtagagcaaatgatgagatactggaaatgcataggaaacaaaatgattattcatggaaccaaataaaagccttccttacattagaaactaaaagccatcaatggttttattaatatgtatatataagtaaaacctaaagaagaagaaacagcaaataaatgcaaattaaaagaaaaaacaaacaggaaaccaacctgaaacttttctactcagtttaacttggaggctatagtgttacccagagccaaaaaaacacatgatgaatattttgttcctgatgcacaatttaatgtctttaagttcaccaataccactatatattttgtgcarttaagaaattcactttaggctgggcgtggtggctcaggcctgtaatctcagcactttgggaggccaagatgggtgaatcacttgaggccaggagtttgagaccagcctggccaacatggtaaaaccccatctctactaaaaatacaaaaattggccaggcatgatggcacacaactataatcccagctactctggaggaggccgaccagtaagtattatactgtaatgatagtatatctatgcagaagagcaaatacagtgtgaagcaatgcaagcatgtaggtgaaatttggttgttgctatatctggcttttatctggcttcatggttaactatattaagaaaggattgccaaactgccaatgtgtttctttacaatatttcttattttactttcatcaagactaagagctttaactatgagcagtgttaattagccagatttctccaatattctatctggttttaagagaatattatttaagccttttatactttgtattttctctgtctgtacataaaggtagacacacaaagaaataggaaagaaactacatgacttacacacaccatctatgatatgcttagactttctgatttgtcctggattttcgttctttttcttcttctttttttttttttaaacagtcattttactttagracaaaaaaaataccattataagatgctttgtcatacaaaattattttctttataaccttccttaccaaaaatacatctttatactcataactttctccacatctctctcgtctacttgttcttttctaccttgtttcataagtaacctttcaagtccataattattaataaactttagataacttctgagttagataaaatttttttctgaataaaaacacattgtcttttgcacattttatayatagaattacatatgaactagaattcttatccttagtaacaaccttaaatttcagtaaaaacctaggaagcaagaaatcttgagctgcctagcagatattagtattttatagatgagaaccattccacaatttttagaaacatgttccccacatcataaccttttcttaattggaaatgactcaaacatccaatgattatatttccgattatgccaaaagttcatttacagcatttgaccatttacattttatttatttttagcagtttatctagattatttctgcatcatttccttcttaaccattttataacctgtgaatgtcaggtgttcacctaaataaccttaaaattaatacgtgggcattttgatcaataactcagaagattcagctgttttcattaaactaacagcattaaattagtcttataaagaattcacacaaatattcactgggtttatagctttataacctgctgccaaactctgatacctcaaattatctagctgagacaaatataaagccgagacaaaaatgtatgctgacaattctgaagacatttctayttttattttaccaataattttaaagacagcttgtttattaaagatttactgaagtcatgtgaacttgaaaaacactttggacttaatttatgagcactcttatttataagccaatttggtaggtatagtgtataacatagttaatgtacatctagataaacacatctaaacatgtatacacacacaaagatccaacagcttttaccttggaactctagccatgagatagcaatacaaactcacgaatctacaaccaagtccacatggctaaaatttgtttgctccaatcggtaatccaatgaaggctgtgaaccagaattttgggtaaagcagtttccatggcagtttgatttttagaagctagattccaaagaamcctggggccaaacrgcactacagaagaacgtcatgtggaaactactcaccaggcccaaccctgcttaaaacagcggcataaaagccagaatacatgggactccacctggctttcccattcaacagccaactccagattccaaagaatattggggcaaacgtagtacaaaagaatatttgtttgttgaattctaatttcccattactatattgacacatacaatcamcaaaacacaatccgactgctgaagcaatagacaagcccgaacagtgtccaaactgaaacagtcgaggtgcttttctctctcaatygggctttattaacctgcaaacagaaatttcttaggaattttccaaattgagagaagccgatcccactgtctggtacccaaaaaagacactaacttggccagacacaaacacagaaattacaaacacgctctctagagtatcatactgagagtcagggtgcttccctttcttagtcagttgggctggtttaacctgcaaatggaagctccttttaaaattttcaaattgagcagatcttgctgtctgggccaagaaaggacactcacttayccagatgccagtgtcacatttcaaaggctgttcttcctagcaatcaggaactcagctggggctggcagcagcagggccagagagaccaaaactcacttccagccaaaattgggtgggcagttgcttaggagggcttctgagactcctagaccacagcaacccagccacaaaaatctgttactgaagcaccaggggtttggcctaggtcctcctggtagccacacagaaagccaaacagggagacaacaagtattgccagggaagaagcctttaattgggagctgtagccaagaagatgagagattagtctcaactccatctccstgacccactaaaattaggggtttatatagcagggaagaaatgtaactgtgtgggaaaacaggaactcaggaagcaatcatgatgaatgaggggcctggcctcattgtctggatgtgataatctggtgaatttcagtttgatactttttgagaggcctggtggtcttttgcctgagaaaggatctcagataaaacaagtgtaagcttcaagtttaaagaccagaagggtcaatttctgtttttctggaataaatgtctgtgggactgtggtcagtttcaagattgctttttggagtgtgagtagaaagagcctgggacggaatcctgtgcaagcactcatttaagagatgagcagaggaggaaaagagactgggaaagagtgccacatatgtgggcaaggaggcatcacggaaaccaagggagaatgatgtggtggataacatggctgaatgatgctgagaacccaaggtctgtcagaactaaaaaaacgttcccttactttggcattattgacttttggggccacccacaggactagtttctgtggaatagggatgaaggtaaaggtataagatggttgggaaactaactgcaagagtagactcaggaataaatagagggcaaggaagtggagaagataaatgtaggcagttcttttgaaaatatgattcacaaatgaaaaattacaagggaggtagtgcttaatagtatcttcacacaaatccagtctatacaatttggttacactgtgggttccaagaaaggagagagaagacagaagcaaagataaatggaaaaaatagaaaattttacttgtctgagaaagaaacagcactttgcatgtgagtttattgagaagggaatacattagtaggattttcatatttctcagatgaagaaataatcatgtaaacattcaggaaaaacaaacatgtgtggcttttttttttttttttttgagacagagtcctgctctgtcacccaggctggagtgcagtggtctgatctcggctcactgcaacatccacttctgggttcaagtgagatggggtttcaccatgttggtcaggctggtctcgaactcctggccttgtgrtccgcacgccttggcctctcaaagtgctaggattacaggcgtgagccaccatgcctggccacaaataagattactcaggtttcctctaacggaatcaacatcaagttggtctctgacttctctgcaactctaatgtaactaaagagtaaaactctgtgcagcatttaaaaggtaaaacaaagttgcccctattttatatttagccaggtatttatgtatgtaagcaagaagaaaacattattatatatgtggggtctcatatatatttcttacagaaattactggaaatgtgattccaaacaatgggaactgaaaaaaattagcttaaaaaaaggagttcttgtaatgcaaggattggtcgtgaatgttgaaactaggcatgtagagttgattttaaataattttataaatttgtccacaaaggtaagtgcaatagtcaagcatttcttttttaaattatactttaagttctgggacacatgtgcagaacgtgcaggtttgttacataggtatacacgtgccatggtggtttgctgcacccatcaaaccatcatctccattaggtatttcttctaatgctatccctcccctatcctcccagcccccaacaggccccagtgtgtgatgttcccctccctgtgtccatgtgttcttactgttcaactcccacttatgagtgagaacatacggtgttaggttttctgttcctgtgttagtttgctgagaatgatggtttcyagcttcatccatgaccctgcaaaggacatgaactcattcttttttatggctgcgtagtattccatggtgtatatgtgccatattttctttatccagtttatcattgatgggcatttgggttggttccaagtctttgctattgtgaacaatgccgcaagacacatacatgtgcatgtgtctttataggagaatgatttacaatagtttggtatatacccagtaatgggattgctgggtcaaaggatatctctggttctagatccttgaggaatcacccacactgtcttccacaatggttgaactaatttacactcccaccaaaagtgtaaaagcgttcctgtttctccacatcctctccagcatctgttgtttcctgactttttaatgattgccattataactggcatgagatggtatctcattgtggttttgatttgcatttctstaatgaccagtgatgatgagcattttttcatatgtttgttcgtggtataaatgtcttcatttgagaaatgtctgctcatatcctgcacccactttttgatggggttgtttctttcttttaaatttgtttaagttccttgtagattctggatattagccctttgtcagatggatagattgcaaaaattttctctcattctgtagtttgcctgttcattctgatgatagtttctttagctgtgcagaagctctttagtttaattagattctatttgccaattttgatttttgttgccattgcttttggtgttttagtcatgaagtctttgcccgtgcctatgtcctgaatggtattgcctaggttttcttctagggactttatggttttaggtcttacatttaagtctttaatccatcttgagttaatttttgtctaaggtgtaaggaagtggtccagtttcagttttctgtatatggctagtcagttttcccaacaacatttattaaatagggaatccttttcccattgcttctttttgtcagggttgtcaaagaccatatggttgtagatgtgtggcattatttctgatgactgttctgttccattggtctatatatctgataatctgttttggtagcagtaccatgctcttttgattactgtagccttgtagtatagtttgaagtcaggtagcatgatgccttcagctttgttcttttttgcttaggattgtcttggctatgtgggctcttttttggttccatatgaactttaaagtagttttttccaattctgtgaagaaagtcattggtagcttgatggggatggcattgaatctataaattaccttgggcagtatggccattttcacgatattgattcttcctacccatgagcatggaatgttcttccatttgtttgtatcctcttttatttcattgagcagtggtttgtagttctccttgaagaggtccttcacatcccttgtaagttggattcctaggtattttattctttttgtagtaattgtgaatgggagttcactcatgatttggctctctgtttgtctgttgttggtgtataggaatgcttgtgatttttgcacattgattttgtatcctgagactttgctgaagttgcttatcagcttaaggagattttgggctgagatgatggggttttctagatatacaatcatgtcatctgcaaacagggacaattggactttctgttttcctaattgaataccctttatttctttctcttgcctaattgctctggccagaacttccaacagtatgttgaataggagtggggagagagggcatctttgtcttgtgctggttttcaaaggaaatgcttccaacttttgcccattcagtatgatattggctgtgggtttgtcataaatagctctttattattctgagatacattccatcaatacctagtttattgagagtttttagcatgaagggctgttgaattttatcaacggcgttttctgcatctattgagataatcatgtggtttttgtcattagttctgtttatgtgatggattacatttattgatttgtatatgttgaaccagccttgtatcccagggatgaagcagacctgattatggtgaataagctttttgatatgctgctggattcagtttgccagtattttattgaggatttttgcatcaatgttcatcaggratattggcctgaaattttcttttttggttttgcctctgccaggttttggtatcagggtgatgttggcctcataaaatgagttagggaggagtccctctttttctattgttgggaatagtttcagaaggaatggtataagctcctctttgtacctctggtagaattcagctgtgaatccatctggtcctgggctttttttggttggtaggccattactgccacaacttgttattggtctcttcagggatttgacttcttcctggtttagtcttggagggtatatgtgtctaggaatttatccatttcttctagattttctagtgtatttgtgtagaggtgtttatagtattctgtgatggtagtttgtatttctgtgggatcactggtgacatcccctttattatttttattgtatctatttgagtcatctctctcttcttctttattaaactggcttgtggtctatatatttgttaatcttttcaaaaaaccagctcctggattcactgatttttttgaagggttttctgtgtctctatctccttcagttctgctctgatcttagttatttcttgtcttttgctagcttttgaatttgtttgctcttgcttctctggttcttttaattgtgatattatgatgttgattttagatctttccctctttctcctgtgggcatttagtgctataaatttccatctacacactgctttaaatgtgtcccagagattctggtacgttgtgtctttgttctcattggtttcaaagawcttatttatttctgccttcatttcatatttaccctgtagtcattcaggagcaggttgttcagtttccatgtagttgtgcagttttgagtgagtttcttaatcctcagttctaatttgattgcactgtgttctgacagactgttatgatttccgttcttttgcatttgctgaggagtgttttatttcctattatgtggtcaattttagaataagtatgatgtggtgctgagaagaatgtatattctattcatctggggtggagagttctgtagatgtctactaggtcagctttgtccagagctgagttcaagtcctgaatattcttgttaattttctgttttgttgatctattattgacagtggggtgttaaagtctcccactattattgtgtgggagtstaagtctctttgtaggtctgtaagaacttgctttatgaatctgggtattcctgtattgggtgcatatgtatttagcatagttagctcttcttgttgcattgatccctttactattatataatgcccttctttctcttttttgatctttgttggtttaaaatctgttttatcagagactgggattgcaacccctgctttttttttttctttccatttgcttggtaaatcttcctccatccctgtattttgagcctatgtgtgtctttacatgtgagatgggtytcctgaatacagcacaccaatgggtcttgactctttatccaatttgccagtctgtgtcttttaattggggcatttagcccattcacacttaaggttaatattgttatgtgtgaatttgatcctgtcattatgatgctagctggttattttgcctgttagttgatgcagtttcttcatagtgtcgatggtctttacaatttggtatgtttttgcagtggctggtaccagttttcctttccatatttagtgcttccttcaggagctcttgtaaggcaggcctggtggtgacaaaatctctcagcatttgcttgtctgtaaaggattttatttcttctttgcttataaatcttagtttggctgtatatgaaattctgggttgaaaattcttgtctttaagaatgttgaatattggcccccactctattctggcttgtagggtttctacagagagatctgctgttagtctgatgggcttccctttgtgagtaactcaacctttctctctggctgcacctaacatttttcctccatttcaaccttggtgaatctgatgattatgtgtcttggggttgttcttctcgaggagtatctttgtggtgttctctgtatttcctgaatttgaatgttggcctgtattgctaggttggggacgttctcctggataacatcctgacgagagttttccaacttggttccattctccccgtcactttcgggtacaccaatcaaacataggtttggtcttttcacatagtcccatatttcttggaagctttgttcattccttttcattctttttttctctaatcttgtcttcatgctttatttcattaaattcatcttcaatctctgatatcctttcttctgcttgattgattcagctattgatagttgtgtatgcttcacaaagttctcgtgctgtgttttttggctacatcaggtcattcaggtccttctctaaactggttattctagttgtcactcctctaaccttttttcaaggtttgtagcttccttgcattgggttagaacatgctcctttagctcagaggagtttcttattacccaccttctgaagcctacttctgtcaatttgtcaaactcattctccgtccagttttgttccgttgctggcaaggagttgtgatcctttggaggagaagaggatcacattttttttctgcctttttgcactggcgtttcctcatcttcatggatttatctgccyttggtctttsatgttggtgaccttcagatgagttatctgtgtggatgtccttttcgttgatattgatgatattcctgtttgttagttttccttctaacaggcccctcagctgcaggtctgctggagtttgctggatgtccactccagaccctgtttgcctgggtatcaccagtggaggctgcagaacagcaaagattgctgcctgttccttcctttggaagcttcctcccagaggggcacctgccagatgccagctggagctctcctgtatgaggtgtctgttgaccctggtaggaggtgtctccccaccaggaggcacaggtatcagggacccacttaaggaggcagtctgtccgttagcagagctcaagcactgtgctgggagatctgttgctctcttcagagccagcaggcagcaacatttaagtctgctgaagctgcgcccacagctgcccttttccccaggtgccctctcccagggaaatgggagttttatctgtaagcccctgagtggggctgctggctttttttcagagatgccctgcctagagtgaggaatctagagaggcagtctagctatagtggctttgccaagctgcagtagggtctacccagtttgaacttcctggtggctttgtttacactgtgaggggaatagggcctactcaagcctcagtaattgtggatgcccctcccccaaccaagcttgagcatcccaggtcaacttcagattgttgtgctggcagcgagaatttcaagctagtggattttagcttgctgggctctgtaggggtgggatttgctgtgctagaccacttggctccctggcttcagccccctttccaggagagtgaatggttctgtcttgctggcattccaggtgtcactgaggtatgaaaaaaaaaactgcagctagctcagtgtctgcccaaatggccacccagatttgtgcttgaaacccagatccctggtggcataggcaccggagggaatctcctggtctgctggttgcgaagacttgsggggaaaagcatagtatctgggccagggtgcactgttcctcatggcacagtccctcatggcttcccttggctaggggagggagttcccagaccccttgtgcttcccaggtgaggtgacaccctaccctgcttcagctcgctgtctgtgggctgcacccactgtctatccagtcccagtgaggtgaaccgggtacctctgttggaaatgcagaaatcacccgccttctgtgttgatctctctgtgagctgcagaccggagctgttccttttttggccatcttgccctggttcctagtcaagcattttttaagagaggattttcatatagtaaaaaaaaaaaaaaaaaaattaagtaaatactttggtttaaaattttagattgagtctgttaggagctagggaaaattatgataaataagagttaaatcccttgcctcaaaagggggagacttaaaatattaccattttccacttgcttctgtagttttaaaaagctatatgaatggttacagataatgataccatttaaatgaggttttatatgttttgttgttcttgagaggagaaaagaaactagtaatttaagctaaccagaaaatataggraagggaaawataaacaagataacacaaggaaaactagttatatcagctatggccatgtaattaggtcaaacatcttttaaataggtgtgaatgagtcagaaagcagaatccaggttttggtcatctgccagagacccatgtaaagtctaataacataaaaaataaaaatgggggccagacttggcagctcatgcctgtaattccagcactttgggaacctgaggtgggaggattgcttgagccccgaaaattgagcctatggtgagctatgatcatgctactgtacttctgcttgggcaatggaacaagaccctgtctcataaataataaataaataraaaagagataaagaagggacaaatatatattaaataaatgcatacgtaaagaaagcaagaattatacttaaattgcactagtggaaagtattaagataaaatgataaaggtattgagatatcagtgaagatttggtacacataaatctttgtttattaaatattagaaaacgtcaagaaatatgggaattataagatatctttattagtactgctaagtcagataaatgataataaaagcataaatgatctgtttaataaggttgatttaatgtctatgttttccattttgtatcatatagcaaatatatccttctcctccaattcttaaaaagctttgccaaagtgatcctatatgagttacagataaatatttaataaattcccaaagcataacttttatgagttttattttcaaatttgtaggctctgtgatactgggcaaatgtcttaactctcgtatgcctcagtttcctcatttgtaaaatcagaataaaaaccatgtttgggtgttttggaaattaaactgcatggtattaaattactgttagctattattctatatcccagaaattaatcataggtttaaaaaaattttcacagaatttcaaaatagcatccttttgagtaactyctagcagaatgagaaaatctaaacaagtatagctactttcaaaagtaagcacggcaatcagccaacatattatatattttaagatgtaataagcttttaatcagaatttatagcctaaatggatttattggtatttcaaaagaatgaacacttatgaattaattaatttgactgaagtaattgcaaaaagaacagccagttaactccaaagaaagcaaactggccaaaataaagaacaaaaacaaaattcccccaaattactggaactaacagagttcattcagtcttgttgcaatagataygtaaaataaaataaaaacggaggccacgcatttttatctactggaaaacaagtgagattatactggaaaaacagtattttcatatactggaaaaacraaccagattatataacatttccctaaatgcataaaagattcttacaaatccaatttagaaaaaaatatgaatgacctctcaaaactagctgtgagacatgaacaggaaatgtattaagaaataaccaaaacaaaagacactggccaaaggtggaagaaatcccacaagaaatcattaaaaacagtgaagtttgtttgtttggtctgtttttgtctctcagttttgcaaaggttatgaagattgagcaaattcagtgctatggagggaaatatcattcatacactatcgatggagggttagtacagtttggaaggtagttggggaaaatgtattaacattcattccttccttcattgattcatttattcatttatggattgattgattgattgattgagacagagtctcactctgttgcctatgctggagtgcagtggcgcaatctcagctcactgcaatctccacctcccaggtttaagtgattttcctacctcagcctcctgagtagctgggattaygggtgcaagccaccacgcctggctaatttttctatttttagaagagatgggggtttcaccatgttggccaggatggtcttgaactcctgacctcaagtgatccgcctgccttggcctcccaaagtgctgggattacaggcatgagccaccgcgcctggcctccacatttaaaagcatatactgttaaactgaggaattatacttctgagaacttattccagggaaaagttggtaaagcaggtaaagacatagatgggtgtgtactaaacgcattttagtttcgtgttaaaggaatacattaaattatactacatttatgtgacataaaactatgcagccactaaaagttgatgtaggtacatatttattaataggaaacaacacctgtaatccactgagtggaaaagagcagatttgttaaatcttacttatttaaaactatatatttatacacataattagatatgtagaaggatggtttctagaggatattacgtgtgattgaagatagtcatacatttaacaaaaaaaatgctgaaatgatatgaagaaaactatgaagtccctgaagagaaatctgtctctgatttgagtgaggaagagacagcctatgtttstgcctggggactrtaggtttgtaaacatgtcaattctccctatgctaatttatagagtacaatcacaataaaaataccggaaagtaagttaaaagaaaaagcacsctgaagaacttcttaatttttaatgtgaaagatacccttgaggtcttcttttgattccctctgcagaggcaaccattgttatgaagttgatttacatttttcttatttatgcctttttactttataatgtgcatctctgtccacataccttttgggttcaactcctttttctattttctattagattgataaagtttttctctattccctatttttttctaggctgctttggaggctctggattcattggttaactttaattgtgacatatatattgtatctattatatatttaatatataaaatatataatatataaaattatatattatatatctattgtatataatgatatatatttaaacatatatattatatataaaatatatatgatatataatatagaataaatatatatatgtttaaatatatattatatctatatataatagatataatatatacttttatatattatatattttatgtattaaatatattttatatattttatgtattaaatatattttatatattttatgtattaaatatattttatatattttatgtattaaatatattttatatattttatgtattaaatatattttatatattttatgtattaaatatattttatatattttatatatattaaatgtataatatatatatatatgtttttgagacagccttgctctgttgcctgggctggagtgcagtggtgggatctcagctctcagctcactgcagcctccatctctggggttcaagcgattctcctgcctcagcctcccgagtagctgggattataggcactggccaccatgcccggctaatttttgtatttttagtagagacagggtttcaccatgttggccaggctagtctcgaactcctggactcaagtgatccacccaccttggcctcccaaagtgctgggattacaggcgtgagccactgtgccgggctgtgacaactatactttatcagtgaggattcagtcagggaccagagacactaatgagtgttatggctggatataaaacytttgactcatatttttttgccatccgtggaaagcaaagggagcttatccacattcccccygtgcccacatccagcatctcgtttactctaaccctctctgcaatcagatattgtgattattgacgctagtaacgtcttggaaaaggagcactgaagccatgtttctcctggagaacttgcatggtaccctggaagctgcagcacttttctcactcacaggttgtccaggatgtttcaaggcagacctgggtgtgtgtgtgtgtgtgtgtgtgtgtgtgtttggagtcttgctctattacccaggctggagtggagtggcatgatctcggctcatggcaacttctgtctccctggttcaagtgattctcctgcctcagcctcccgagtagctgggattataggcaccagccaccgcgcctggctaatttgtgtatttttagtagagacggggtttcaccatgttggccaggctggtcttgaactcctgacctcaagtgatccacccaccttggcctcccaaagtggtgggattagaggtgtgagccactgtgcccagctgcagattttttatagtattttggagtcaaaggccaaccatgattctggaggggcaccaggtgggcagtattctgagtatccattcctttggtagcactttctggacacatgcgtgagccaggtactgtgctgatgatcacaagacaaatgttccaagtcacagtttcaggtggaagacaggcccacatttactatatactatgcagtgtaagtactttagtcagtagtcaataaagagctttagtcagtaaggagactgagaaagcagagaagggatcaagaaattctaccttgagaagctgaggtttgacatcacartgggccccaggacagcaaaggcagtgggaaatactgtcaaagatgaagttttgtctgcattgttggtgcttttgaggaaattgtcactactctgtagcagcagatattggggccaggtagtagaaggatgggcctgaccacatgcaaagtaaatgtgaactgcccagcatactgcaaggcagtttatctgggaaggcggtagctgtggctgggataaatttgcatctccacgtggaatatctgtaatggctgttagcatgttgaaaggaagctcaagcagcagggaggcctgggaacaaaagtacagctgtaaggaatgggcttaggaacagaatgaactgactcaatggaatacggtaggattgtgggtccagggaagctgggataggtgacaagataggttgctgttatgrgttgaattgtgtccccctacccaaaatatatgttaaagtcctaaaccccagtacttcagaatgtgatttattgggagactgtktctttacagaggtaattagttacgatgaggtcatactagagtagggcaggcccctagttcaatatgactggtgtccctctaagaaaacagccatgtgaagacatagagacaacgagaatgctgtgtgaaaacataggcagagattggagtgatgtggccacaagccagagaaacagaaggcaaagttggagggagtgttgtcacaagccaaggaatgccagcagctaccagaaaccggaagggcaaggaatgcattctccccagagccttcagaggaagcatgactctgctaacaccatgattcacaattctggcctccaagaacagagagaataagcctctattgtttaaaccacctggtttgtcctaattcgttattgcagccacaggaaactaatacagaaggctaaaatgaaaaagatggtaagaagtactgtcaaggatgtgtggaaattggaatcctcttagattactggtgggaatgtaagatggtgcagctccttgggaaaatggtttgacaattccctataatgttaaaaatggagttaccataagaactagaaatctcacacctatgtgtgtactcaagagaaatgaatatatacatcgtcacataaaattgctcatgaatgttcatagcatgtctatttgtaataaccaaaatgtggacacaamtcaaatgcccactgatgagtggataaacaaaatgtggtgtatccatacagtgggatattatttggcaataaaaaggaatgaataataacgtgctacaacatggttaaaccttaaaaacattatgcaaagtaagaggccagacatagactatgtattgtatgattccattaatatgaaatgtgtaaaataggcaaatccatggagactcaatttgattagtgtttgcctggggctaaggagagggagagtagggaatgactgctaatggatataggttttctttttatagtgatgaaaatgtactaaaatagtagtcatggattcacagttccaaaaaccattgaattttattttttgaaagggttgattttattgttgtcaagacagagaccttggcagagatccttttaagtagagcaagattataaggcattccttcttctcttccttcattcattaaacatacctttgtttattgtctattacgtgctaggtcttcttctaatctatgagaatatagtggttcaccagcctgacaacttgcttactcccttggaatttgcattccatcaacaatgggaaagaaaacccagaaaattatcaagtatcaggtcataccatggtagcatttttattactactccctgggcatgaaattagtgtacaaagttagaatgaccaccagcaggttggtagataattttctcccaaaaggaccatgraagtatcccttacttccttccttctcctttctttgtcctatttcaagacaagttttcactctgttgtccaggctggagtgcagtgatgccaccatagcttacgggaaccttgaactccttggttcaagtgatcctcccacctcagcctccaaagtagctgagactacaggtgtgagccaccacacccaactaattaaaaaaatatttttttttttttttttttgtagaggctgggtgcagtggctcacacctgtaatcccagtactttgagaggctgagggaggaggatagtttgaggccaccatgacttctccctttttgcagggagatttttttacacatcttcaagaaactccttttctagaatgtgtgctcagacctccacaccaaactgtaggtttccagagaggatgggaagagtggcttggtgaagaatgggcacagtcggcctgggcagaggttttgctgcttctccaaagattcttccaatgctgtgacttggtacaattcctgtccctatttgggaaggtctggtgatccttttctggtttttcttctaatgattaatagttctgcagtttgatgagtcatttttgcttctgtttgtagaagaggtgcagtatattcaggctgagaaaaacaacaagggcccaatggaggctgccacactttttctcaagttcctgttggagctccaggaggaaggctggttccgtggctttttggatgccctagaccatgcaggttagttcattctttttaatcacaaatcagaggatattactttgctgcttgacaatactgtaaaagtgaaaagctattaaatttgaagtatccacttatagttcatgcctcttagtctgagacaatgtaaagactgtttttaggcagatgatataattgtctacctgaaacatccaacaaaagaatctgcagagagattattgtcactaatggaagagtttagcaagattatttggatataagaccagtatacaaaaattagttgcatttctgcccaatggaagcaaacaaaaaatgtaatccaaaatgaagtatcatttttaataataacaattgtaatgtatttaggaataaatctaacaaaagatgtataaggtctgaatggagaaaatgataaaatgttattaaaagatattaaagaagtcctaaatggaaaaacatacccatgcacatagagaaggaggcttgagatcataaaaatatcagttctccctacattgatctgtatattcaatataattctaataaaaatcctacatactttttcagtgagtgtggcaggttgattctacaatgtatatggaagaattacgacccaacaatagtcaagacacccctaaagaagacaaatttagtagattggggcttttctttctacaygttagcatttattagaaagctacaggcattgagacagtgaaatgttggttttggcattgacaaactgaccattgaaacagaatagagaccctctaattaggaccatatctttatggaaacctgatatattagacatcactgagaaaagaggattactgggaaaggaggagctattcaaaaaatagcatttataaacagaataatattaaaagccgaacaaactcaagctggacatggtggcgtgtgcctgtagtcccagcctctcaggaggctgaggcaggaggactgctagagtccaggagtttgaggctgcagtgagctatgatggcgctgctgcactccagcctgggcaacatagggagacccctgtatttaaaaaacaaaccctgggccgggtgtggtggctcacacctgtaatcccagcactttgggaggatgaggcaggcagattacctgacgtcaggagtttgagaacagcctggacaacttggcaaaaccctgtctttactaaaaatacaaaaattagccaggcgtggtggtgggcacctgtaatcccagctacccgggaggctgaggaaggagaattgcttgaacccaggaggcagaggttgcagtgagctgagattgcgccattgcactccagcttgggcaatgagtgaaactccttctcaaatttaaataaataaataaataaataaataaaccctgtatttaaaaaacaaacgctaacttttatgcccatgtgggtacgaataaataaatacatttgtattccttacatcatgtttatcaaaaacactataaagaaagcaaaaaaaaaaaaaaaaaaaaacaaatcacaaactctgggagaagatattttcaaaatgtataatcaccaaaggattagaatctagaatatattaaaaaaagtcttaaaatcaactggaaaaagaaagaaaacatacatagagcaaaaaatttggacaaacatttcaatgaatacraagaatgaaaagtgaataaatgtaaaagattctcagcccaattaggaatttgggaattgtaaattaggaacacagtgagataacattttataactactgaatagcaaaactgaagtccaacagtgctaaggcttaaagaagatatttaatggaaatcttttttttttttttttttttgagacagagtctcgctctgttgcccaggctggagtgcaatggcacgatcttggctcactgcaacctccgcctcccgggttcgagctattttcatgtctcagcctcctgagtagctgggattacaggtggccaccaccacatctggctaattattgtatttttagtagagatggggttttgccacattggtcaggttggcctccaactcctgacctcaggtgatccacctgcctcagcctcccaaagtgttgagattacaggcatgagccactgcacccagctggaatatggtggttcttaagttggatagtaggttcacatatgttccttttcttgttatactctttattatatatgttgcaaatattctggtacatgcatcaaatattacataatttttacatttctgttttcagagctatggtgttttctatcaacagaagaatcatgaagttcataaatttggaaaggagagctttatttttcataaagggttgcagtctgcatggtggccattttgacaggctgggaagtgtagcctcgggccagaagcaggaaacaggcacttggagggtggggagagtaaaacagagatttatgctgaatagggtgaccaaatattcagtaagctacaggaggagtcatgaaagtagaagcatgcacctgggcaggtgagcttcatgcctttcyatgggacccatgttcaaaaactggcagtgttagcaagatccaagggtggagtttttggccctctgatgtcagaaggtgaagcagaggacatgaaaactctcactgcacatccttcatagactggccagacccactctgtggttggtggtctcttatcaggaagaagtgctggttggttggtgtgttgaaactgctaaagggaggggcagtcaggaggttggttgaaatcagcaatggagcaagtctttccaaagggctggtttctgtttctcatcagagaaagcactgtttctccactttggggatatgattaatctggatattataagttattttaatccttaccaacctgtcaggtaaaaacagtacttttaattttcattttaaaaattgaataaggtttagtattggaagtcctagctggagcagttaggcaagaaaaagaaagacaaggtatccaaattggaaaggaagaaggaaaataatctgtttgcagatggcarawttatttatttatttatttattyattcattcattttttgagacggagtctcgctctgtcgcccaggctggatggagtgcagtggcgcaatctcggctcactgcaagctccgcctcctgggttcatgccattctcctgcctcagcctcccgagtagctgggactacaggtgctcgccgccatgcctggctaattttttgtatttttagtagagacggggtttcaccgtgttaaccaggatggtctcaatctcctgaccttgtgatccgcctgcctcggcctcccaaagtgcttggattacaggcgtgagccactgcgcccagccgatggcagaatcttatatgtagaaaaccctaaagattttagaaaaaactattagaactaattcagaaaagtttcaggacacaaaatcaacacctcaaaattagtcgcatgtctatatattaacaaataatccaaaaaagaaattaaggtaacaattccatttataatagcattaaaaagattaaaatacttaggaagaaacctaaccaaggagataaaagactcataccctggaaacaacaaaacattgctgaaagaatgaaagataacacaaataaatggaaagacatccccattcatgaattaaagacttaagttgcctatactaccaaaagcgaactgcagattcaatgcaatccctatcaaaatcgcaatggcattttttttgyagaaatagaaaaaattatccaaaatttatagagaatctcaaggcatcttgaataggtaaaattttgatratgaagaataaaccaggaggcctcacctctcctaatttcaaaacacattacacatctgtagcaatcaaaatgatgtggcactgccataaagacagacaaataggccaaaagagcacccagaaataaattctcaagtatatgctcaaagataccaagaccactcaatggggaaaggacagtctcttcagcaaatgttgttgggaaaactggatatccatatgcaaaagaatgaattttgacacttataccatgtattagagttctccagagaaacaaaagcaataggatatatttatgtgtgtgtacatatgatgggatatgtatacacattgttacttacatgtatgtgtatatatatttttggaattggctcacatgattrtggaggctgagatgtcccatgatctgctgtccacaatctggagaatcagaagagcagttggtgtaattcagagtctgaaggcctgagaaccaggacctctgatgtccaagggcaaaagaaatgatgagctcaagaaaagagaatttgcccttcttctccctttttgttctgttttggtctttaatggattggatgatgtctgcacacatcagtgagggtgaatttctttattcagtctgattcaaatgataatctgttctgaaaacacccttacagacacacccaaaagtaatgttttaccagctatctgggcatccctaagcccagtcaagttgacacagaaaattaaccatcacacactatatacaaaatcaaatcaaaatgcattaaagagcaaatataagacctaaaactattaaaactcctagaagaaagcataggggaaaaacttcatgacactggaattggcagtgatttcttggacatgatatcagaagcataagcaacaaaagtgaaaaaatagacaaatgggactatatgaaacttatgtgcctcaaaggacataatagggtgaaaagtcaacccacagaatgagagaaaatgtttgcaaatcatatacctgataaggggttaatatgtagactatatcaagaactcctgcaactcaaagacaaaaaatcaaattaaaaaataggcaatcccagcactttgggaggctgaggcaggtggatcacctgaggtcaggagttcaagaccagcctggccaacatggcaaaaccctgtctctactaaaagtacacatagctgggcgtggtgtcacacgcctgtagtcccagctactcgggaggctgtggcaggagaattgcttgaacccaggaggtggatgttgcagtgagcagagatcatgccactgcactccagcctgggtgacagagcgagactccatctcaaaaaaaaaaaaaaaaaaggcaaaggacttgaatagacatttatccaaatatgatatacaaatggctaatgagcatatggaaagatattcaacatcagtaatcatcagagaaattcaaagcyataatgcaatatcacctcacccccattacaatggcttctataaaaacaaaaacaaagctgggcacagtggctcatgcctgtaatcccagcactttggaaggccgaggcgggtggatcgtgaggtcaggagttcaagaccagcctggccaagatggtgaaaccccatctctactaaaaaatacaaaaattagctgggtgcggtggcgggtgcctgtaatcccagctactcaggaggctgaggcaggagaattgcttgaacccgggaggcagagtttgcagtgagccgagatcgtgccactgcactctagcctgggtgacagagcaagactctgcctcaaaaaataaaataaaataaaaacagaaaataatgcrtataggtgaggatgtggagaaactgcaaccctgtgcctgattggtaggattgtaaaatggtgttaacagccatggaaaacagtatggcagtccctcaaaaaattgaaaatatatatcaccatatgatccagcaattctgcttctggtgtatttccaaaagaattgaaagcaaggtattgatgagatatttgcacatccatgttgatagtagcattattcgtgatagcttacaaggtagaagcaactcaaatgtccatcagtgatgaatggatcaacaaaatgtgatatacacatacaatggaatattattcagccttaaaaaaaaaaggaaatcctggcacatcctgcaaaatggacatacattgagggtgctgtgctgagtgaaataagccagtcacaaaaagacaaatattgtattttgccacctatatagattatctaaagtagtcagattcatagaaacagaaagagtggtggttaccaggagcaggggtgaggagagaaaaaggaatagttgtttcatagagttttagatttgcaaggtgaaaaaggtctggattttttttttataacaaaatgaatttaacacgactgaactgtacatttaaaaatagttaagatggtaaatgttttayctgttttttactacaattttaaaaaagaatgaggttgaacatcttatgtatgtttcttggccattagtatttttctctgaactttctaaatatgatttttaaataaatatcttttaaaggcatgtagaataatattaagtaaatttcccatttacttaatattatcttagaaaaattagaaggaaagttccttgtgggcaggaattaaggtttatatttctttttgccttctttactgctttccactgagaagatacttaataaacctgttgactctgactttttaaagacaaatcagggattgtaggtgaagtctatgagtcactttggaagaaagattttatactaagatcaaaatgtaagacttcaaagttttccttagtactttttcccaatagataataaatattgctagaagacctaaagtgttggctgactaaaatgaatactgttttctttttgaaaaatcaatgacaattgggggtaatttacagatattttttgaattctaccaccatacattcaaacatgatttctatgatactaatctcaaagtatttttcagttggtttcataaaagtccacattttttttcttttttttcaggttattctggactttatgaagccattgaaagttgggatttcaaaaaaattgaaaagttggaggagtatagattacttttaaaacgtttacaaccagaatttaaaaccagaattatcccaaccgatatcatttctgatctgtctgaatgtttaattaatcaggaatgtgaagaaattctacaggtaagttaatataaaatactaaaattgggggaaataattataacatgggaaggtcttctgttttctatactgttttagacctgagaaagatcattgaaacccacaaaagtactcatagaatagtacttttttttttttgagacggagtctcgctctgtcgcccaggctggagtgcaatggtgtgatctcggctcattgcaacctccgcctcctgagttcaaccaattctcctgcctcagcctctcgagtagctgggattacaggtgcgtgctaccatgcccagctaatttttgtatttttagtagagatggggtttcaccatgttggtcaggctggtctcgaactcctgacctcgtgatccacccgccttggcctctcaaagtgctgggattacaggcgtgagccaccgtgctcagccagaatagtacttttaatgtgaactgagtaatttttatgtcacaaagtttttttgaagtttgccctattttcagttaaaatcaccacagtctgtgaatagtattttatgcaaatttaaattgaacagttgagcaaatgagaaagggctacagactctagcagttaagtgtttagactctggacacagatgaattttgttagaatcatagctcaaccactagcggtatgatcttgggcaagttacttagtttctctgaatatctatctgtttccttgtgtgtaaaatggaaataataatgttaccttataatatggyattttcataagggtaatgagataatatatgtaaagtactcatgtatgtcttgcacagagtatgtgtacaataaactttagttattatggttagtaaaagtcatacaaattcctcaaccctgaaraaaaatttgttaatattttgttatctgtttccaaatattgctatatgccaatatacccatattgggaatggttgtcaaatgattattttcttaatattgctgatgaggataggtataagaacttagaggtgatgagaaggcttggcttgacatagtgacatcatgtgtaaaggacaaagatgaaggaaaaagtatcttaaaagactgtgttggatggggcaaaaattgtcatggatatgacccactgagctgtaatgtacaatggctttaaatcagatagtacatgactgacatttcttcagtaaaaattgataaagggaaaacttttgagataattgatcaataaactacagttaccttgcttagatttgctctactaaggggatgatggcaggtgcagagaaattggtggaatgccttctcagatcagacaaggaaaactggcccaaaactttgaaacttgctttggagaaagaaaggaacaagttcagtgaactgtggattgtagagaaaggtaagacactgtaccctcctcacagctctacttaggactcgctcattccaaccggtcttttacatcccatcagaggcgtttttcccctcagatagccagagctacatctctaacgcgagaccagcaggaagctggattctgggagggaggcagttacttgcctacaaaattagtttggttgcatataacccctaaaaatggactggggaaaaccactctcatccagaattagcccatctggcccaaaggatttgaggaaggcaaaatccgaactctcagtctaagtttagattatcagagaaatagcttgagaattctagagttaaaggttcaaactccaggacttacccccttttcagagttgatttcttgacagacattgcctggttctcttactggaagccatctggaactgaatccgacgggtgaaagaattggttgtcattaagtgtctgaactatcatttggtttcttgaagctgacactcagcattgtttcaaaggctgagtttggtaaacatctgaatatctggtcttagctttcctaggcttctttagatcataagttgtttcagaaactgtataaatacacatctgatttaatgggtcaagagtcagtcagaaaaggaagacatgaatgtctgctaaatcatgctcttttttttttttttttttttggtgcatacgaatccctccgaggtcttgttaaaatgtggattctgattcagtagggcaatacgttccacactttgagtaatatagctctaaattacattggaggtcaacgccaaattgagattttaaactcaaaatgattctttcaactgttttaaaaggtgaaggggagtggttgtgagaaattttaatagaagttaaaaatcttagtgttatgaccattttgtggagctttcaccatcaaaactataatcagattatgtgaagattctaagacttttttggtcttaaaaaggtataaaagatgttgaaacagaagatcttgaggataagatggaaacttctgacatacagattttctaccaagaagatccagaatgccagaatcttagtgagaattcatgtccaccttcaggtacctggtattgtttgtccttttccataatggtgctcttctggtatttggtgtggggacttgttttgcagtacccaaagtcacagccttgtgaaaagttttgtaaggaaaattaagaaagtaaagagaatttatgttacaatagatactttttctatatttagaatgccattctctcctagttcttccactatctttttttcttcttttactatcttttttttcttcttctaccactragaaagtatgggcgtgtctatattggaaatgcaaatagagtcttcaccaaaacccaatgtctatgaattcccaaatcaaccttgctttctaaataaatactacttctatttctgagtcacttgctcaatttccttttaggatccctgggctgccctgcaagttgatgaagttagtgtgctacccaaatgcgcctggctgagaggttgagtaggggctgagatccagcctgtgtcgtttgcaacacagtgcactgaggggctgtgtcctccaagaggagctcccttttgtcatttacacaaaggcactgtataagttagctgtggccctgtgaggcccccttatgcttctcaaagcatattttcttgatggttttatgagaccggmaagttgcataatatgccataataaaaagttatgtataaaagagtatcaggaaggaaattgggattaatagtggtggtagaagaaaaatgatattagaataacatcataaagagaaaatgtgcakattacgtctgcaactgamtgttacaagtttttttgttttgttttgtttttttggtcatttcagaataaaatctgttaccccttggaaaaaaaaaacagatacatgaatatgagttgctttaaattttctgacacgtgaagattcttgcatgccttttgttgttgttgttgttattgttttttgagactgagtctctcgctctgttgctcaggctggcgtgcagtggcacaatctcagctcactgcaaccttgggttcaagtgattctcctgcctcagtctcccaagtagctgggaccacaggcatgtgccaccacatctggttaatttttgtawtttttttggagaggtggggatttcagcatgtcggccaggctgttcttgaactcctgacctcaagtgatccatccacctcagcctcccaagtgctgggattacaggcatgagccactgcacctggcctttacatgtctttcgtgtgagtttaattcacttaaccttttagaaattctccctttctctaaaatgggtaggttagactcagtagataatttccaaagtctttgctagctcttaatgatttatatgcctacctgttattgagataaagcctttgattattttttaaaacttctggttatgttgagagaaaatatcatttgagaacttgaagaacgacaaagcattattgctccttaataagaaattgctttgagaatccaatgttaacagtttggttttcttcaaagatcgtgggaggatttgttgcttttttcacatacagcattgcctttagtagacagcttgtcttaccctgaatggggccattctttctttggtttctgttagccttccatgattgtataaaaaataattcatgtttttttttttttctttcttgccatcaatactttgtcactgagagaattctgtacttcaaattagtggaaaagctagaatggttaccaagagaaaggattctaaactttctccaatgaggatcttcttgctggagtcagaatttgtggacattagactgtagctattgccgtgattcctcagagcaggaactgtttggtaattttgctccttttgtattccagaagtgtctgatacaaacttgtacagcccatttaaaccaagaaattaccaattagagcttgctttgcctgctatgaaaggaaaaaacacaataatatgtgctcctacaggtaagcctattgccattacttacatagtttttctgtttgcttccttttttttcttttgttgaatactgggacagaatgggcaagtttcagttttttccttgttccatgtgtcttttgagaaaactgtcctaatataatcctaatgttttttatgggattatgtaattaattaattatgtacattaatgtatttaatgtattttctttacctttcatgagaaggtaaagaaaagtgtcctcttttagcttgcttttgggtcctggctgttggcatgctacttagggagcagcttgatattttttagtcatagtgtaaattctgtaatcattaacatatttaaattatcaattaattagtcagctcagtggtattagaagagccaaaaataaacacctttccagagaaatatctaatatatgagttacatgttttcttttttccttacatgttaaaaggttgtggaaaaacctttgtttcactgcttatatgtgaacatcatcttaaaaaattcccacaaggacaaaaggggaaagttgtcttttttgcgaatcagatcccagtgtatgaacagcagaaatctgtattctcaaaatactttgaaagacatgggtaggtataatagttgcttcaacttctttttctccagcttcatgtaattgatgtgttttctgttttgtttttgacaaatgatttaaaaaaatttatattagattcagcttttttataatccagatgttatcccttcatggattcaagtcttttttgttagatgtaccagaaawcktaaactcccctggtttgcccttctatggggagtaaatgacttcaggaataaatttgatgtttacgtggcacatttaacttctttagtgattttataatttatttgatattattcttttacgtactcttttctctcytagtgacttaaaataatatatagtactataaattacaactagcttggatttattgatctcttactatgtgtcaggctctgtgctaaggacttgcctacagctattcttcttttggactcagggagaatttaatcagttgatgttctgatctagcatttcatctttgtggttccttatccacatsgtggttagtaatatggaatttctgtcatttcccaggtatagagttacaggcatttctggagcaacagctgagaatgtcccagtggaacagattgttgagaacaatgacatcatcattttaactccacagattcttgtgaacaaccttaaaaagggaacgattccatcactatccatctttactttgatgatatttgatgaatgccacaacactagtaaacaacacccgtacaatatgatcatgtttaattatctagatcagaaacttggaggatcttcaggcccactgccccaggtatctccaaagtcagacgaatgcttcagargagctataatcttcctaactcctattttcttactcttatggccacactgaagatgtccttctcaggtcccaagtccatattgtacaactcattatgaattttgtttcctttattcatttgttcacttagtaaatatgcattatgtgcctccatgtgccatacactgtgtgttagtaaaaacaaaaaaacgccctaccccagcaggaaagagttatatgaggggttgtggaaacattgtaccatttctcagacatctaatgattttgaatgctccttacaggtcaytgggctgactgcctcggttggtgttggggatgccaaaaacacagatgaagccttggattatatctgcaagctgtgtgcttctcttgatgcgtcagtgatagcaacrgtcaaacacaatctggaggaactggagcaagttgtttataagccccagaagtgtaagttggatccaataacaagcctttgagattctgttactctctactacctctagttcagagccatctagacgaatactgaactttsaccctctctctgtttagtagaaaatatttaaccttgaacttgagtaacagtcacattttttagcctctctaactgagctctcatcccaagcaatggatgaacctcagaagtggcctgtagagagcaaacattcttcctctttgcttccaaaaacctcttataaatgtactagcaatgcaaaagaggtgatgagagaatttaggcatcagatagccaagagctgggctcactcagccttttcccatgctctgtgcctgtgtggtcatcactgtttgaatatgtatttgatcattttagttgaaatggaatgatctgaattcatgatgtcactcctccaaagatcagatatgattttttaatatgactaacagttgtttattgatgttattattacactaaccctgaaaggaagagagggatacagaaaatatatatgacttcacccttgctctctgagtagtatgtgactgtatttctgaggtagaacaaatagacatgtaatagggagtggtgtagataagttcctttttgaaggctgcttgtaagtaaggattttgatgtacctgatcccaacttttcagtgtcacatatgaatttctttacaatccggttcctcctgccctctgagcttcatcacctccaaacattcataaacccaaccatgttgcattcctctgggctcctcaatcatgccgtgtgctttctctctcccaccttttgtctgtgcttcctttgtacatcactgctcttttttttttttctttttctttgccaagttgtgatggaatatacatgactactcttgctttcttctttcttcttcctgtatttattctacaactctgacttccctggaagaattaggtgttacttyccctgtgttttgtgacactttgcgtgtactacttcttttttttttttttttttttgagacagagtctcgtgctgttgcccaggctggagtgcagtggtgcgatctcggctcactgcaaacctccacctcctgggttcaagtgattctcctgcctcagtctcctgagtagctggaattacaagcgtgtgccatcacgcctggctaattttttgtatttttagtacagacagggtttcaccatgttggccaggctggtcttgaattcctgacctcaagtgatccaccctcctcggcctcccaaagtgttaggattacaggtgtgagccaccacacccggctacactttacatgtacttctgttagagaactgctacggttagttagccatgtatatttctctcccttaagatcacagccctgtatggagcatgaagtgtgttctttcaactgtctataatcaaagcatggcacattgcaggcaattaataattaggctgaaataatatattgataaatggtaggatcagtgtgaatactgctgggagctgtgtggggagggagaatatcaaagcacagagacagggttagattgtggcacttgcagagacatgagagatgcccgcctcatcagagaggaggtaacaggacagccacagtaagaagctggttaggccgggtgcggtggatcacgcttgtaatcccagcactttgggaggccaaggcgggtgggtcaccagctcaggagttcgagaccagcctggccaatatggtgaagccccgtctctactaaaaatacaaaaattagctgggcatggtggtgtgcgcctgttgtcccagctacttgggaggctgaggcagaagaatcacttgaacctgggagacggaggttgcagtgagccgagatcgcgccactgtactccagcctgggtgacacagtgagacttggtctcaatcaaaaaaaaaaaaaaaaaaaaaaagaagctagttagacctacaccatgaaagacaggtgttagaatcagtacaagaagcaacagggagccattgcattttgagcatttgttgtatcatctggaccacctgccagttagcctggaaccttaggtttttcagaggaagtatcaaaggcagagaaaggttttagagatacctactttgaactacaatctgtccttcctgaaaatatactcactctttttttctttttcttttttttttgacgtctcyagttttcaggaaagtggaatcacggattagcgacaaatttaaatacatcatagctcagctgatgagggacacagagagtctggcaaagagaatctgcaaagacctcggtgagataaatctcatattttgtgttctctctactggggaatagccatttattgttcactatcgtctttttgtgttctccttagttcagacaatgtcaagaccatatccagaggttgtcttccttgattataggttatttaggagccttatatgtcctcctctattctttctttcttcctttttttccttttaaatccaaagtaagttcatmcagacacatgcacctgaaaaataaccatacttaagtcagttcattgctttctctaccttctaaatcagctttccctcctgactttcctgttcacctgaatgaaaccaccattcctctactggctcagatttatayctagggacaatcacccagcacatttcccagcattaaaggagtgcgactagagatgggccaggggaagacagtgaagggcctggatttgaattttatcctaaaaacaatggggaaaaaagtgaagattaaaactgattagtgacgtaataaagataccagtgaatgagaaggaccaaagagaggcagtagagatggattggagaaggaaggagacacatgtgagatgcttccaactgtgagtgttatgattgaatggctaaacggatttgggtggggatgagaaaggggcaggaggggctgatttccccccaggcatctggcttaggcacctctatgaatgccagtgggtggtcctggtaccaggactagaagcagccttggcaggtacaaggttttgagttttgagttttagggatgttaaatgtgacgtctgtaagacacctcatggagtgtctcctctcacacttattttgcttttctctccccttttctttcacagtttaatttctattataattgttctaacagccttctagctgattttgcctacctctgctctctcttccattcaacctctcatgaactagttagtcttcatgaatacattttatcatgtccctgtcctgcttaaaaaccctttgcctacaggataatcttcacgcctctaacctgcagtctgagccctgcctgaacacccaggttctacttatctttccaatgttatattctactacttccctacctgaatccttttgatttagcagtttcccgaatgtgttcatgcatatgttcattcatttagtgctaaggaatgggctaggtgatgggaatacagcatgaaccctaagatacagcccctggcctcagggcatttctagtctgatggtaagaccaaaattagagaagtaatactaatactaaagcagctggtgtggtgggggtgataaggtgtgtttcaggcacagggaatagcatatgcaaaggccaggagactagaaagagtatagggacttccattagtcctgtagaatgctgaaaggagagtggccagaaatgagaagcaaaagcaagcagaggccagagcatggggaggagcgtgtgagctggkgcaggattttggctgcaggaacccactaaaggcttttaagcagtggggtgggatgatttctcatctgcaattttgcaaactccctctaaccactgggtagagtatgggttagagggaacaaggcaagaggaagggagaccagtttggagattgtcatattatccagcarcacactgatgtggtttgaattggggaagtagcagaaggatggagagacggtgatggagtcacgtgagtttctattttcttactcctcccacctcccgtaccctgcctccacctttttgccagtccgaatccagttagctgctcatctctaaactgcttaggctatttttacacctacccaggttcaatcagtacctgttggctcatcttctttactgctggccacctcgctgtagctgcaacttggaaagaagcatgtcaatactacttgtttgggtagcctcctttgttcctattattgaaaatgaatgagtgaggggaagaatttaacccagaaatacagctcttgcttgtgacttttgttgtactgtgctcttcatgaggagccctggcgaactgataccagagtaactcacagactcagctgcttgagaacacagccatagtytcctcatcttatccccagcaccctacacagagcctggaccacagcagatgccccagctttgaaccaagcaactgaggcttatcctaggagatgcacacagacagatgcatgtgtgatwagtgtcttttgagggccgattctatgcttggccctgagaatgctgctctggagaacaggaggcccaagttcacagcaaagcrgaacatagggtgaactgagtcctaaatctcctccttgattttttttttttttaagagtctcactctgtcgccaggctggagtacagtgacgtgatctcggttcactgcaacctccgtctcctgggttcaagcgattctcctgcctcagtctcctaagtagctgggacttcaggtgcgtgccaccacccccagctaatttttgtatttttagtagaaacggggtttcaccctgttggccagggtgatctcaatctcttgacctcgtgatccacccgcctggggctcccaaagtgctgggattacaggcatgagccactgcggccggccaatctcctgcttttatatatcctcctctgatgaagctcttgagacctgttatttttacttcttcatttttaaaggcaaagttgggtttttcatgtctactgttttatttctgggctgctttggttgtcagctcatagagccagtagagcttgggcatctgacacatgtgggtttgaattcctgccctttctccacgtacttgctgtgtgactatgggtaaattacttattacttggcttttctgaacttcagtttcccaatatatgaaatgtaatatgtatctcatgggttgtgaaaattaaatgaaattatgaatgtaaggtactttgattcttggtacacagtactcaagaaacaatcaaacacacacacacacacacacacacacacaaacaaacacacagatgcactgcttaaaactcaagggagggaacaaggcaagaggtagggagaacagtttggaggttgtcatattatccagcagcacagtggtgttatctcaatgggggaaggagcagaaggatggagagatggtgatggagtcacatgagtttctattttcttactcctyccacctcaggtaccctgcttccaccttttcaccagtctgaatccagttaaatagttttaactagatgacttaagactatttcaggaggaatatcctgtttgcagagagtaagaaagaaaattaggccaggtgcagtggctcacgcctgtaatcccagcactttgggagaccgaggcaggcggatcacctgaggtcaggagtttgaaaccagcttgacaacatggtgaaaccctgtctctactaaaaatacaaaaattagccaggcgtgatggcacacgcctgtagtctcagctacttagcaggctgaggcaggagaatcgcttgaatccgggaggtggaggttgcggtgagccaagatcgtgccattgtactacagcctgggcatcagagcgagactctgcctcgaggaaaaaaaaaaagaaaaagaaaattagagggtgaggcctgtttataaccctaaatgactgaccatatgagacagtgaaaaacttttttttttttttttaacagaaaacttatctcaaattcaaaatagggaatttggaacacagaaatatgaacaatggattgttacagttcagaaagcatgcatggtgttccagatgccagacaaagatgaagagagcaggatttgtaaagccctgtttttatacacttcacatttgcgggtacgttcctctttttaagagtcgtattctggtcacagcacctactgggagtggcaccgtggaagccaagataacatcaacttctcatcctgtcctcaagagctcacttaggaacctttccagaaagttcttatgaagcaaactccaaaagttgtcccattcaacatcatctcgatttcctttctgaaatttcatactgcaggcaacaggactgaaataaaggctcagattctatgccatgcctctagcattaactgacatggttggaaaaaattgggtgattgtgagagaacattattccagatacaagaccagtccagtgacagcatcttgaaagctcagcaagtggaaagttctgttgctatgtcctgaagcacacatttcttcacctttggtgacgccccatgctcagaaatccaggttctctggctcaccaagaagttaaggaactatagtgacagctatcacctctgcttatccagccattgaaaatatattaaaatgcattcaattagcatgcatttgtagaattttagttagcttagttgtacatttgatggatgtggtcagggccatcattttggaaggtacactgacaatttagtgatggcttcagatgtatatagaaatcaagtgaaatgttggaattatgaggcaggttgatgtggaagttgatttactttccttatttttaaattttgatatgtgtttttcgtgcagtttttcttttctaaggtaaaattcartaatccaaagtgatgataattaatgttactagctaattgagttttcttttaacagtatttggttcaaagattttgttacataactgttagaggccattcatctttaaaaagctaagttggaatagatttgaaaagaaaagttttcttaaaacaattcgttaaatacaacgaattgaacttaaatacagtgaatgtgttagacattggaagcatattgagacagtttttactttcaacagaaatataatgatgccctcattatcagtgagcatgcacgaatgaaagatgctctggattacttgaaagacttcttcagcaatgtccgagcagcaggattcgawgagattgagcaagatcttactcagagatttgaaggtgagtggtgttttcagaggaggaagccacagtagcattcttggtgactggaatggcaaaacaaacatgtattgcatttaatatatataaacttggggatgcttagggagttgtcctggatgtaggaagatggagatggtaggactatttagcttcaatgaaatctagtacctatgggaagagtctgttgcttataccattccctatttagaagaaggaaaaacaagatttgcaaagggtgtttcccatatggttcacagacagtagcattctttttgtttaacgttcttttttagtaattttataaagctttaaaaaatatgaaaaagtgttttaacgatattaaaaaaaccataatttatgtatactttttttttttttttgagatggagtcttgctttgtcgcccagggtcaagtgcagtggctcaatcatggctcactgcaacctctgcctcccggattcaggcaattctcatgtctcagcctcccgagtagccaggactgcaggtgtgcgccaccacacccggctaatttttgtatttttagtagagatggagttttgccatgttggccagattggtctcaaactcctgacctcaagtgatccacccgtctctgcctcccaaaatgctggaattacaggcatgagccactgtgcctggcctatatatatttttacataaagaggaaaccaaaatggcacataatctcactgcctgcatatgattaaaaaatagatattaaacaaacaaaaaaaagttttccttctccctgttttgaattctttcccaaaggtaattagtgctaataattttggggtttttttggcctctacctaagtatttactgtacatatgtgtaaccagtgctgtgctggttaatatttaacaacccactagagaaaaaatgtatgcatatatatgtacataagcttattattttattgatatagaggagttatacaaaccacaatttataaataaaaataaactattctttattgtaaattccacatagccaattggttctcatagaatgcttttggtggtttttgcagattttttgtatccatggccaaccaagggttgcaatgacaaagaagtgtggttctttctgatatggttgttggtatatagtttcattaatgttagaagataaagatgaaacaacaaaggtgtatgttggaacttcactcgtttgccagtgatgcaagcaattttttgctgaactgtataatagtttttcaaaaactgggagaatgtttctcaatattttgtgctattcaatgtaatagctaaatttaatctgtattattattttttgatcatgttcataagtctaaactctcaacataaattaagccgggcatggtggctcacacttgtcaccatggcactttgggaggctgaggtgggtggattacttgagctcaggagctggagatcagtctgggcagcatggcgaaaccccatctctacaaaaaatacaaaaattagctgagcatagtggtatgctcctgtggtcccagctccttgggaggctgaggtgggaggatcacctgagcctggaaggcagacgttgcagtgagccgagattgcaccactggaccccagcttgggtggtagagtgagtccttatctcaatcaatcagtcaatcaataaagcactgattttttgtgttttcttgatttccatggtataactgctcccactgtagtgaattccaggctaccaacatgatgtcattgaactagtgttaaaaagagatgagcagcagcacatcattctatagtatttctaccatatagataacaataggtgtaactaacctcaaaagcgtagataattgtaaaaagtaataaaatttaacaattggccaggcatggtggctcacacctgtagtgccagcactttgggaggctgagatgggtgggccacctgaggtcaggagttcaagaccagcctggccaacatggtgaaaccccatctctactaaagatacaaaatattagccagatatggtggcacgcacctgtaatcccagttacttgagaggctgaggcagaagaatcgcttgaactcagaaagcagaggttgcagtgagccaagagcgcaccactgcactccagcctgagtgccaggagactccatctcaggaaaaaaaacaaaaacaaaaaccgataaaacagaaaccacaacagttgactcccatagtcccatagtccggtatgatctggctgtaacacacccctgttttataactatatgtattttttttctttttccttttttttgagacagagtatcattctctttcccaggctgtagtgcagtggtgagatcttggctcactgtaacccctgcttcccaggttcaagtgattctcctgcctcatcctcctgaggagctgggattataggcgcccatcaccacgcctggctaatttttgtattttaagtagagatggggtttcagcatgttgaccagtctggtcttgaacccctgacctcaggtgatccacccatctcagcctcccaaagtgctgggattacaggtgtgagccaccacacccggcctgactatatttttaaagatgggataatactgaacatactgtccttaccttgatttttttaaccttaaaatatttttggtatcatatatatcatgtacatagctcccttattaattttcacagccacattgtattaacatcagatgcatagcccatgatcttttgaactgtttccctattgttgggtacttaggttttctgtttttcttttacaccctgaacagtggtacagtgaaatccttggagacctcttccataattttctaaatataactgtgtctcaaattcttagatgtagaattattggatcaaaagatgtgtgtgtattatgttttgatatatattgccaaattacctcttaaaaggttgtaccaatttaaaacagtacttactactcataaaattctggtcaaagatttagagatcagctgtttgaacgatagctaaaggtcacagtgtgttctaaatttttagaatttataagccatttataaaatgtttcccatttgcagaaaagctgcaggaactagaaagtgtttccagggatcccagcaatgagaatcctaaacttgaagacctctgcttcatcttacaagaagagtaccacttaaacccagagacaataacaattctctttgtgaaaaccagagcacttgtggacgtaagctttttttctccttgtagataacaaatggacccagcactattcattgaaaagattgggctgggtatggtgtctcacgcctgtaatcccagaagtttgggaaatcaaggcaggagaattgcttggggccaagagttcaagacctgcctgggcaacatagtgagacctcatctcttaaaaaagaaaaattagctggtgctgtgcacctgtagttccagttacttgggaggctaaggctagaggattgattgaggctgcagtgatcatgacagcgtactctgcactccagcctgagcaacagaggtagaacctgtgtctaaaaaaaaaaaaaaagccgttttctctctacggtcaagaaaccatatatgtgtatgtgtgagtctgttctgagtttctctattctgttctgattatatgtttatccttatactaatactctaatgcctcactgtgttgtttttttttcccccacttagagacggggtctcactctgtcacctaggctggaatgcagtggtgcagtcatggctctctgcaccctcaacctctcaaactcaagcgattctcccacctcatcaccctctgccaccatgcgtgggactacagtcatctgccaccatgcccagctaatttgtttatttatttttgtagaggtggggtcttgttatgttgcctagactggtcttgaattcctggcctcacataatcctcccaccttgccctctcaaagttttggaacctggcttcatgctgtcactatgttagtcactctaattgtaagtattgatacttgtagagcaagcatttcttcctttttttactttttaaattttagtcattttgtgagtaggtaatgatacctcattagagttttaattttcatttcactaatgagtaatatggctgaacatctttcttctgcttgttagcgatctgtaactgccttggtgaggtgtctgttcagatctttgaaaaccaatcttttgaaaagattggtatatcatctgattgagtttttgagaattctttttatagtctgacaaaaaagtcctctgtcagaaatgtgatttgcakatattttcttctggtctgtggcttgtctgcttattctcttgacagtatcttttgcagatggaaagttttaagttttgacaaagttcagtatatcagttttttcttttatgggtttttgcctgtggtggtattatctctaaaaatcctttgcttacctaaggtcacaaggattttcactatgttatcatctagaagcgttacagctttacattttacayttaggtctacagtcaattttaaattaattttgtataaggcgtgaggtattggttgagatgctttcttttttttttctttttgtgtatggacattcagttgttccagttctctatgttgacaagactatcctttcttcactgaattgcctttgtaacttctgaaaacatcagttgactatatttgcatggatctgtttctggattctctgttttgtttattgatccatacatacacctcttcacccattccatgctgtcttgatcactgtagcttgatagtaagtcttgacatggggtgatgtgagtcctccaattttttttttaaaggttgtttttagctatgttcctttgcctttctatatacattttagaggcagctggtccacatctatgaaaaaatctgctgggattttattgaatctgaacacaaaactgaggctgggcatggtggctcacacctgtaatcccagcactttgggaggctgaggcgggcgratcacttgaagtcaggagtttgacatcagcctggccaacatggtgaaaccctgtctctactaaaaatacaaaaattagcctagcgtggtggcttgcacctgtaatcacagatacttgggagactgaggcaggagaatcacttgaacctgggaggtgaaggctgcggtgagctgagattgcaccactgctctccagccgagtgatggagtgagacttggtcttgaaaaaataaaatatttttaaaaatacataaagataaaattggggaggaatgacatcttgacaatattgagtgttctaatccatgaccatagtatatctctttatttatatatggcttccgtattagttatataatgctgaggaacaattaccctaaaactgagtgtctggaaacaacaaacatctattatcttacaatatctgtgagccatgaatctggaaacaatttaactgggtgtttccggctgaagatctctcatgaggctgcagtgaaggtgytggccatggcttgactggggaaggttaacttccaaactcctctcatatggctgttggctgaagagcctctgagttcactcatgtgggcctctccacaggtccatctcacagaccagcagatggcttcccctagagagagtgatcccagagattgagatagagggtgtctaatttggaagccacagtcataacttcatcttggaaatgatgccacattgcatctgttgtattttattcattagaagcaagtcagtaagtccccttcacactcaggggaggggattacatgaggatctgaatacagaaggtggagatcattgagggctaccttagaggtagactaaccagatgttctttggtttcttttatcagtgttttgtcattttcagcagattctgcacatattttgttagacttatacctaggtattaattttttgatgctattataaatggtactttaaaaccttttttttttttttttttttttgagacagggtctcactctcattgcccaggttggagtacactagtgtgatcacagctcactgcagcctcaacttccctagctcaggtgattctcccatctcagcctccccagtagctgggactgcaggtgtaaaccaccacacccagctaatttttatttttatttatttaattttgagacggagtctcggtctgtcacccaggccggagtgcagtggcacaacctcggctcactgcaacctatgcctccccggttcaagcgattctcttgcctcagcttcctgagtagctgagactacaggtgtgtgccaccatgcccagctaatttttgtatttttagtagagacaggcttttgccatgttgccgaggttggtcttgaactcctgggctcaagtgactctcctgcctcggcctcccaaaatgctgggattataagtgtgagccactgtgtccagtacttaaaaacttttgaaattccaatagtttgttgctagtatgtagaaatacagttgaattatgtatattgatctcctgtcctgtgatcatgctaaactcacttattctacatacccactatttttgaacttttgttttttcttttaaaaatgtcttagagatggccaggtgcggtggctcatgcctgtaatcccagcactttgggaggatgaggtgggtggatcacgaggtcaggaattcaagaccagcctggccaacatgatgaaatcctgtctctactaaaaatacaaaaattagccatgcatggttgctgatgcctgtaatcccagctactcgggaggctgaggcaaagaattgcttgaacctgggaggcggaggttgcagtgagcgaagatcgtgccactgcactccagcctaggcggtagaccaagactccatctcaaaaaaaaaaaaaaaaaaaagtcttagagattaaaccatatcaggttacagagatctatgccattttagttaattattacatagagttcaattccaaaatgctttttttctcaggtttgtcagtctgaaaactgtacgtgtactaactttaaatttttttctttttgcatgtatttcaatattgaattaatacaaatgatttataaggagtgtccarttgataattgcttttcattttcaggctttaaaaaattggattgaaggaaatcctaaactcagttttctaaaacctggcatattgactggacgtggcaaaacaaatcagaacacaggtatttatatatagtgaattagatttagtggattatgcatttaagaatatgtgtgtgtgtgtatgtatatgtgtgtgygtatatatataatatatatttcaaattctgttttaatatatatttcaagttctgttttaatgcttctatcagtcaaggtttaaccacagaagcaaaagcagtaggtgattatacatatatatgagaggtgtgtgttgtatatgtgtccacatatgcatatatacagagatttcttgcaaggaattttacacaattgggctggcaaagcaagtctgaagcgtgtagggcaggtagtcaggaagagactatcaggaacagactggaaccccccagacatgagctgtttggagtctctgactttggagaaggcctaagccgtcttttaaaaggctcacctgattaggccaggcccacctggagtgaactctcttttgatctgacttaaagtcaactgattagggacttgaatcccatcggtaaaatctcttcagagcagtacctagatgaattactgggaactgttgtttggcctagccaagttaatgcatcaaaaagccatcacaatgctcaaatgccaaaaaccactccagkctctttccttgtagacattgcctcctctcatatgtcctgcagacaaagccagggttgttttttaagtcatgcttgcacgcattatcatcctgctcaaattttcaaccaatagattaagattgtctagaaatagaaatgttctatttctgttttattgttattctttaagcagtagatatgcatagcttttgtgtatattatgtattttacaattttaaaaagtccaagcagacaattctgaaatccagctagagtggtcaaaggataaaaggctgcctgtgttattatctgggaggatcctaggtggcccgccctcatcctgaccacctcacagctgtgccccccacccctcagtgactggcactgacaagtcttcctatttagtgttgtttataataagcaccctcccatacccaccctgtcagtccctagttatcaccctcgcactttcccttcatgtcatttttaaacttcataaatatgaaaagtagattcagatcttaaaaagtggctcaccaaatgaagtctaacaccatatttttgtggttgggattcaaagttctctgcgatctgactccaacatgagtcctccttgattttcaaactttgttgttcctccacaagtagacactcaggaaatattttcttattggtttgttcatttattcatccgttcattcaacaacatttatttataacttgtgctgtgccaggcattgtgcttctgccatgtagccttccccaacctccaaaaactggtagagagctccttcttccacattcgcatagcatcctttctgtgctcatcatactcaattatagcttcttatttatatttttcttctacaaaatgtgagctccttgtggataaaaatggaccttttaatcattatttttatctgacaagccataattgctgaataaatgtttgactgaatagatgaataaactaagaaattaatcacgtatgatgtctgttccagagatgctcattgtttagtagatgatgatggtgaaaagaaattgttttggccttagcaaaatatatctcaagatttgggctggaaatatattaggaaaaaattggaacttttatttattttattttatttttgagacagagtcttgctctgttttccaggctagagtgcagtggcacgaamtcagctcactgcaaccttccagtttcaagtgattctcatgcctcagcctcccaagtagctgggattacaggtgcacaccaccatgcccagctaatttttgtatttttagtagggacaggattttgccatgttggccaggctggtcttgaactcctggcctcaagtaatctgccaccttgacctcccaaaatgctgggattacaggtgtgaaacaccatgcctagccaattggagcttctataaattctgttaaccctgaggtagagaccactgaagtattttcttcactcagtttatcagtgtgaactctatagcttttatcgaatgggttaaacttgatttaccagtaaattaagacaattttagctgaatttgtttctggtctgatcctcttccttgcacagttaagctagaagaattgtgaacacctttttttacaaaaagctgcatgtaaacaagcaaaagttcagtttgctaaatttgtatatttccacatttccatttcttaatttcctgtttcatgaagaagcaggttacctaacctcttcatgacttactttcttcatctgtcaaatggaaaaataataatagtacctagctgagagggttaatgtcagtagcaaaatctggctcactgcctgcttatgaatgactcttgagctgagaatgatttttgtttgaaaaaaaatcaaaagaatattttatgacatgtgaaaggtttgtgcaattcaaatttcattgtctataaaataactttttgggggaacacagtcatgaccattcatgtatgtattgtctgtggctgctttccaactataatggcagtgttgggtagctgagacagcatgacccacagagcctaaagtatttactatacatctagcccttatggaaaaagtttgcccacttctggtttagaacaatgcctggcatgtggtgagtgctcaatgtatgttaaatgttagttactattcacatccagaacttttatgtaatggtccacaatgctcatcatttgtttgattttggttttactgagaatacatggattcaaaaataacagaaagtatgtatctttaaaaaaagtattctggataaagaaagctcaaaagtaaaatcaaaataatgtttagagattgatttttaagcaactttctgaaaataaagctgcctgcatttgaattttcatgactttgaatggtaaataattcaaaaaccacaagggatctttttccacaaactcttgagtccactgccagctaggtaatggaaagtaatatggattaccttgctctacctgcctgaggtgggtccgccctgtgagcagtgagtggagatcaggtgattctactaatagataaacgtagatgtctttaggatccacacggtttgaagtgcgcatattgtttgagccaccattttgggtgtccgccatgattacacaaactgggtgattatcacatccaaacttcacactgtattcagacaatttaaatttagcctccactatcgcaggatattagaaggcagtatgtggttgtcttagtcaagatcctttcttttccccgattaacagaaacccacttacgctagtctaagtagaagggggtgtggctgctaccgggataattgggtctaccatagaacccgcagttcggaagtgcactcgggctttgtggacaattgcaatcctgaatcctgcacatctgcttcacagttttccctttacagattgctgtctctgcttctccattcatgactgccccacaccttcctgatttactacctgtctccaatcccaatttcagattccaagagggaagaattggattggcccaacatagttcaaatgcttatttcagtccagtagctgcagccaggaacaggctgtgtataaatcagtgtaatctaattgctctaacagacaaccctcacgatctcaggggcagggcaaaataaaagttatagctcacactcacagatgtggataggtaggggtgggggctctgctcacttatgctcccaagtgtagataggtaggggtgggggctctgctccatcctcttccacttattgtagggacccaggctccttccttgttatggctctgtcatcacagggggtctccaaatcctccactatgaccttatctggtccattgatgagaaataacaagaacatggacaatttttaggggtctggtttggaagagacacacatgacctctgtctacatgccattagtgacagtttagattgcgaaatataattcagctgtgtgtgcctagcaggagaaagaaacaagattggtgagcagatagcattgcctctttcatagagaaacataatacaactgtattgtgggtgggtgtggcagaaaatgattcttagtttgtgtatggggaggcagacaccccaacagtgcacactattagggtcttaaactgaagttcaaggcccaacactgctgatagctagcttgtcagtttacctcacttctggaacctcaagcccctcatttgtgtcttttttttttttaagatagagtctcattctcttgcccaggctggagtgtagtagtgccatcatggctcactgcagcctcaacttccccagctcaggtgattctcttacctaagcctcctgagtagctggggctacaggtgtgtgccaccatgcccagctaattcttaaattttttgtagagatgggttctccctgtgttaaccaggctgatttcaaactcctaggctcaagtgattcacctgcctyggcctcctaaagtgttatgactataggcgtgaaccaccatgcctggcacgaccctcgtttgttaaggggaatcagagcacttaccctttgacctatagggctttatgatgctctggtgagtgagaagatgtgaaaatgttttgtcagctataaattcttacacacatgtaaaggtgttacaattaggtgttgatatttctgcaaaaatgtctatttcttggataatatggctaaagccatacaactagtaagtcccccagagctgggatttgaactcagtcttgtggcagagtctgagtgttagatgccaccctaaatgtcctttctgaaacaggcataggaatagatcccactgcctaggtgtgttgtgagatcatggatataaagtacttatcacagtacttggcatataataagcattccataattagtagctgttttttcaagggggaagttccctctttggtgagttgtataatgccctcttactctgacacaggaatgaccctcccggcacagaagtgtatattggatgcattcaaagccagtggagatcacaatattctgattgccacctcagttgctgatgaaggcattgacattgcacagtgcaatcttgtcatcctttatgagtatgtgggcaatgtcatcaaaatgatccaaaccagaggtaagagaagctttgaggccattcctacatggattctgttttgactgatttwtaagtgtatgtgtcattctggcctttctctttactgagccatggttgagtatgtgaccaatggcacagtgcactttggtatcattggcccttaaggtggctacagttttgttcactaacataaactctactttgattcttacaatgatgctgctcacttgcctggcattgactgatatatttatggargaataattccaacttggattgaagctttgccagtcaacatgtaaacctttcatggtggtgctggtgggctgaagggccccctgtattcaagaagggatactccagagttgttctgccccacctggacttgactagtctcctaactattctttcctcctttttccttttcttcttaaaattccataagtacagctatcatattacttttcctgaaaaacagctcgatcgtgtcacttccttgtattgaaacaccagtggttccccaatttacttgatgctaaagagtttccaaaatccaacacctatttcattccaactttatttcccattcttcccttttgtgcattatccacttccgccaacctgacttcctcacttattgcttgttgayggaactgctcagatactgctactcttcattttacctcttcccctgcctccatatcacctgaccctaatcctcccagctggcaaaaatctctcttttgaacatataaagcctataaccttttatatctrtctttgtaatagcacttaaaattttccacctatgttttgctggttatgaagagatcttatttcctcattgtctagaaggttcttgaaggagggcctgtttactgctcatcttagagccatcacagtgtcatactgggggttcatgtaggtatctttaaagcagtgtttctgacagtacggctgtctaatcaccctgcattgttgagaccctgagaaagccagcctaaggtgggctcctagtttttccacatatttaacatgcaggtgcacacctgcatttgagtctttttttttttttttttttttttttttgagataggtcttgctctgtcacccaggctagagtgcagtggtgtaatcctagctcactgcagcttcaaactcctgggttcaagcaatcctgcctcatgagttcactctttaacagctcaactttcctgggaagtgggattcagtgaaccaaagttgaattttaggagtacctctatttgtttacctatttgcagattatatcagagctttaagtcaaaaacaccaamtaaaatatttattttctaataggcagaggaagagcaagaggtagcaagtgcttccttctgactagtaatgctggtgtaattgaaaaagaacaaataaacatgtacaaagaaaaaatgatgaatgactctattttacgccttcagacatgggacgaagcagtatttagggaaaaggtaagtctayrttattcttccagcatctgaccataaataactatcagggaatgtgaggaggatggttggtatcttttatcatattgcttagagtgttrtattayaacaaaaagtttatacttagtgaatattaaattcattctgtttttaaatgtcaatgaggttaaattatatttaatagtgctaataactgaagttatgttttcagatctaaaaggcaaattgagctaggatttctctagttgacagttcatctcgaggactatatcctaatactggaaaaaacagctgttcttagtctcttccttaaatctctctccaaagagtcctcagagaaaagctcctaggtcactgtgcaggtattggaatgtctttttatagctgtggacaatgatatacaccttggaatgggatgcctattcagatcaacctcttagtgtaatgaccttcatttcattgtaatttccgtaacacagaaacatgaaatcagattggagaaagtcaagaaacacataccyatactttctccagacccattgcagagattttcatctcagaatctctggaagcatgatcactgcagggctaggggagagctttaacactagaatccatggttcaaatcccagttctatcasttgcaagatgtgtgacctcaggcagttgctctgtcttttaaataatcaatctcctcatgtaaaaagtggggaaaataatagtatttaactcccagggtggtcatgaggataaatgagatgtatgcattgcatctcttagcgcctggcataaaatacgtgcccaagaaatgagagctgttactggacagaagtgtgagacatagwttaacttcatgaagatgaaccttacagtttaatagaccaactccatagtgtctataattttaaaaagtcataatctctgtgctccaaaaagtattgaccatcaattatctaaagcagattaacacttattttaggacacaaatcaaaactttgtcaatgtttactagtctaaaaacatttttcttcctaaagctgggagattaagttatctagaaccacctcttccacattttcagtgagaagaattgcagggaaattatttagttcctcccttagttttactggggatgggattctytattctctcttcactgagccacctttccattttgtaaaatatattgccaatacacrttttaaaaccacgagttttaatagccatggcataatttttatctcttctcctaggtgacaagctacttagactcatgtgacagaagcaacagagtaaaagtctgttgaggaagagagaggctagaccagatgtaggcattcttttgtagccagcacaccaggataaggagtggggtgaggaggaaatgggttaagtatctgttgaatcaggctatgtaatagcatttggggttcccgtaacacttacagatagataggcagagatggtagggaacaagaagccctataaccagtgtagctgggagttactggcagctgggaagcctgagttgtgttggtatccctgtcctatcatacatgaccaggcccagctgccctgctcaaaggggaaggatttgctttcaaaggcttagtaaaggccgggcgcggtggctcatgcctgtaatcccagcactttgggaggccgaggcgggtggatcacgaggtcaggagattgagaccacggtgaaaccccgtctctactaaaaatacaaaaaattagccaggcgcggtgacgggcacctgtagtcccagctactcgggaggctgaggcaggagaatggcgtgaacccgggaggcagagcttgcagtgagccgagatcgcgccactgcactccagcctgggcaacagagtaagactccgtctcaaaaaaacaaacaaaaaaaggcttagtaaaagtataacgaggtagggaaaatcttatattcttaagactaaagggaattatggttctaggggtgagccccccttttgtgggtgctttgataagggtttggggtttgggtttgagcatcctggtccctgtatatgggttttaacggaaggaaggaactctgcagaacagagggcaaaagcttggagctctttagggcaatctgcaagaacaggaaagggagagggatgagcagagtactggsagactgctttcttccccagcgccccagctgtactgtccattgtctgtgtgtggcctgctgtcactagagcactccccatcccccgccccagaattctctggtcactctgcagccatcttaacatgtagacagcccagaggtatccaagaactgatttccatggtggacgcttcaggatttggtggtgtttcattctggaggaataagggatgaacggtatgacagttgtggttgtgaaggtttatttgaaatcagaatgaggaggaagctgtttttctttcctcatggagcagagaataaagatggggtgaaagaaagttcattctgaacaaagaacttccaacatgcatacccatgactacacataattaagatagtttgcttttctccacctcagtgtgtggagctaggctgcttctttagccacaggttgcatgggtgaaggtcagtatgccatagacttaacttatgattggttgagcctctttacccagttattgatttttacttagttttaagtatagctgtaatagttttaacttattaggatttatacctattgcctagagtaacacttaaaatatttgagattattagtatttaattgaatttcagtatataattgaataccattataagtgaatttttttaaaaagttggatgcctgaaaggcaaggttatattttcaccttctttcctggtaacctctattctgcttaagtagtgattagaaccatatctgaaaaagaaattaaaaaagaaaattaaaattgctcataggaaaatgtgtatcatataacccagggatttcaattctagaaatttgtccaaaggaaagaatgggataaatacatataatgtaacagttttacaactgaaaaattggattaaaaacaggaggcctggacaccctttatttttacaaaaataatgaagataatttcaggtgggatggggccaagaagtggggaaggggaaattatatttggtttttaattttttaattatttcttatttatttttttgagacagagcccaggctggagtrcagtggtgtgatattggctcactgcaatctcagcctcccaagcagctaggactacaggtgtgtgccaccacgcatcactaatttttgtagttttagtagagatggggctttgctatgtcgcccaggctggtcttgaactctggactcaagtgatatgccagcctcggcatatcccaaagtgctgggattacaggcgtgagctactgtgcccagccagtatatttgtttttttaaatcaaaacattctaggtctagctgggcatgatggctcamgcctattgcgccagctacatgggaggatcatttaagcccaagagttcaagtccagccagggcaacatagtaggaatctatctcaaaaagggggagtgggggaaaggaagccgggtgtggtggcttacacctgtaatgccagcactttgggaggctgaggtgggtggataacctgaggtcaggagttcaagaccagcctggctgacatggtgaagccccatctctactaaaaatacaaaaattagctggatgtggtggcacctgcctgtaatcccagctacttgggaggctgaggcaggagaatcatttgaacccaggagctggaagttgcagtgagctgagattgtgccactgcattccagcctgggtgacaaaatgagactctgtctcaaaaaaaaaaaaaaaaaaaaaagctagatctaattttttttttatataaagcaaatttgaatttgaagtggtatggtaatcaatatattatctatgtatgatccgtaaccaattaaaagatataagggggagggagatttccattcgcagtgacaataagtgtagctcatgcatgtagaacactgactctccaacagtccctgcaaatgctttacttacatcaataggctttacagcaatccatacagtagtgcctcctatgtcattttataggcaggaaactgagacttgaatagcttcagtgccagtagatcacacagctagttcatggtagagttggtagaacccatctgtttcaccattacatctaccagcctaatcagaaaagtttgaagcagaaatgaggacaaataaaaaaattttactgggagatattaagataaaagaaatgccatgctcttgaatggaatgactgaatattttaaacacgtgcattcaccccaaatttgcttattcacgtgtcacaaaccatattgaaagcataaatgatacttttaacttgataaaatggttctagagtttatataaaataataaatagatgaaaatagctatatttctagaaaaataaaaatgggggtagctagtagtttcgtattgataaggcaatccctaatgaatggagattgccttatcaatacaaaactacaagccaccccattaacattttcatggctcttagcataagactagcctaacagagaagaggcaacggtgatgggcatttaccctgtgctgggcaggcctgagcagtcataaactcatgttatctcctgacagtccgtgaagcagatgctattgtcccattttgtatgtaaagaaacgaggcacttgccccaaatcacatagctgctaagtgacagggacactatttgcacctaggctgtctggatccacctgggacacgtgaaagcataatctgatatggagaggcgccaccataaaccataaaccagtgggacggacagaatcttccatagaagacatggaggaaatcagtgtgttctttcttccttcatgaggcttcagggttccttttatcatttcctctgtttagaaaacttcttttagccattcttttagggtaaatctgctgatgacagattctcagtgttccttcatctaagaatgtcttcatttctcctttatttttgaaggtggcattttgctgagtctagggttctggggtggactgttcttttctttcagcgtttaaaaaatattgtgccacttccaggtagcctccatcgtttctaatgacaaatctcctgttattcagactgatttccccctatgggtaaggtgtcattttttttttttctggctgctttcaagatttttttcttcagttttcataaatttaattataacctgtcttagagtgttttttgaaggggcttatcctgtttggagcttgttcagcttcttgaatcctggttgatgtagcttgttaaatttgggatatatttggaggtcatttctgtgaatactttttaagccctgctctttcttcactccttgcagaactccagtgccatgacatcattttttatagtcctacgggtccttgagactttgcgctttttttttccccagtgtatttttttgttgttcagattgggtaatttctgttgttctttcagttcactgactcttttctttgtcccttccattctgctatggaaagcccatccattgaactttttattttggttgtatctttcagttctaaactttatgtcttccatttcattgttgagcctttatgttttctctttatgtttcaaaagtatttataattgcccatcgaagcatctttattaggtgctttaaaatctttctcttctcagtgttggcatctatgattgtctttttttttcattcagtttgagatctttctgtttattggtatgaagagttttataatatcatgtccatggttctaagttggaccatgttcttagccaaggcctagattttgaattagaatacaatcatactatacatatgcaacaatattccctgtggctgaaggggagagagaaaaaaggttttagatgttgggggctgtattagtctgttttcatgccactgacaaagacataaccgagattgggaaaacaaagaggtttaattggacttacagttccacatggctggggaggcctcagaatcacggagggaggcagaaggcacttcttacatggcagcggcaagagaaaaatgaggaagaagcaaaagtggaaacgctgataaacccatcaggtcttgtgagacacaatcactatcataagaatagcacaggaaagactggccccccatgattcaattacctccccctgggtccctcccataacacgtgggaattctgttaagatacaattcaagttgagatttgggtgaggacacagccaaaccatatcaggggctcttctgcctgttgtatcactcactgagtttgtgcctgcaaatggatataattatgcctgaaacagcgcatattgtatatctggtacaggttttgttttttttcccaagttttgccaaacactaaagtagaaagcatagttcatatgactattctatggacatctttagtgcttttatgagcatttttgatgaagaaattgaaagactaattggaggccacaattaagcattgactaatactaagttaggagaaccaataaaatctgtgattttacaaagtcaggtaccatatgttcatggaagttgtatatgaatgattatacatgtgcgtgcatgtatatgtattgtacgtatctgtgcctgtttcttgctatatatgttgtactcaaattacatttgcggtctttctttttgcattagattctgcatatacagactcatgaaaaattmatcagagatagtcaagaaaaaccaaaacctgtmcctgataaggaaaataaaaaactgctctgcagaaagtgcaaagccttggcatgttacacagctgacgtaagagtgatagaggtaagctgcctttttacaaagtgcctggtcatgttttagcactagctacagcttactgttggtgaaatatttataataaaactactattatttccattgttactgtggccatgatctgtgtatttaaaaaaagctaagaagtgaaaaaaaaatactaaatgttcaataataaagaaatagtttttggccaggcatagtggctcatgcctgtaatcaaaacactttgggaggccaaggtgggcgaatcacgaggtcaggagttcgagaccagcccggccaacatggtgaaaccccgtctctactaaaaataaaaaagttagctgggcgtagtggcaggtggctgtaatcttagttactcgggaggctgaggcaggagaatcgcttgaaccgggaggcagaggttgcagtgagctgatatcgcgccactgcactccagcctgggtgacagagcaagactctgtctcaaaaaaaaaaaaaaaaaagtcatgctaaatgcaatgacgtgtcctggattagctcctggaacagataaaggatacaactagagaaagagtggtaaaatctgtagtttagataatagtaatgtactgatgttaattatcttggttttgacaaatgtgctgtggtatatgagatgttaacatttggggaaactgggtaaagggtatgcagaaattttctgggatatctttgcaatttttctttaaatctaaaattgttccaaagtaaagtttattttaaaaaattatgaagtttatgtagtataatgaaaaactgcttacaaactaatggtaataaggaaaaaagtaaccagaacacagaattgtaaagatgctactttgtagctgtgtgaaacaacagcagcaaatacattcattgtcattgtcaagagaaaaagtcaaaaaacctaccttgctacagaaaaacaaaggctaggggaactataccaaaatgtattaatattttggtggtgagattccatgactttttttctcttttcctactaccttatgttttccaaacattccttttgggctatggatcacttttataatgaaaacaaaatatctccttatttgtaaaatgtgacatctgcagattagccttctattgcagccttatatttctttcttaaaactttcagagaaagggttagaaaaatctccaaagagaaatatggggtataactcttgcatggggggcacagtggaggggctgggctggctcagatgaggagttattacttcaggatgttccgttcgtcttcagaaagcagaaatctctcatcggctcagctgtttgggcaaaaagcctatcaggagtcatattgctaagttcccttacctttctaagtctgcttctttagctgtaaaaggtcctttcagctccaatttgggtgattgttctactaaaaatggcccttttagaccctatgttttcctgagggactagtatgttggatctgcatttgtttctgagctgtttactctaaagttgactctaggtggggcctgtggacacattagtccctgaccttcttcaattgcatcttgaccttggtcgttttccctgtatcctttggattgtgcctgccagggccactggtgaacttcagcttcacaaattttcagcaaacatcgcttctgtttttgaataatgagtatctaccttcagaagctgggttacctggaaccttcttaatcttcttctttatgaggtgcccagtgtcctcacttgcaaccccaccctgcctgtagaggggagtcaggtgcatggatcctctggactttgggtgaatctattttttttttycctccaattgtaaaataagtgagacccacctgttctttgcctcagattattgtggggytttcttttttttttttttaaatcacaattatgtactggttctaacgttctcttttgtgtgttattccatcccttcatctgtaggaatgccattacactgtgcttggagatgcttttaaggaatgctttgtgagtagaccacatcccaagccaaagcagttttcaagttttgaaaaaagagcaaagatattctgtgcccgacagaactgcagccatgactggggaatccatgtgaagtacaagacatttgagattccagttataaaaattgaaagttttgtggtggaggatattgcaactggagttcagacrctgtactcgaagtggaaggactttcattttgagaagataccatttgatccagcagaaatgtccaaatgatatcaggtcctcaatcttcagctacagggaatgagtaactttgagtggagaagaaacaaacatagtgggtataatcatggatcgcttgtacccctgtgaaaatatattttttaaaaatatctttagcagtttgtactatattatatatgcaaagcacaaatgagtgaatcacagcactgagtattttgtaggccaacagagctcatagtacttgggaaaaattaaaaagcctcatttctagccttctttttagagtcaactgccaacamacacacagtaatcactctgtacacactgggatagatgaatgaatggaatgttgggaatttttatctccctttgtctccttaacctactgtaaactggcttttgcccttaacaatctactgaaattgttcttttgaaggttaccagtgactctggttgccaaatccactgggcacttcttaaccttctatttgacytctgcgcatttggccctgttgagcactcttcttgaagctctccctgggcttctctctcttctagttctattctagtctttttttattgagtcctcctctttgctgatcccttccaagggttcaatatatatacatgtatatactgtacatatgtatatgtaactaatatacatacatacaggtatgtatatgtaatggttatatgtactcatgttcctggtgtagcaacgtgtggtatggctacacagagaacatgagaacataaagccatttttatgcttactactaaaagctgtccactgtagagttgctgtatgtagcaatgtgtatccactctacagtggtcagcttttagtagagagcataaaaatgataaaatacttcttgaaaacttagtttactatacatcttgccctattaatatgttctcttaacgtgtgccattgttctctttgaccattttcctataatgatgttgatgttcaacacctggactgaatgtctgttctcagatcccttggatgttacagatgaggcagtctgactgtcctttctacttgaaagattagaatatgtatccaaatggcattcacgtgtcacttagcaaggtttgctgatgcttcaaagagcttagtttgyggtttcctggacgtggaaacaagtatctgagttccctggagatcaacgggatgaggtgttacagctgcctccctcttcatgcaatctggtgagcagtggtgcaggcggggagccagagaaacttgccagttatataacttctctttggcttttcttcatctgtaaaacaaggataatactgaactgtaagggttagtggagagtttttaattaaaagaatgtgtgaaaagtacatgacacagtagttgcttgataatagttactagtagtagtattcttactaagacccaatacaaatggattatttaaaccaagtttatgagttggttttttttcattttcyatttgtattttattaagagtgtcttttcttatgtgattttttttaattgctatttgatatggtttggctatatgtccccacccaaatctcatcttgaattataatccccatgtgtcaagggagggacctgaygggaggtgaytggatcacgggggcagttgtccccatgctgttcttgggatagtgagttagttctcatgagatctgrtggttttataagtgtttgacaattcctcctttacacacactctctctctcatctgctgccatgtaagacttgcctgcttccccttctgccatgattgtaagtttcctgaggcctcctcagccatgtggaactgtgaatctattaagcctcttttctttataaatgacccagtctcaggcagttctttatagcagtgtgaaaacagactaatacactattgtttaagaactccaataggatgtgtaaaacatctactagaaatagatttaataagataaaagttattattattatttttttttctgagatggagtctcactctgttgcccaggttggagtgtagtggtgtgatctcggctcactgcaacctctgccttctaggttcaagtgattctcctgcctcagcctcccacatagctgggtacaggcacccaccaccacacccggctaaatttttttatttttagtagagtcggggtttcaccatgttggccaggctggtcttgaactcctgacctcaagtgatccacttgcctcggcctcccacagtgttgggattacaggcgtgagtcaccatgcctggccaagaaaagttcttttaagtatgtaaatgattcaatttggatgaaggtgaatagccctattcagccaactgaggcaggcagactgaagtgaaaataaggagaacttagcatttccttgtttgacttttaatggaataatgtcattgccaggcatggactcaaacaaagtaggcacttggttaatatgtattgaatgaaagaaatgagcaggtaggcttttaggaagtggatcttttgactgactcccaaatgctggtcattgcatttctagaacaaaggccacattttagaaacaactggggagtctttttcatggacacatgcccagccccattagagcatcctggcagggtgtccagccgtgtatgttttgaagctcctgtggttcagacacaacctgttacacaactaccaccttgttatctctgtggtcctggcctgtgctgatgctgtgatattttcaccctgaaatgaagagtcatcccaacatcaaggtcagtaaaccaattcctgtccttaaaatggattcattattatttgaatttcaaacaacagaccaaccatagctcaatgtttctcaagagtatcctgtggagcacagtgcgtgaacgcccagaagaaagcagtctgtggtcaggtgggtttctgtgccatttgctgccaccttccctgcaaacagtgatttacagcacacattgttcttgtgtctgttctgcagtgataaaacccatttaactcagtggttcccaaatgtactgaccgtggaactgttttactcaggggacactgttaacatcctgtagaagcacagtagcaggtatccagcctgcatacgataagacaaccagaaccaaatttggcaggtacatgtctggaactctgtttcattatgccgtaaaataaaactacgaatttcattcaacaaatctgtactgaataagtaggcttcactcttgggatgtcaacttttaaaacttacttaatatcagctatcgttatataatctttgttcataatgacgctgtctggttgaacacaaactggctgggtgttaaattccacttgtgtttatgatatttaataatgtcctaagaaggcagccagtagaaccttggctactgtttttcaaaagtggctctgcattgctcctacataaccccgtacattactccacagtcctgttagagccctgaaagggaaactgctaaaaataaggttcttcatttaggtgactaggaactcccaatatttttgccctagggaatactgggagacaaatctctacgatcacaaattactaatggtttccccagaactgctggtggccatatcccctggcatgtggaagggcccagaagaggccactctactgcagaggccaacagaaggtatgattggtggagggatgggggggtggttggaggggcaaatggaagggagcttgagtcactagatccaatcaagcccatagtcatggccaccactgtcctcaagttctatgagccagctttttttttttttttccttaagctaatttgagctgtgcttctaccacagctaagattcatgcctaatatatcttttccctagattactccctatgtaccataaaaatctggtgtgtaaatacacatgaagggcatccctcatccttatttgctatattaaaaatattaactaactcttagcttgctgcggatgccaggaatgcagtaatgaatttggaaaactatccaaacaaacaggggaatcttcattcgcaaagaatatgggagggagaacagcagatttttaatttggatagtaagacgagcagcccttaaagaaccaggtaaaagaagttggtttatttaggcttgttagtgggcaaggttgagacactggccaagatactttttttttttgggggggggggggtggtgattgattgatagggtctcactctattgcccaggctggagtgcagtggagcaatcatagccacgacctcccaggctcaagtgatcctcccacctcagcctcctgaacagctgggaccacaggtgcacacctggctgatttattttatttatttatttatttatttatttttttgtagagtgttgcccaggctggtctcaaacttctgggctcaagcaaccctccagcctcggcctcccaaagtgttgggatcataggcatgagacaccgtgcctggcgaagatatttttaccgaaaaggacagagggtgtacttggaggtaagggacccaattccattagtctagccacaataatgtgtttgtttcctcataaccacagtcttggttgggctgctgtaactaaatatcaactgggtggcttataaacaatagaaatttctcacagttctggctggaaagtctaggttcaaggcactggcagattcagtatctggtgagaacccactttctggttcacggatggtgacttcttgctgtgttctcccatggcagaagaaatgagggggtctctatcttatcttgagtctcttttaaaaggcactaccctcatgatctaatcaccttccaaaggccccagcttctattaccattacctggggggttaaggtttcaccacctgaattttggggaggatacaaaaatacagaccacaggagccactgaatgcggggagcgagacagctccccagctgctcagtaatggagagctgagagggtggaggtctgttttctcagccattcttagtgtttttattctaggactgatcttaacttgaggatcacaggtttttttgtacaatggagttctgtttgtttgtaatttttttttttttttgagacggagctttgctcttgtagcccaggcgggcgtgcaatggcacgatctcggctcactgcagcctctgcatcccgggtttaagcaattctcctgcctcagcctcctgtgtagctgggattacaggcacacaataccacacctggctaattttttgtatttttagtagagacggggtttcaccatgttggccaggctggtctagaactcctgacctcaggtgatctacccacctcggcctcccaaagtgatggaattataggcatgagccactgcgcctggctgtttgtttgtaatttattttttaaatgaatataaataagatccccaggaccgcaagtgcagggatgctaaataacctgtcttgatccctcatctggtgagaagtagaaagaggattagattccagatgttctgatgaccaggccatatcccctgagtgctaaggttgacattaaaaattcattacaaagatcctgccctcctgtccttggacatcacagctcctgcttgttcctgggcattcagactctgggacttataccagcattccccatgcccctccccaggttcttaggcatttggacttgaaccaagttgttataccaccagctttcctgggtctccataagagtgggaccctgatccaatacaattagtgttgctgtaagaagagacatgagagcctattttctctctcccccaccaggcacataccaaagaaatgccatgtgagaacaagcaagaaggtggccatctgtaaaccaggaagagtgtcctcaccagaaaatgaagtggcttcaactttgatctcagaattccagcctccataactgtgagaaaatacatttctgttctttcagccagtctatggcattacattatagcaacccaagcaaactaaggcatgcccagaaacgactacaggggtaaaaatgagcagataattggtttttagtgtcctgaagtttatctgcttttccttatgtacttatatcgttgccactgccaccaggctactcttccttcttgtctgctcccaaacagggaagagcgagcataatggttcctaaacatttccgttatacccgtacagttctgatagagttgtaaaaatgggagaatatgaaggttattcaggcttcccaatgatatggtgtgagattcactctgtactaaatatcccaaaactctagccacaaacacagcaaaactcaaagtcaacaagttttcactgaaaatagatttcatttcattcaaattagaaatgtgttctcccaaaccgcctcccaacaaaggtctctgcttgataaatgaaaagatagtaaaagaaaacttcacatttctttttatgtggatctatcaaaaggtacataatcaaaacaactttaacacccgacctatccatgaggagtctggatgattcactctgaaggaaaaggggagagaagagagaatcactgctctgatttgaagtgtgcaaagttcttatctatgtcacttaacactggtataattaatacagaaaggaaaatgaccctcaagaggaaggtttcattgagcagagcgtaagaggaacaataagagggtaggagacacctcctgagaaggtttgcttgtgttcagctgaagattaataggaaacagtgaaaaagcaacgtcctgtgatcagtaactttaaagacaagcttggttctctctttctggcactactgacattcccaccattctagcttccaaattctggaaaaagagaagatgattaacaaaaatagagaatgtagaaacttctggttttgtgcctacaggattggcaccagaccctcagtgctcacttgctccatctacaaggcagcacccctcccagaggcagccggggaggcctctccaccagggcctgcgctggctggtggtgcggcttcctccctgggcgcagcaccaagtgcacgtctcctacttggccatcttgcggatcatgtagttgaggatgcccccgttgaggaaataagtgagctccacatcagtgtcaaacctcatgacagcctggaaggtcttgccagtatccagctgtggcacaaagaaacagaagcatcattgagggaggtggcgagacagctctgctcggaggaaattctgcccagcctgcccctcaggtgtggtccacacttcagtaacaccagcagcacatgaggacatgcaaggctgctggccccagcccagacccactaaatcagaagatgcatttcagcaagatctctgggaggctgctttgcccattacagtttgagaatcactgcagactgtaaatgatgggggtgagagccatctaagaactagaaatagcttctcagggcagtagctattaatgacatcagggtggtattttctaaacctctgggggctccctgtggacagaagtattcaatcagcagagatttcattaaggttgtcccttaggcagctggcccatctgcttatctgagacacagacttttgcactgcctctgtctggggcaccgaatgacccctgggacctggtgctgggcactttatctttaccttgcctagggatctatcattttcactcttgggctaatcaaagcctggtgcctatgggcaggcttagggaggggtgagtatatctgttgctcacgtttttatagtgaaatgttttaggtaatgtgaaatgtcacatccctgagctctcatcacgagagaccgggaaca

SEQ ID NO: 94116 - DNA, 56215 bp, Homo sapiens
  misc_feature (1)...(56215): n = A,T,C or G
gaactcctgaccttgtgatccacccgccttggcctcccaaagtgctgggattagaggcgtgagccaccgtgcctggcctcccacagttatttttaaatgtacgataagttattgttgattgtagttatcctgttactacctattagatactagatcttattcattctatctaaattctatctaaattagatactagatcttattcattctatctaaatatatttttgtacccattaactatccccagtccctccactctagatgtgaattttttacaaaaaaaatttttaatccatggttggttgaatccacagatgcagaacccacagatacagaggggtaagcgtgttctgatattaacaacaaattccggtgacacgcctcactctcacatctggcagggttacgacgtggatttgaaattaacctcagtgatcactctgttgtcaagagttcagtgaggacttaaactatctcatatgctccaacctaaagctaatcccttcacttggtcaccttgtccctacactttacctcctcaagggtttcacaacagaaattctctacggtctgtcctacctcaccagttttgtctgctgatcaagatcactatcagcatacaagcatgctgtagtagaaatgaaaatagaacacggctcttgattcagttccctcttctgccccagttaccatcccatttatgtattccctttcttatttatttatttatttttgagatggagttttgctcttgttgcccaggctatagtgcagtagtgtgatctcagctcactgcaacctctgcctccctggttcaagtgattctcctgcctcagcctcccgagtagctgggattacaggcacccaccaccacgcccagctaagttttgtatttttagtagaaatggagtttcaccatattggccaggctggtctcgaactcctgacctcaggtgatccacccgcctcggcctcctaaattgccgggattgaaggcgtaaactaccgcacccagcctatgtgtcccctttctagcctatattctcaaaagagtcatctacgttaatggtcttagatttctcttcacccttccttcccgaacccattccagttggcttcccaaatcccatgacccccaactccacccaagctgcctgtgtccagttcaccaacgtttaccacatactaaatccacgggtcgatcctcagtgttgctttaacctcacctgttggtggcatggttccttgccttttctcagtgttaggtgtgccagggcttgtccccatcccctttctcggtctgcactttgttaattggtgcaggttcttgcctttaaataccagctctctgtcaactcctaaattcgtatctccatcccaaacctctttctggaccatcaggattgatgttcagcagcctgcgtggtgtctccactccactccactcaatgcagcaggtccaagctgagctactgatgtctcccagaaacttgcccatgaccttccccatctcaggtcacagcgaccagcacttcttgtttctcaggcccagcctgtgggagacattcttaagccccctttatttctctccccctacaaacaatccacgaattgcaacaaccctctcatgtctgctttccgaatactcccaaaaattcaacacttctcactacctccaccgctgtcccctgagccagcatcgtctcccatatggattactgcatggcaccagtgatccttctaagttatcatcaccgccatgttcaaaccatgcagtggctcccatttcattcagagtcaaagccctgctcttaaaggccctgcatgatcaggcccctgtatctctctgtcctcatctcctgccttcttgccatcacctcccacgctgtcctcctagcctttccttggacaccagggacaccaggtcatgctccttcctgagggccttggtacgagctgctctgtctgcttggacagtgcttcctccaggttctatcttggttcgcttgcatggagaactcccactgtgttccgatctttgttcagctaatgtctttccggggagaccgcctctctgcagacccctccccaccacattcccagtcctccttcccttattacttttttttttttttttttttgagatggagtctcactctgttgcccgggctggagtgcagtggaatgatcttggctcactgcaacctccactttcagggttcaagcaatttctggctaatttttgtatttttagtagagacggggtttcaccatgttggccagactggtcttgaacacctgatctcaaatgatctgcctgtctcagcctctcaaagtgctgggattacaggcgtgagtcactgggcctggctcccttattactttttaaatttttgcaatggagtttactacctttgaatatactctacagtttacttattcattctgttaagttttattgtctttcttccctagctagaacagaaatttcaaagagaagagatctttgttctgtccactgatacatcccaagcatgtgaaacagtgttcagtatgttgtttatggtcattaaaatttgtcatttactttttaataaatacaatgctgcagaattagatctttggctattaggccttcaaaggctgagcctacaaaatgatagttaggcttggtaaggccaaagatcaagttctgtgcatccttatcggatgtgcacaggccccttccagtcccactcacatatctttggggctgaaaagctttgtctacttcctttatcttaaatctgccttctcttttctttttcctaggccaaatctccattccaggactttctattttgttttggctagggttgaaatggccctcatttattcccaggaattctcctgtgctctgaatttctttgttcaagacccctggcaacttgacatcataactggactttgcttctcctgaggggagggtggatgggggttgctggacagaggtgtctgtccataaggaggaggtggggaggagagggttatatcttggtccaggggcccaagtgactgtactatcgtagaagccacatttttcatcttattctcatgactaaaagaaattttgccaatgttttcctaaaattcagatatcctgtgtttaaagcattagcagagtgccctcaaaaatgagttacgtgaatgaataactgatctgtaaacctgttacctattaaaaataaaaagtgaaacagcaaatgagactagtttgacatgatcgcttttcccacgtgacttcactgtactgattttgagcgagtgtggtttttattctcctgtgtgtgcattttgtatgtgtttcggtttcccgctgattatctgtgatacaggaattttcaaggaaggaactgtgccctctgggtctgttggagctctgacttagagcaatggaaatggcacaccaacaagatttaacttttttaaaaagcatttcttgtattttctaaaccctggacactagaaagaaggcctgggaagaggatgattcctgtgtaccagggattcattaccaagccaagcaccttggcagaccacttttttaccccactcttatgccagctcattgtaactgtagcttttgttcccagggatttgagtattttcactgtctgctttgggttaagatcactaaacattttggaaaggagacactgaaggagtatcttgctaatttttttttttttttttttttgagacggagtctcgctctgtcgcccaagctggagtgcagtggcacgatctcggctcactgcaagctctgcctcctgggttcacgccattctcctgcctcagcctcttgagtagctgggactacaggcgcccgccactacgcccggctaatttttgtatttttagtagagatggggtttcaccgtgttagccaggatggtctcgatctcctgacctcgtgatctgcccccctcggcctcccaaagtgctgggattcaggcttgagccaccgcacccggcctaatgttttaaaaaacaaaagtctcaggctggaaatggtgactcacgcctgtaatcccagccctttgggaggccgaggcaggtggatcacctgaggtcaagagtttgagatcagcctgggcaacatggtgaaaccccgtctctactaaaaatacaaaaattagccggggaaggtggtgggtgcctgcagtcccacctattcgggagactgaggcaggagaatagcttgcatcccgggaggcattgcagtgagctgagattgcaccactgcactccagcctgggtaacagagtgagactctgtctcaaaaaaaaaaaaaaaagtctcagcctatgagcaagacgcatctcgggttagtgctaactttgtagcattctgtggtatcattaagcccagataaagtaaaattgttcctagactgtgagcagggtgtgtccctagttctgaacatcccacaaggttaaggggaaatttttttgaaaacactcagttatgtatatttttctcgcacaaataaaaacgaaggatacaagggtgggccaaggagttcacggttttcacaacccatgttaagtttttgctaacgtttgaagaaaaatggagatgcttgtattgcttaaaccatttgagaattcccttatatttgatagattctgccactgttcaacgtgaccagaagtgagaggatgaatgtggggtgcatgtctttcggatggtcccctgcaggcaaaggggctagcctttgacaatttctccacacgcttcggggctagctggtatattccaattaaaccaacatgtttccatcacagacttcatagccatcaagcaatcatagccttacccaatggagaaaaggagcgggcttggagcgcgtccacgggagtgggcctccctctgcgcgcctctgggaatgtttgcggtgcttaagtcagacccggattgctccaagcccagcttatcctccccagttctgccagggtttttttcctcttgtttgttcgtttgtttttgcctctctttgatttaacttttgctccttgactaaatatgtgcttaacgctagacaaaggacacttcatacccaagtctgtgtctttgttccaagatctgcaatttcatttggttcctgtcggctttacaagttcaaaactatgcccccgtttaggaaatgaattcaaagcatgcggcaagggagacattcgacaaacccggatgctctggaaaacgttgcccttcctcgagtttctttcagtaaaatctgaattttgttcccgggaggagttgggtttgtgattgctacagtgtaagttgcaccgaaatactacatcatgttctttgggacatacattctgtttcagaataagaatgatattcttcctttcctaaaatgtgagagttttatatggacctttttaaaataaaaaattggaagcccttggagtcaaggccagagtaagactcgcagaaaccaaagacagaaaatatttggaaccccccctcctcagacatgaaccacactgaaatgtgtccagatacaattcttcaaaatcctggcttttcacaggatgatttgttattgaaaaagttgtttgcttcagaatctgaattgttttaaaagattctgttggttgcccctgctttgcggacgccttttgtacgttcttcctgatgtagcgctgcgaggggcgactttacctcggcgtttgacaggtacgcagcattcccgcacccgcctgcgcctcgcgagcagaaagacggcggactctgcaccgctccacgacactggggacccgccccggccagacccctcccctaccgagaccttgtccccgccccgcccctggccggggccccgccccgccagccccgcccccgccagccccctttcctaccgagacctcgccccgcccaccagccccgccccgcccccccccccgacagaggccccgccccggccccggccagccccgcccccgcctgcgcgaggcctagggctgcaggcgcggagccgcgagccccagccaatgagcgccggcgggccggttgcccaggcgaccagcgcgcggctccgccccccgcggcgaggctcccgcgcgcggctgagtgcggactggagtgggaacccgggtccccgcgcttagagaacacgcgatgaccacgtggagcctccggcggaggccggcccgcacgctgggactcctgctgctggtcgtcttgggcttcctggtgctycgcaggtgagagagagcttcgcgcagcacctgccggaccccacattccccagccctccgcacctcgggttctctcctcccgcgacccgcgaatcccgagttcccggggggagcagccccagctgcttctttctgggagctccccaatacccccgagttcccctgcggctgcaggcactctactcctgccgcgcgatccaggcctctgggcgacacccggcgtgccctcgggagccggcgtctgtgccccgagccgcccaccccgccgcgcctgtgacgccgggctctgccccccgtggacgcccgcagccctccagccgtcagagccctctcagacgcaccccatcgcggccccgtccccactgctccgcggagagctccctctgcccttcccccaggccccccttttcctcccaagcctctgggaggcgccttattccgcagaggccggcgcttcagcctggcaggtatggtctagccagctggcctggcagggtcgtaagaacagtgtccgtgggcctccaagatcccgggccatgatttatttgcacagtaggactgataggtcgtctctctccactttcccaccattcacctgttaccagctcaccctttcctctcccccttttccaaatgttgtttatggcaaaggagtggcttcagtgatactgtgatttacccacagcctgtgaaaaagttttctgggtgccctagcccagcatttttctaaactgtgcttattttaaggattctacagccctgaccctatctttcaggtcagcactttccatattcaaaacctccagtgggaagccgaccggcagtatcgaatgaactgaacggttggaagtggtggcaggccctacgccgctcggctttgtcatttgcttcttttttacttagagaaactaagttcttagtttctctgcacttcccctgggagacagggaagtttttgatggagataaatatctggaagtcctttgtggccagaagaacacactgacaaactctatgtttacaccttgtcaagactggattcttgtttctgagatagtggggacgtcatgatattgtttgggagaaggacggattttcttctcattctggggcccagaaaacttcaggcatttaacttctccggttgttcccaagatgttttctgtcctgcctaagatctctaagccattcctctctgaagattggccctggctcctgtgggatgctcagctttcctccctgtgcaaggcttacgcaaaccccagaagaattactcagagcagcggcagcagatcctcctgcatacagcagggtagcaaggygtgcaagctgccaagagaaaggctagcggctgcaggcctgttgttgrtcagggatacaggagtccgtgcaggggacccaggcaggtcactatttggggcagcactgtgggcttgagatgggctgagtggtacacccaaaaagtccccaggaaaaggtatgcgaaggaggctgagggtttgytattgtttggtgggacagaggtgaggtggcagggagctgacctagctgggaagacgcctgagcttctttgaggtgaggtaactgtgtccccacctaggtggggtgaccgcactaggagtcagtcttgggccattggagcaggtggaatggcaacagagaataaagagctgcaaccaaattctgtgaaaacagtttggcmtgcctgggaaggatgtttttcttgcctctccatccttctagcaggtagaacagaagctcaaggagctctgaaccaagttcagggccgtgtcttcagatcctgtggaatacgtgtctttttggcatctttttgattttttcaccctcatgggtacattctgccagttcctcctgtctgacttgggctggacaccagtgagtatgagttgctgtaatatctctggaggcaggaggagaacatcctctttgtctttccctcttcctgtcttgccccagctctgactgggtcattaactgagtgggaggtggggcctctcccagctgttactgggcagtgttgaggtggccagtggaatataggtcacgtggaaactggccaccaagttcactctttgtggagccgagctgtcaggagcagcccctttcctgtagcagaaggcaggtatttggacagtggctggcatgggctgggggatgtttggctatagcttttcttttttttcatcaacttttccttgggctggttcacggtcagtcatagctggtgggttacatcatatcaaaagactaggatgaccaggttgacttttggggaggatttcagtcttagaatttttatttttattttttttaagcgtaaacagtggtctttcttaaaaattacctttattggagtttaattaatatgtacaatttgataagctttgacacatatctaaatccagctgtgaatctatcaccacagttaagattgtgaaaacagccaccagcccccaaagtttccatgtacctctctgtcatccctccctcctactcctccctgctccccagccccaagcaaccactgatctgttgctttccgacacgatatattggtttgcattttctagtgttttatagaattgtaatcttaaagcatgttttcctttttggtctggcttctttcactcagagtattattttgaggtctgcgatgcacgtatcagtgcgaaccgtgcctttgagccagttgcctttcattctcttcctattcgcactccatgaacacaagaatgcctgcttgatattatctaaaggcatggttctcattcatgattttttccttaatataaatgaatcaccgagcaagaatacaggcaacgctgcatctctcatacctgaaattttagctgggaaagttgggagaggggaaagccttcatgtgggcagccagcatcatgctcctaagaggtaagttcatttcttctctgaggtccgtctcacacactgccctgccctgctgttttctttattccagaccccaaattcttcctatagaaaggaaaaggaggagatgtatcaaactctttctcctgaacaaggtggctaacttagcaatgcaggtcacttttttttttttatgtgaatcatggccagtcctgtcttccaagggtatgtggccaaatcatgcctctcctctggagcttctgggaggtaattgattttatgggccttgcctattctaggactcttctctgcttgaggcctgagtcatatttcatggaatgttcaaactctttgaacagtgttcctttcatcttgtagtagtaaagttttcagcatcggggaagtgtctctttcagcaggtgatcacctgttggatacaggtgttgagggatgtctgaatcaccctgtgctaggaagatcgagttggctctgggattcttacaggaccatgctagccaccagcagaaggagaccagagttgtcttggagcagccatagtattggtataggtgtgattcaagggagggactgggctaccaagaagattggagacaaagagcctgggctgcagaaatagcagaaagttgaccaaagggttcttcccaccttaaggtaaggaagtggcaagtgaaataaaaacatgtagtccttgatgaagtggtgcagagttccacgaggtcatgtcagacgctcttctgggaagaattcaggagatgctgtagcttgcggagaaaggtttgagaacatttggacctgaaaaggactctggggtctaggcacgtcctccctccctccctctccaccatcaccagcaggggcagggttttttggtgtcaatgttgggatatttgctgcttcctctccactcagttttagcttttgcttaaatctattgctctggatattaaagaccgtattgaaaaagagttctcatgtgtggatgtctcctgggatagaaaggcagcaggtgtttttagaggctcctgctaacgaggtagatatttcttgactcgtgtctgcctgttagagactccttgttgatactcacagcttctgttctttgacactcagcgaaacagtcagtgggcttgttcctttcaagcacagattgtatttttttcccttaagaagttattttgtgagtaggcaattaatgaacatggtaagtattcagagtgtgaaggggaataaagtgaaaagaaactcccattcctggcccctaggctaggcacccttccctatcccctattcatatcagctgttactactggtaatggcttctttcagaaatattctatgcatatacaagaagatagctacacatattatcccacttgtccattagacacataatttatttaaacagccttctactgatggacatcgattgtttgcaatcttttagctactgtaaacaaagctgctgcagatatctgttggatgtatttctataagtagaattgctgaccgtaggatagattcattttaaatcttgatagacatttccaaatagtacattttatttctgttggatcaatgtaaaggagattccragcccaactcaatagggccaagtcgattcttgagtcttgtaagagccagtgcatctcttgtatatcttcatagataagtcctatgtggtggattaaaaaaaaatttaacataataatgtttttccgtatttgtgatatcatttcatttagagtctacaagcatcttgaagatcaggggcttgttatcaagagtagaggccttgtgttatctaacagagctttctctctgggtgagacacagtccttttcctgtttatgatgctgtcaatggtcccaaagtactgcaaaagtacagagtaacagaatgttagaacactttttgttgttgttattgttgttatatggttgattagagtgaggggtttttgttactttactattggatctcaaggttttggtctagtaaactcttcttcatgtactcacttcctacagtctttaggaaataactgctctctgaaccaccaatattgcttccgggtcagagcctggatgtgaggccagggttcctgccttacctgggagccttttcaaaggaaaaagcagaggagctaggatggcaagagtgctgtggacctcttgctggggacctcacatctctgcaagatgcatatacttgccttgggaatggcaggccaaagcccttgggcgtatttaatgcctctcccagcaaacaggagtccaacaccttgggcccagaccaaggagcacatatagaaagctgggccagaaacagggaccgacttccatttccctgaggctgaagttcctggagcccggggattggtccaagaggcaatattttggagtagaggcattaagggcaccatctgggccaaagagtgaatagttccttcttcaggccctcaaattcttttgctgagggtggagagaacatggctgaaggctgctgggaccaaaatatccccaaacagacagtttagggcagcaggatgtccaaggaagttgagcctcatgggagcctagaaccgaaccagaatcctgagagtgatgaagtctgcactgaagacacatccaagtgaggaattcccatgtgtttgatgtctttgtgggcagctgaacacacttgccatcacatggtggcctctggcatggccacttggaggagggtggaggtgagtgttttcttggtcaggatcttcatgggatgccctggatttggattcagttgaacctctgtttaggaaggccctaatagggccacagtgtacctaaaaattgaatttgtaagctatcgtctcagatgaacaagtatgtgaacacgttatgttatagcatcaaaataaccagcctttggggccggcaaggacttatgttctgggaatcgaaggacaatgattgcagttcctgactcagataccagcttgcgtatgctggtggccagcctcggactgcgtgagtgctgcctggtctccaccggcggtcatcgtactccggatgttcacggcactccggatgttctgctgtgcccggttgcatggatcctggcctatctgtgtctggtcatactctgcatggcagaccagaaagagatgactgtgaccccagtgaggcctcccagccgtaccatgaccccggttcctgatgagtgtttgcaggattgacgggtgatgcagggatgcccgctggcatggcaggacgcatttcaagcctggcacacttcactcaaggagatcctttctggtggtgacaggatctggctcacctcccacccagccgccctgcaagatcccctctgaaacttgacagccagtcccattcccagaaagaggtggtgaccttgccacctgctcatctgcccttttccatccactcacatccgggagcactttttactacacctggaatctcctgcctgctggggcctgccctgtacccttcatcctcaggacccacctcaccagtcaaggaaaaattactccagagggctccacctccccctgcttcctcaccacggggcacagcagaacttggtacctatgtcctctgcttcaggtttccattgcaaccaatttttgtgtctgcagcttgcccagccttcagcacgaatagtgcatgccccttttccacttgccaaaagggaactggtgaggatgggctgtagaggtcttgttaggttgtgcgcggccccatcagaagtcctgatgtgcctgccttcctccaggaaccccaccttggaccatgaccatggccaccctctccatccaggtggaggagcggagcctgactctgagcagagcagacctgggcactgagcactgagttcagggtttgctgtccggactcttctaaggtggaaaaatcgctttggataaatgaagccgagatacayaggcaacaggaatcctagcagaaagtgttaacataagctccagttcaaaagaaggcaggtgttcctggtttcatcagataaaggtccatcgtggatgaactgctccccaagaaaagtgacagaaacacgctgggcttccttaggatttggttagctgcttggtatcaagcctaatttaggagtaaagtcttgctgacctttaaaccaaccaactccaaccacactgttgatatttcctttattttattattactgagttactcaggaaattatggggttattctccgtcttatgattattagtattaatgatcattatcagtgttaatagccatttacatgatgcttcgttgtttatgaagctgtaactcgcatggtctcatttactagcagtgaattccttggagaaacccaacacgtatcatcctcattttcttggkgaatccatcccttttaataaggtattgacaacttctctagtaacctaccagaaaattcccatgaagaaacagttgaattcaccagaatttggaattggataacagctagattgttttttattcttgttgtttatttcattcctcttgctatgcactgagaagaacgtttcattctaaaaatatagaaaatggtgtgttataaagacactagcaaagacaagctctatccagggagggagtctacgtagtgtccaaggagaagacgcagattgggcttctcgagctgtaaccttgggattggttagaatgcagattttgattcagtaggtctcaagtaaggcttaaggtttatgcatttctgacaagctgcggatgaagacctggaaatctggttggtggatagaagttgttgaattgggatgcctctttccaggtgtctgcactttgagtcaggcggctgtgaccctgagggagttcagaggtgtggctgtctatagaccacacctggagaagtcagcctagagggaggtttcctgatccttagtcatcaactaatcaaggggagaggttaaaggtgttggttcctagcagggactgtgttggaatgtcggtcagagaggcttctccaaccctgcctacacctctgcatttagcagggtggggagtggaggctctcgcacccataagtagatgttaggataagtaatgtgtgctttaataagaattggagattgtgcttttgaagttctggctggagaataaggtttggtacctggtggaatgattgctaagttgtattgtcactgtctttaaaaacagtgatattttgtgtgtgtgtgcatgtgcatgtgtgtgtgtattttcaccaccaggttgtcaaaatgcccctgtttttaagaaaataatctgtccatccagttcttcctcattctggcctggggtgagcccagcatgtgcctctgagggaaccagggggagaacctgtgttgcggcgggcaggtgagtctggtgagtacctgaggcagggagggctgagcaggtggcagggtgtgtgctttggagcaggtgtggcctgagcagttgtgagcctgtagccaaagcaaagcgcctggtgagcagagcagggggcaccaaaagaaggcccggacggtggcccagaggggccgaggccttgtcttagcrctccagggcttcatctgcaaggatgtgggccagcagagtttctgggagagggcagatcgcacatattttcagctttgcaggccacgcagtctatcgcaagtactcaactgcaaaaagccattcgtagatggtgtggctgtgtgccaatacaatgatttatgaacactgaagttcatataattttttatgtgtcccaaaatattatgcttttgatttttttccaaccacttaaaaatgtgaaagctatcctcagcttgcaggctgcacaaagacagatggcaggctggatttgacccgaggcccaagttggcccacctctggcctacaggctgtgttggtctaataggatctcagtgtacagaatctttcattgtcaaattttagaaattgtcataagatggcttggcacaaagtctagcacataagctatataccaccatggggagaatggagaagttgggattattccacattagggacataaaacccacttgtggctattctctctaaagctttctctttggagaaaaaagtgtggtgaataggttcccataactctctaatacgcaaacacatgctacaataaattgatttcagatagagataagacccttcgactcacagcagagagtgttgcatttctccgggaccctcacagcagcctttctgagcagttgggagaggcattagactcgttttatagaggaagaagctcctgcccacagaactggtgtcactaacccaaggcgacagttctaccaagctgggggycaggattcacatccggatcttcctattccagctagcgtttttgctgtcactgtctcatacagtcctttggaagaactgtgtcctaaaatgtcatttgcaagccatttactagaacatggaagttttctctttagaaaaagaaaaatgtggtgaacagattcccaggttgcccaagatgagatgaccctttcatctgtaacacagcagaaccatagtcctggagcttcggtgtgagttctaaggccctggggctgtgagaagtaggaaggagtaggtaaaaaagcaaatttctttgcctgagagtggccccagacaaaattcccaagaggctggcgatgtccgagctgtcttctgccctgtgggcaccctgccccctccccgtctctggccatctgggccctctcgcttgttccctccctctgtgacactcagctgaggggcgtcttgtgcagtggggcccggctggccaccgcctgctagtgtcagggcaggagcgagcgccggtggggacgaaggcacagcccacaccggctcctgccccggactcagccacccagcaccggctcctgccccggactcagccacgcccttgtttcatgcctccagctttcctgaccttcctgacttgaaatgtgggtctccccagcttctcgcacggctttcgggagacagggtgggaaggagacccacccggcagcaccgagtcactgggacccggctgaggggctccctggggccgaccccgagagatgccgagaggcgctttctcgcggaccggagcctycgacggccttcccgtgggggactctgctctagctgggtcacctcgtggggggtgcgcggtcttcagaaaataatgaagacctggaatcgggtggatgggtggacgccgccaacgcagaccctctttccaggtctctgctcctgcggtcgggcggctgcgaccgtgccggggctcggaggtaccgtgtgaagtcgctgtcgcgcgtggccgcggggctggccacggtgaagcccgtgcggcgcccgccccgccccgccccggccccagcagcagcctctcccgtggcgtgacggctgccgtctctcctttcagcccgccggcctccatgccgagtgctgtgcttgctgccggctgcagcctcggcctgcccttcccctgccgcggggccccgtgctgaagaaagaccccttcccaggtctggctgaggcggaggggagcttttcccagccacctggacgcaggcgccctcgagagagaaatgccgaggacctgcgaaggggcgaggaagccgatctctctgcggcccggagcctccaggctccagaatgtctttgtctttccaggctggactggagcaccctggtccctctgcggctccgccatcgacagctggggctgcaggccaagggctggaacttcatgctggaggattccaccttctggatcttcgggggctccatccactatttccgtgtgcccagggagtactggagggaccgcctgctgaagatgaaggcctgtggcttgaacaccctcaccacgtaggtgctgcccctgtccccccggagcctggttcctaagcagggcgcctggtgtctgcatgcgaaaaaatataagaggaaccggcccaggtcctctgcccagggcgagagagccagggtctccctcctcctccccaccacagagctcctgactcatgggcgccaagggacatgaaatggatgtgaggtctagaggaaccgcagtagcaatgtcgcacaaaagagtatagggaaggcggtgagtgcagattgargaggtgattcagtgctagcgaatctttttgtgttacawgcagtcttcccacttccagtttatacagccagtgaacggagtcttcttcaggagagctgcctgagaggctctctggccccagttttcagcactcctcttgggcagtggtcttagaatgctgtggttgccatcccagcctctgctgtgatgattggcacatggtaggcacgcactaaaatgtcgaacttgcaaatcatttataaagtgtgctcagttgtgaataacctggatcttttcatgggttttccccccaaattgccaactgatacttgacgctaagtctatgaaataaagggggtgatcaggctggattattccatgtttaggsaaaaatatgtgattacaaatcaaggagatggcttttcatgggtggtttatgaactgattttgaagacagttccttaargagttacagaaacctgccgagccttgacaacttccccgaaaggactcctgaaggctgtgggagtgctgcaggctcagcactctgacycgcagaagcagcaccgacgacacttgctgaaaggcagagctcgtgtgtctgggttggaagccaggcaggctctcctccttcatctgagaatattctttgtagtgggcagaggctctgcgaaagccagcgatggggtggggccgggagaagagcagctgccatcactgtgtcatccatgagtcgtcccttccgcctctcgagttgagcctgtccatgagcctgctccatcccttgtcctgtctttcgagttggaagcttcattctgttgcccgttttggaattccggggcttcagtaaatataggatgatcaccgagctttccccttactccttgtagctgtttttttgataaagttacattttmttctccaatggggcgtgggcatggtaagctaactggggtcagagcgcctgaccttttactcagccggtcttatgcttcatccaaatcttgttgatgcagagggaagagggcttgccctcgattctggtccctagatcagttcacttagttcttggttccagtcctaaaatcatgaagaaacatatctttagccatcatattggatttttgggctaaagaaggtaatgtgagaggtgaaatggaatgaatgacatgctctagcctataattatcatttctgttgcagctatgttccgtggaacctgcatgagccagaaagaggcaaatttgacttctctgggaacctggacctggagtatgtggtgttgctgcttctgtgaactggycaggggcagggcacagaggtggytactkgggtggrttagcaaccaaagagaaccagggagggacstgggtctggagtcctgttctaggactgtgagaggccctgcacccaggacccagacgctccccagtcgtgacctgtcacccagagggactgggcctgcagcctccgggccccacctctccactgcagcccagaggggcagaagaccctgggagccgcccgactctgcatggggtccggccgctgggctggggcagggcggcccctctaggctagcaaggctatggggtcaggttcactgttgagaccactgagccctgggtgtcacccttcctcctcaggcccccgatggggctgtgcagaggctctgaggctgggagcagctcaggccaccgacctggtgtgggagtccccrcgctttgggggtggggccgagccrtcccttcgccccaccaggcagctcctccaccctgtgatgcgtgtggcccccacccggcctcatcctgggccgtcgtgggaggggctgacgatgtggacctccctagggccttcgtcctgatggccgcagagatcgggctgtgggtgattctgcgtccaggcccctacatctgcagtgagatggacctcgggggcttgcccaggtaagcggggttgtgaagggtcctgtgtgctgtggcaaaaagctcacagacataggtctggtttgtttctgtgttccagttcccattctgtactgaattgtgttccagttcccattctgtactgaatttccttttcaggaaaagcagcacccagaggggatcgctttcagtgatgctgcagtgagtgccctcacgtagccatgcatgggctgcttgtgtgacaggcagcagcagggctggccctcctggcatctcatgcttcaggactctgctgtggagctgtgagtcctggcaggtcattcacctgcgtgtctgcagtatgggaaaaatccgaccttccctgtctgtttcttttttttgagacagagtcttgctctggcactcaggctggagtgcagtggtgtgatcttggcttactgcaacctccgcctcccgggttcaagcgattctcctgcctcagcctcccgagtagctagggttacaggtgtgtgccaccacgcgcagctaatttttgtatttttagtaaagacarggtttcaccatgttggctaggctggtctggaactcctgaccttgtgatctgcccacctcggcctcccaaagtgctgggattacaggcatgagccaccgcgcccggccttccctatctctttcttaggaatgttaccaagcatattttgaaaagtccaagtattttgataaagtataagagaaacaaattcttgttatggttttgtcttcctatctcggcccacgtgtgtcatcttcccagtgctagtcttggctgagtttggtgttctgtggttggagtggaaatctggacaggaatcagctgggacttcattcattcctcatcctcaacattgtggcctttaagattttcttgttaactggtgtaacctttctcagcctcccagtgtaccaggtggttagacccagactgcctcagggaagaggctgatccttgtccccaagccgtctcccctcccctggtccctggggagccctgggcttcttttcctcctggtttccagcatgacccgcccttccctcgggggcatagcttctgtctccactacccagggccacttctcaggcactgatccatccagcctggtaggctcaccctagtcacgaacacagccagggcagcctctcccatccctgtggattagaaagctgtgtgccaccgtcagcgatttcctcggctcagccggggccgggcacaggaggacgaagggtttaacagtcttaacttagaagcagtggggagctgtggcactcagactcccccttctcaccccgcccatgtggcacctggccatgcatgagaggggcatgtgggcacacctgcggagggggcgtccgggcgtgagtgagaaggctaacctgtcaggtggggttagaatgtgggggtgtcggtctggaggaaactgctctctcctcaccccttgtttgacccacagaaatgggataatttcctgaccctgtttaggacttccagaccagggcaagaggagcctcagagccttttgttagaaaatatgtgtcttctcagaacctgaagtgagaaggaagagccctgactccagctttggaaccaatccacgctgctgtgttcctctggggagtttgggatcatagcaacagggtggagggagaattcaactcttgctcacctgctgctctgggctgtgcgccactgatgccaaggcgttagccacgttggcaaggatggggactgcctcctgctcagcccctcgcagtctctgtcaggcttgttttttggggtgacgctagaaggttgtgtctcctccttccacagcctcagtgattcctaacccttttgacttcactttttgaaatgggatcacagagcaagttgttgaaaactaggcctggagtcctgtgaaaagcttttctcactgctggcagccaggccctgtagctgtggagctggaaatgaacttccaccaggctgtgtccttggggagggaagctgcaggagtgcgggtgggtgctcgccccagaatcggtttgcattgtctccccacttctgggctcagtggggtggaggagggcacaggtcattctggagcactggggggcctctcccttctcacgcatcaacagcctgytcacagcaaacccactgtgacactaacatccttcctttcccccgtttayacttcaagctggctactccaagaccctggcatgaggctgaggacaacttacaagggcttcaccgaagcagtggacctttattttgaccacctgatgtccagggtggtgccactccaggtacaagcaaatggggtcttctttgatcttggtctgtcttcctctaggtcgtggatcatccttggttagttctcagaccaagggtcctccagtgttttgaacacacgagcaggctcttcctcaccrtccgagactygtaactgaggggcttgcaagagttgtctttggaaagatctgtgcatttcagtgttgtctcacttgggtgcgttactgaaaggacagacagatgtaagggctcacattgccacatacagcactggagagacagggatgctgtgatagccgggaacacgcatccactggcatctccatggttccacagagacagggatgaggtgatagccgggaacacccatctatctaccagtgtcccagtagcactgcggctcagttttgcacagggtggagcacatgtggattaacctttgcctataagactgcaggactttttataaattataaaattcctttcgctgactttacgagatacttccctctgctaccaaaaaggtgctgcatggtacacacttactattcaaaacatgcgttaaagtacgttttgggggaggaagtaccttaatattttatataataattggaagctttggaaagcaggaatgggaaaaatcaacccagttgctgtgtaaaaccagaaagaatggcattgagaaattagtacatcaataaaaaattagttcaagtcagtggtatggaatactcaccacacacataaatcaaagggaactgccagatgaaacacaggatgctcagttatatttgagtttcagataagcaaggaataattttttagtgtaaatatattccaaatattgcatgggtcatacttacactaaaaaattatttgttgtgaattcaaatttaactttatgtctggtatttttgtttactaaatccggcagccttaaccatgacagaagcaaggaactaggaagtcattagcctagatcttgccgggaagctggggatcagcaggttgtaggagtcgggtgggcagcaggatggccgtcctgggagcaggctcagaggcacttgcagacgtgcagcgggtcaccaatgcatctttttgaaataaacgataacataattattattatttaacatatttaaataatcacatagttatttaatttttgtgactatgggatagtatacataacataaactttgccattttaaccattttgaaatgtacagctcagcggcattgagtccacccacactgttgtgtgctcatctccacagccttagttcaggctgccacaaccaaacacctagactgagtggcttacagacaaagaaattcatttctcccagttttggagagtgggaagtccaagaacaaagcactggcagattcggtgtctggaagggcccccttccagggcatatacggccatcttcttgatgcaaccttacatggcagagagcgtcagagagctccctgaggtccctcttataagagcactagccctgttggcaaggactctatgctcataactaatcaccacccaaaagtcccacctctgaataccgtcacagtgggggttaggatttcaacatgtaaattttgggagaacacagtctattgcaaccactgtctatctccagtccttttctgtcttccccaatgtaaactctgtgccgttaaaccctccattcttccctctctcagctcctgacagccattctactctctgtctccatgcatttgatcattttagctaccaaatataagtgaaatcacatagtattgtgactggattatttcacttaacagcgccctcaaggttcatctgtgtcatagcctgtgtcagaatttccttcctttttaagactgaattatgttccattgcatgtatataacacgtttgtttatccttcatccattgacgaacgtttgagttgcttctgccttttggccactgtaaataaagctgctgtgagcatgggtgtacaaatacctttctgagcccctgctttcgcttcttttgggtatatacctagaagtgaaattgctggatcaacttgtcattctacattcagttttttttaggaattgccataccgttttccacagaagttgcaccaaattacattcccaccagcaatacacaagctttgcaatttccccacatccttgccaacacttgttatttcctgtttatctggggagagccatcagtgggtgtgaagtggtatctcatggtggttttgatttgcatttccctggtgatgttgagcatctttcatgtgctgattggtcttttgcatatcttggaagaaatgtttattcaagtcttctgctcatttttgaatctagttgtttgtttttatgttgttgattataggaattctttttactttctggagatcaattccttaacaggacctgccaggactgggtccttcgcttcaaggcagcaggttcccttttggctcagggtatgtctagaagtgtctggaagctagggcctggaacgagggcctcttgactctgccggcgccctttcctactgtggttgagctggatccaagatgcaagacaaagtcctctttactctttgctctcctctccttaagcagaaggaaggagccactttcgttgctgtgagctgcgctacctgggcttgggggagggatgtgcaagaactcccttagccatgccagctggtggctccttaggccatgcgctgtgctagtacactggctgtaagctcatcctagctccaggagttgcataggaattgcggtctttgtgtcctagactgcctttcatgtttacctaggactccagagcacttcagcccatggtggtgaggcttcccaagaaactcaagttccaatcactagggtgggcagttcctctctggctagggctggtccaaatgctccgtctacgtggatgctggctgagctcagcatggctttatcctgtgctgtgacaaggcagcactgagttcaatgtaaagttccccagtcactgtgctctcccttccccaaatgcacagatcctctctcctcaccacttggctgccgctgggagatgggagagggtggcatcggtggtgtaaggctgtctctcttgcctgccttaatgcgtcttttggtgatatgaagttaaaaccaggtactgtgacgggtcacttgagtttcggtttttgtcatggtgcttttctgcgtgcagatcactgttaaaatttcgtgttccagcaggacggatgaacggtgcagccttctattcctccatcttgctccactgtcttttattttcttttagtattttgtttgtaatgtacaatcagtgtacaaatatttcacctccttgattaaatgtattcccaagtattttgttgtttttgatggtgtcgtaaatggaattgtcccctgatggtggataaaaacaatgcatttttgcacattgattttttttatcctgcaagcttactgaattattagctagatagttttttttaggggtgtggggatgtgcactgttttctgcatttaagatcatgttgtctgtgaacagagataacttcttcctttccaacttggttgcctttatttttttcttgactaattgctctggcaggacttccagtaccgtgttgaatagaagtgctgaaagcacgaatgcttggtttgttcctgatcgtagaggaaaagttttcagtctttcaccagtgaatatgatgttgactgtgggctttctgtatggggcctttactatgttgaggtagtttccttctgttcctagttgactgagtgttttttatcatgaaagaatgttgaattttatcacttttttctgcatcaattgggatcatcatgtggtttttcctcttaattttgttaatgcggtatattacattgattgattctttttctttctttttttttttttttttgagatggtggttccctcttgttgctcaggctggagagcaatggcgctatctcagctcactgcaacctcctcctcccaggttcaagtgattctcctgcctcagcctcctgaatagctggggttacaagcacctgccaccatgcccagctaattttgtattttcagtagagatggggttttaccctgttgatcaggctggtctcaaacttctgacctcaggtgatccacctgcctcagcctcccaaagtgctgggattataggcatgagccaccatgcctggcctacattgattgcttttcacatggcaaatcatcctcgcattacaggaatgaatcccatttgatcatggtttataattcttttaatatgctgctgaattaagttggctaacatgttgttgagggttttggcatcagtattcatcaggactgttagtccgtgttttcttttctcatagtgtcttttgtttgtaataaaagaaaaaagtgtcaactttttttgacacttctatatccagcaaaactcaaaaatgagggaaaaattaagaaattcccaaagaaaagtgaaaagagtttattactgtattctacgttatagaataaggtaggaagtgttccttccctttcaatttttgggaagggtttgaggaagactggcgttaatttttctttaaatatttggtagaatttaccagtgaagccatctggtcctggacttttctttgttgggaggtttttagttactgattcagtgtccttactagttataggtctgttcagattttatatttcttcatgatttagttttggcatattatatatttctaggaatttgtgtgtttcatctaggttatttaatatttaatttgttggcgtacaatttgttcatattcctcttctgtaatcgtttttatttctgtaaaatcagcagtaatagcctcatgttgtttctgattttagttgagtcatatcttttttcttagtttagctgcagtttgtcagttttgttgatcttttcaaataaccaactcttggtttcattaatttttctttattgtttttctattctctcattgtctatctctgctctaatctttattatttccttacttctgctaccttttagtttgtttccctttttctggtttcttaaggtataaagttaagttgttggtttgagaccttttgtcttttaaatgtatttatagctataaaatttccctctttgcactgctttcactgtaattcataattttatttccattttcatttttctcaatatgtcttctttttttttttttttgagatggagtctcgctcttgtcgcccaggcaggagtgcagtggcatgatctcagctcactacaacgtccgcctcccaggttcaagtgattctcattactcaccctcccaagtagctgggattacaggtgcccgtgaccacgcccggctgatatttgtatttttagtagagacggggtttccccttgttggccgggctggtcttgaactccctatctcaggtgatccgcccgccttggcctcccaaagtgctgggattacaggcgtgagccactgcgcctggcctcaatatattttctaatgtctcttgtgatttcctctttggactattggtgaagattttatttccacatacttgaatttttcaggacttttttggttattgatttctagtttcattccattgtgattgggaaaaataaaactttgtaagatttcaattttttaaatttattaaagcttgaggctgggtgtggtggctcatgcctgtaatcctagcactttgggaggccgaggcaagtggaacacttgaggtcgggagttagagaccagcttggccaacatgttgaaacccattctctactaaaaaatacaaaaattagccaggtgtggtgacgggcacctgtaatcccagctacttgggaggctgaggcacaagaatcacttgaacctgggagatggaggttgcagtgagccaagattgtgccactgcactccagcctgggtgacagagcaagactctgtttttttttaaaaaagaaaaatttattaaggcttgtttttttggcttactatatggtttatcctggagagtgttttatgtgcccatgagaaaaatgtgtattgtgctacttttgggtggaatgttgtgtatatatatgtttggtccaactggtccataatattgtctaggtcctctatttggttactaattttctgtctggttactctatccattattgatattcagatattgagtctcctactattattgtctatttttccctttaattttgccactgtttggctcatatactttggaattctggcatttggtgcatatatgtttataattgttatatccttttggtgaattgacccttttatcattatatatattttatcatgtctttgtctcttgtaacagtttttgatataaagtctattttgtttgatattagcaaagccacccctcctcttttgattactgtttgcataaaatatctttttccagcctttcacttccaaccaataaatatccttagatctgaagtgagtgtcttgtagatagtatatagttggatatcggtttgttaaaaatccattctgccaatgtatgtcttttgattggggagtttaatgtgtttacattcaaagtaattactgatagagaatcacttgcttttgccattttgttgctttctgtatgtcttacagctttttgtccctcatttcctttatgactgctttactttgtatctagttgatttttttatagtgacacttttttataacgattccctttaccttgggataaggtaaaggatatataatatcctaaagttgtgacattctgttttaaattgataccaacctaacttcaactgcacacaaaaactcctttacagttctgcccttccactttattttattgatgtcacaaattatgtcttcatattgggtgtacccattaacttaaatttataattattttatgtcttttaaaatcttgtagaaaataaaaagccacattgtaaagaaaaattataataatatttttatattttttatgtgtctatctttgctggagaactttatattttcatatagcttcaaattactctctagcattttttcatttcaactttaggtgttttttttctagggaaggtctagtggtaatgaactctcttagctttactttgggaatttcttaatttttccctcatttttgagttttgctggatatagaagtgtcaaaaaaaaagttgacactttttcctttcagcactttgactatatcatctcattgccttctggcctgaaaattttctggctgagatatcctttatagtcttattgaggatcccttgcctgtgaccaaaactttttctggcattcaagaatctctctttgtcttcaatggtttgattatagagtgtccctgagtggttctctggaattttttgagctccttagatttatataatcttgtctttcctcaaattggagaagttttcagctattattttgtaaaaataatctccctgcccttttatctctctttttcttctaagaaacccataattcatatattattctgcttgaagatgttgtgtaagtcccttaggctctgttcacttttctttattcttttatctcctcagacctgatcatttctgataacctgtgtttaagtttgcttttctttcttctacctgtttgaatctgccgttgaactcctctagtgaatttttcaatttatatatggtatatttcagccccagaagttcctttggttcttttaaaaataatctctgtttctttgttgatattctctttttcttcatatatcatttgcctggtttcctttagctccttgagcatatttacgacagctgttatagatcttgctctactgagtctggtgtgtgtgtttcttcagatactgcttttggagatttattttgttcctttgatgagtcatacttccctgtttctttttatgtttgtgtttttttggttgaacattgggcttttgaaaaaacaaacacctatttcagtttttgcatgttttcaggggaaccctcactaattagtgggcccctaagcccggagatcagcccaacatgaagacttaagagctgatattttctgggcatgtgttctgtctgtatctgtgtgtgtgcttccctccctacctcccctccctggtcgctttcaagggtctttaattcccagagtctcaccccagcttcttcttgtggccttagatgcttttcattttcttttgctgtaattcttttcccccaggcatccaaggctttatagtcctctggcagctttcatatgctgccatctttagcttccagcctgaagtccaaactatgttgacgattcctgtttgagctccatgtcagacaagacagaaaccagtacgttgggcagaacaagttagaacatcgtgaacaagttagaacattgtaaacaagttagaacattatcaacaagttccattttgcttcttccccatgagggagcggggagttgggacgcatcctcctgaccacaccatgctacattggggtggggcaagaacttgtgaaaacatcatacaattttgtaccattttgcatatgactttttgttttgatttggtggtcacttgtttggttagacacttaaatggtttccagagctcctattaagttattttagtcagtctggagttgttttcttgatgttttcatgggagaacaagggcctagtgcttcttccactgtcttattgatactaatcttttgagattttagttttcaatgggatcttttgctagtcactggtgatgggcgtggcagggttggatactacagttcccctgcacactcagctcctggttttctgtcttttctccgcagtacaagcgtgggggacctatcattgccgtgcaggtggagaatgaatatgrttcctataataaagaccccgcatacatgccctaygtcaagaaggtangaatcctcttagtgcgtttctttagattccttcctctggagtgtgctataggctgtggtgtgacatgtgggtctaatatttttctcatattaatacatcctccaacatcatgtattagtgaattttctctgttgttttatttcaacagggttgtcacttatttacccttgattgagtttcatctgggaatttcagtacacacctggtattgcaggggctgggaataaaggaattggcttaattgcgtggtgatgattaggaaggcttcctggagaggcggctccaattctaaagtctaaagcagtggttcccagcccaggctgcacactggctctatctggggagttttaagaaatccctgcgcccaggccatgtaccataccaagcaaagaagaatccttggggttctcagacatctggtttcagtgtgtagggaaggctgagagccactgactcaatgcatgactgaccagcgaagggcagagccacacttaaaataacaggctacattcagatctgctttctgtcccttagtagctgagaccttgaacaaatgcctcgagttttttctaaacctcctttctctcttctataaagtgtgactaataggagtatttacctttccaaattgtgagtatgatgtgatatcccgcagctcagtactgttctagtaagtcgtcaataaataagaccttgatggaatcattggcatttgctgtggagtaccttggaggttcggccatggtgtgagctgaggaagtgtaagtggccgcagtgactccacctacctgaaggccggacggctttgggccttgatgcctgggcagcatcccttctgctacgacgtgcagagcattttccgtctggaaattaattcagtccctccacgtgggagaccgaggctcagtcccttcaacttgtgggttcatgcgtactcttcccccttctcacctgcagaaagccctcttaggaggaagcaaggccgtgtccaggaagggtggcattcctcaagctggaaaggggcaaggtccattctgatggccatgcccagccacggcctggagtagggcactccttcagcttcctacagaaagatcccatcccagcacrggacttgaagcgtctcctgcgataccccattcccgcagactgtctcttggccctggggcctctcagcggttgttgactcagttactcagctgcagagaaggagagccccacgagaggagagtgcagctccctcagggacgtcctgctccactcatgcttccctggtgtcggggyggaggcgcccatgtgtgactcaggtgggcaaagagaagcagcagcgtccagcctctgtggtccggaagctcttgggagaattcaccagcctctctctgaggctgctgggagagtggtgtgagagaacaggtgcctgctcccagcctagctctgcagatctctggtgctcaggcrggagcaattatcccctctggggtggagtcggtaaatgaatgcccaggaaatgttaagtgtgtgtgtatgtggtagggacctaagtaaatgcttgctaaatatcagtgaatgatagtgtgaggtggtagatacaggactcttgattaatcccacctgggctcatggattgaactctgcagctctcctgtgcctgagaccagagccccctctgctctttccttccccgcgtgtgggactggacacragccttattcgcccagcagatgatctcgctgtctatccacttccaaaagatttcagcggaaataaacagtcttggcataatatctgcagggaagattacgagaagacacctctgttgggatttttgatccaaaagatcctagcacctcagcacagagcctttggctctgggttcaggcccacgttgccatgggccctgtaacctgcgatgcttgacttcacgcctccgaggcgcgtctctactgtgaagacagcaactgcaaggctcgcgtaggacagtctgtgtatgagcggagggcctggcgtggcagtgactgctctgcggatgtcaggggacgctctgagtggtgattgtcgtcactgcccctcaagcacagcgtttcttccacttcactctctgctttacagctgggaggatgcttcctgctgttctgggcatgggcagtgcaccgtgggcacgtgacagggcatggtgggccctcctgggccttgccatcccccaaacccacaccggccagcgtggggaagggacaggcctgttgcttgtgctgtgagagaagggaaggatgtaggtgtcgtcctggaggcctgacctactcgctggagcccagcagacagtggcgggtgacacgcggcagcaggcttccctgagctggcctcagtgtagactcgcctaggcatgctagctggcccaccgggcaccttccagatccggagcaaccaggggctgccctagtttgccagccctgcccctgctgtgatgggaattcatgctgattggagctgtgctgagcatggccggtgcagatggcaggagacttttctgtttttggcagagaaataaacgctttatttgtcatctctccttctagctcttcaggctacccaactgcagctgtgtgtcactgcagaagctctaaggagccagggcagacgagggcttgtctcatttcccccacaggcactggaggaccgtggcattgtggaactgctcctgacttcagacaacaaggatgggctgagcaaggggattgtccagggaggtaactgcacttgtgttgggccgtgggggctggcggcggccctgggctggctgtgcacgctcccgctgtgggactgcgacccaagtaggagtttctctggtgcctgttattctcccgtgcatatggcackgggctgcagacacccttgggttccatgagtggggagggtctgtgtgagagattgtggtgcgtggctggctgggtggctgttctcctgccctgctgggcactcgggctccaagggcactctgcagatgactgcttcacgtgcgggcttcctgttttcagaacatcgcagctccgttcttcccagctgcatgggccccgaacctggtagtgactgtgagctcctctccattccgcctggcacctaagccattgtttgctttatctcccagtgctcctggaatccctacaggcctaagcagttgcctgctagcagcacccctggcctgcattgctgcagtagcattttcactgttgactccataatgtgttctcagcatatcagcctccgtgtgcctctgaaaatgtcgtccagattaccctatcctgctgaacgccaggcatctctgtcacactcagagtgaagcgcaggttctgggaatgacctcgaaaggcctctccacttggcctccaggacctagctgagctcacctcctgctccttccctttgctcacaccgtttcaccctctttactgttcctccaacatccagatccccagcctggggggctttgctcttcttccagagagctacatggctgttctccgaagttagcgaggctttctgtagcaccacacttgaaattgaacttcttccttcgtggggctcactcaatccttctccctgctttcttttcgccctctcaccttccaggtagtttatttatgtcattcatctgtttcacccagcagtactcttggcggggcttgggctttggctggttcaggctgtgctcaggggcccaggcgtggtttgtggccttggtgagcatagcgccctcccatcgttgcagcggggcccttcctgtggcctcctgcacccgtgcttgtgtctgctctggcacattccacgctttcttttctttcttttgcatttccttccacagaccgagctgctggaagatctctctatatccctgcagcagcgcctagctggcacccagggagtgaaggtccatgaatggcgaggaaaaggcttttgtccccaggcagagtcagtcaaggacccagacctcgtgtctccggcatggggaggaccagcagtgatccccacggcttccacgcggtggcgccgtctccccacggctgcttccaaggcctgctccgggctccgcagggctgtggctgtgttgggagactcctggtgctggagcacgttttagcgcttggcggcctcccggtttcaggccttgcaaggaagcccgggagccgccactgcttttccctgtggccctcccacctccaggcacccacctgcgtgcccctgttgccacctgctgcccggaataacttcttttttttttttttaattaaaaaaattaaatggtctaaaagtgaaataatcgaaaatgttggtagagaaatacagtgttgcctactcttcgttacattctccagaaatgaccattttcaactctttgactttttctttggatattttccttcttatttccaaatactgtgaacatacagccctgcatcgtttgctttaaaagttctgcctattggccgggcagtggctcaggcctgtcatcccagcgctgtgggaggccgaggcgggcggatcatgaggtcaggagatcgagaccagcctgcccaacatggcgaaaccctgtctctactgaaaatacaaaaaattagccgggtgtggtggcgggcacctgtagtcccagctactcgggagctgaggcaggagaatccgtgaacccgggtggcggagtttgcagtgagccgagattgcaccactgcactccagcctggacgacagagcaagactccgtctcaaaaaaaaacaaaaagcaaaaaacattatccgagcgtggtggcgggtgcctgtaatcccagctacttgggaggctgaggcaggagaattgcttgaatgtgagaggcagaggttgcagtgagccccgatggtacccctgcactctagcctgggtgacaagagcaaaactccgttaaaaaaaaaaattctgcctattgacttcttgttccagtaggtgatgagtgttctttcctgccagcatggctgttcagccctgataggcgccagcgtgggcctcgcggatgtgtatgacaacggttcactgcaggcacctgccacgtgggtgatgccctgcacagtatctgtgaattctcagggtgccagccggctctgcagtgtgcttagttttcagtgtaattattctgtttgtttttcttttcatttcaattctctttcctcccctcaactcccctggtgccgctttctcttttaaacaaatgctttgccagagatgtcgcagatgcctgtcgatggtgttcctcargtcctgtgcctgtccggttctgcctgggtctgatccggctcgtgtggaggcctcgctctcattgttctggcctgcatggtggggggtctgctgcttggctgcatcccgcgtggaatcctgcttcctggagttccaggaaacaggatgtttcttggtgctccgtggcttcccggcacctgctgttgctgcttcggcacaggggactccggctcccgagcgtttcctgggtcttcttcctcctcgcccccggccaagttcctcagggagcccgccctccccttctcgtgctgctgcgcatccggggagcggcccagttacgctcaccatggtgggccgtgcgggttgtgcgtgtctttcgtggtgctccaccctctcgtcctcgggtctttcggtcatccttgtgtttgtgtattgggtgcttctgtagattgtctacgtcttttctgttctttatctctgtgcctttcagctcttctttctgggtgacttcctgagcttttatcttccagtcctcccgtcatttcctgggtcacgtttttcttgaatgtatttctcttctcatagcatactttagaaatggatactacctttcttatttctctccgagggtagtttgctttttacaaaagcgctgcccgcgttcccttccccggcgctgcccgcgttccttccccggcgctgcccgcgtgtttttctgctggctgttccactccatctcctgcgcgaggggatgctctggatcagccgctacccagcagcttaggaaagaggctctcggctgccactcggagcgccgggtgtgggagaggctgttgacaggagttcttccccctgggatgactgggccgtggggctttttcaagaagggacactcacttgtcggagtgtggggctgtgtctgccactgttgagtgtttctggagaagtcctgggttcttgccgcagctgttctgggccaggccggcggtggacaggaatgtgctgtggacactgcctttcttcctcttcccgccctcccctccacctgccacacacgcccactcccgcagcagctcgggcccagggttctcaggcaggatggcccccgaggaggggatgggcccaggtgggaatgaggatgaaggctgaggacagggcatcctcccatctcatggtgaccaggtcctggggctgggagtggggtgaggccttgggctggagctggagccgactgtcaccccttccgcactcctagaccatttactgtccctgtgtccttctcagtgttccaggatttgccagtgtctcttcttgttgctgttcctcatggccgtctacctgtccactctccgcttgtatttgtgagacgtatcaggaaggacaggacagagatgcttgtgttcacttagccctgtgcatcctgcggactttgagttcagcctgctcagtttcagactggcctcctgtcttcaaagggcttctggcttgaggggaggggtctgggtggagggtcccacccagtgggctgctggagggcagggacagggcagagctatggtatggtgtcrgggagacccaggtgtgcagtcccgctctgccgctacctgaggccaattattgtgacctagaggcaagttatttcacttccccggagccccagctgtcgcttgcgttccttcactggcaatcagaggctttcgtcctgcagcagagcatcagggtggcctggcttgccaggctggctcagcctctctggtgtgtgcctaggctgtgcctgtgaactgactgttaggcagatagcaggcaggtgaggggccccaggataaggctgtgccactggggtgggcgtgggcatgcccgggtgtcagccaaacagagcgcacctttcttgagcatatgtttcactgatagaaagccactgaaaatagcattttaaattttaaacggaacatgttatggggtagaatacagaattagcccttatcaagaaatcagagaggaatctttgtttacatcattaccttggaccggatgcttggggtgccaaggaaggatcaggctctggttcgtacaaaagaacaaggaacagagtgcatgctcggcttgtagaagtcacagttgattgagatcaggtgcacagcgagtgactgcctctcagctctgtgctgctgtggcggagtctccaagacaacaagataagtctcctggcgtcctggctgacttatttatttatttatttttgtgagacacagtctcactctgtcacccaggctagggtgcaatggcacaatctcagttcactgcaacttctgcctcttgggttcaagtgatcctcccacctcagcctcccaagtagttgggattacaggcatgcaccaccaaccctggctaatttttttgtgtattttagtagagagggggtttcaccatgctggccaggctggtctcgaactcctggcctcaagtgatccacctgccttagcctcccaaagtgttggggttacaggtgtgagccaccgcgcctgactgtggctsacttctaactggaggtgggaaacggtgtcagggccgcttactttattgtgctggtggattgagaagggtctggggtcacctagaaggtccctggctttgagacartgctttgtctctctctctcctcttccctttaacagtcttggccaccatcaacttgcagtcaacacacgagctgcagctactgaccacctttctcttcaacgtccaggtaagtccagccccagggaagctgcggcccrccctgctcagcggcctatgggaattctgaatgcctgtcagcgtgctcagcttcsccagcgcagggagctggactcagggctgwtrgcctctggccccccgcccatgccactgtgtgcctgcaaggcccrctgcccagaaacacctctgagggctgctgtgtmggctgatgcagtgtggacatcacccactgccctgagagaggggcccttttggtgcactcctagaggactcgacttttgtggcctcaactagctccagacttgctcccagggattgaggggggaaggaaaaacttccctgtcctatactacacaggcatccgaccttaacctgtgaggcccctgcaatcctagaaagattattgtcatcagcaaggcagaaagcctggtccactccaggtgcggagagagggaggagtttccagatgtccctcaatatctgtcagactgatgggcatttatgccaccctgtagttctgactggcctctttctcgagctcgcgtgcccctccgaagcaggtggatggacagggccatgctgcagccctctgcagacctgagaggccccagctgtcccctggctcactgaggggcgtggatgctccagactgcccccacgctgcatcgtcacactggtcctgggcctggagtggagttgtgcttggatggacaggcatggatggctgtggagacgctgggctgctttccattccggctgatggcctttcagagcaggggctgtgtcctcaggcacatctgcgtggagccaccacagccgtgtggggccgtgtgtgtgtttgatgtggcttctcctggagttcagctgccagagtaggcgaggaggctcccaggaggaggtgggagggctggccccgctcccaggcaggctcctgtgasgcagatcaggcgcgatccagctgggtctctgccttcctttcttggcatttcctgagtgcctgcccatgtgtgcagtggagtggggggtgcctctcatacttgtgactgagatgacagggtctcctgccctgtgctgtgtgaccttgggcaagttacttaacctctctgtgcrtctctcttcttctaagtggggatgatgagagtacatttccttatggtgtcaactcacagggttgtttgaagattaaatgaggtaatatttggaaagtgcctagcacagcagctgatacagcagaatgccttatgtttagccttcaaggtcatccttagaggggtagccacgcgcgagccttcccaggccagctgtcctgctaacagaatggccctgctgaagggctttatgtgcgcagtccagagatgtctgttttcctgaaggaaggggacttggacacctccctgtttaaatcaagggctctctgaatgcacagcrcaggcctccaggtgtgctccatgtggcratgtccgatagcacctcactcgtcctctgtgtccatgacccgtgatggacagaactatgcaagtgtttcttgagcacctcctacctgccaggaacagtgtgctaagggtgttatgtgcactctcccrtttaattctcccaatagtcatatgagccagtgaaggagacagctatagagtgtataagrcaccctgtaagtagtggcttggggactgcagaacagtctcactacagagctccagctcttagccagttgtgcagtgcagtggcctggcccatgggtggacacccacctccgcagctctggtaccctcaagccaacaaccttgcttctggcatgggagatttctgacttgtgggactttgaatctgcttctccctttttagtgatttaaacgtggtatggtatgtctccttcttggaaggtaggtggcttgtaaagaaaaccaagccgccagtcttgctagaagaattcttgtaactactttggctttaacccgggtatggctggtaccttctactcaatggaccgtgagtttgtcccatccccctggatcagattttgttgctgtgtatgcggtatccctctaaacataaggctatcactgacctagagatacttgacaagctgtcactgaataagtgaggaaggctctctcatgcagagcctgaaatactagcgtgttagtctttacacctcccccaggtgctctgggcttctgcaaacgtggcagagtggagcatggtcccaggaatgatcttggcctccttggggccgtcctatgccaaagtcagtattcagaaagaagatttaagatttgttgagtggcccagccaaggtataaatccaaactgtcagtgcagaacctgcaccatgaatagctgtgctgtaaggccctgattttctggttcagaaaatgctgcaaactgctgtttaaactgagttggaccttgaagagggcccactctgcagcgtctgatttttctgctaatggagccagtacccagggtgggggggagggatctgcatccacagtatccctctcagatatggagttgtcctgggtaaaacatcccccttccctggaagaggacaggcaaagcttggcttgatcctggaccagtgtcttcttgctaacacgtatgcaacattaaaaccatcagggtttgccatatcgactttgggagctttatctgctctatacctgcaggaggccacatgtggcaggagaactggtgtgcaggcgaatttggccctcacctatgccccacctccaaagacctctaaggcagtgggtatgcagacagggaagagtagagagggcagagatcctggggctcccctccatgaagagcttccctcttttttgtctggmcagcctgcttgtctaactctcattttgtggtgtccaggggactcagcccaagatggtgatggagtactggacggggtggtttgactcrtggggaggccctcacaatatcttggattcttctggtgagtgcttgcggtgactacatccagaatgtgtgctacttaagaagtgaggatgagtttcagtcacctgctaactaatgtaagccatagggggtgcaaggctgctgggattatctgtgtgcagaagttggctttggatattcctgagtcatttgtcttgacacttggatgaatgggagggcttttaacattgcttgttcgtgtttttgtaattagaagggtaatgcatgcctattgcaaacatccagaaaatacagaaaaagtatagagaagaaataaaattcccagagcacagagaaaacacttagctgtttaccacgcaggcagttctctctgtatctctgccgacagctctatacgcacacacagatagagacagatgccrtcacactccgctgcatgtcacctgcttgtgccagttaatgcacatacggacagctttctgtatgaccaaatacagatttacatgactgttttaaagaatgtgaagagccccattctaaaccacactttgtggacacagtctcccgggttgtttctggtggttctgttaagcgcacgccatcccggygagcatcccggtgagcatcccggagcctgcgctctgcgcacccggctttccctgggatgagcggcacaggggctcctcggcaccgtgtagatgtgcatgctcgcccctcagcccccggaaagacggcagcttcagccgctgctgctgaatgggtgcacccatttcccacagattcagcaacaccgagtattaaaataacttttaatatttgtctactcagtacatcattgtttagtctgcatttctttgatttatattgataaaatatatatttattaaccatttgtttttctcctttgctatgatcttgttatgtcatggttcatttcctaacaaaggtagaataggaggtgtcagagttttctctctaaggatgcatcccatctttgtgcacttgatacacctggtcaggcagactcacatggagactgtgctggctggaaggccctggccgacctgggctgcaggtggtccacatggagctcagagacttgaccaggattgacagacaactggaggctcgagctctggggccatgattctggcccacacttcctcctccaccsctaatcttctgtgattsgggttttatgagagctagaaggacagagtgacaaagttggccttgaggttttgaggtgggactgggaaagaggagagtagtgaagggaccccggctcatctcagactttaactcactctgcacatcccytttctccctcctccggcagaggttttgaaaaccgtgtctgccattgtggacgccggctcctccatcaacctctacatgttycacggaggcaccaactttggcttcatgaatggagccatgcacttccatgactacaagtcagatgtcaccagctatggcaagtattcatcagcactgctctccctggtctgccctgcatgggcatggctgggacttgctatggagaggccctcagggtcaacttctggcaccttcgtgtctttggcaatagagtacctggagaaggtacttgcctggacagtcatgttacactcccagaggagggaagcctcaagggaggtggtgtgcctgtgagctggtcactctacagagaggcctctttggcaaaggttggcctgaggaagtggaaggagaccgccctagggggacagggagggacggtggcctcccctccctgcccaggcccttgaggaggtgtgatcctgcctcctttaggttgagagtcccagaaagtagaaattacacctgcagctagaaatttagggccatgctgtgatcatggacagtttgtgtttttttgaatttgtgagagagttatcactctgacacccaggctggagtgtagtagtgtgatcatagctcactgcagcctcaaatacctgggctcaagtgatcctcctgcttcggcctcctgagtagctgggactacaggtgtgcacccccacctctggctaatttttaaaattttttgtagaggtgggggtctcgctatgttgcccaggctggtctggaactcctggcctcgagcgatcctcctgccttggcctcccaaagtgctgggattacaggtgcgagctgctgcacaagcgatcctcttgccttggcctcccaaagtgctgggattacaggtgygagctgctgcacaagcgatcctcttgccttggcctcccaaagtgctgggattacaggtgtgagccactgcacaagcgatcctcctgccttggcctcccaaagtgctgggattgcaggtgtgagccgctgcacctggccttatggacgcttgttgtagttgcctggtctttcatgtttacagtattttgactgaatggctcaaaagtgtcttgcctccccaatggctgagatgaagacctgtggcccttccaagcttctccctgttcttcgtgctacatgtgctgtgctggggacaggaatgaccaygacagggcccggtgtcttgcagactatgatgctgtgctgacagaagccggcgattacacggccaagtacatgaagcttcgagayttcttcggctccatctcaggtacccagcagacagcagactcaagttccaactcaggccctcgcttctgctctcagacccctaaagagttacttccttactgtcccacctcgaccccagttgatctgcrtgcaagaatatcctagacaaggacagggaggtgtgtgaggctgtttccatcttgcyggcttcacctgttacaggtgttaacgctccttatctcctgtggaggacgggagaacgccctggctttcccccaggcctggccttcctccctggcctcagcaggtgctgagagctagcctgttgttcctcttggtgctgggacgcaggagcacatcgggtctgtggatgggagccgggtggggaggacgagcaggcagygacatttgggtccgttgggggtgaccctgttttctgtgttgcaggcatccctctccctcccccacctgaccttcttcccaagatgccgtatgagcccttaacgccagtcttgtacctgtctctgtgggacgccctcaagtacctgggggaggtgagtgctgtgggcagtcatcgggaggtgagtgagtgccgggggcagtcgttggcagggaggtgagtgctgggggcagtcgtcggcgggaggtgagagtcgtcggggcagcagggcctggagcccctccagacagggagtgtggggggaggcaggccagtgcctggtggctctggggtctgctctccggccttggagctcagagggaagaggacagactcatgctggagngtgaagtgggagaaacagaggtccctgaggaacagcggctggccccgtgggcctttccttcctccagcctcagagaggagagtgaggggcagaggaacaggccgtcccctccccaagaagggggtgcctcctccggcggactgaggctgtgatgtgtgtcccctgcctgcggactgcactctgctggtgcacacccctttgccccactcctcttccccgtcaccctggagagttgtatgtttagtgcaatgagaagtcaaagtagaaaacacccaccaaacctccgcttccaccccatgtgccagcccccaggcagagtctgtctgtgaccccactcctcctgagcctgcccacccctccatctcttctgtacgcagccaatcaagtctgaaaagcccatcaacatggagaacctgccagtcaaygggggaaatggacagtccttcgggtacattctctatgagaccagcatcacctcrtctggcatcctcagtggccacgtgcatgatcgggggcaggtaggagcttctcttctaaattcctgtgaccttctggtgagcagctctgcartaggcgtctcatgccctcccctcagaatcagctcttaccartgtgtgacaatggcccttctgagtcagctctgtgagccttcagggggcattcatgtctgctctgcccactggcccctcgtctgcctacaggcacgcgtgctgcccttcttggcctggaggaggtcccgcttaccctcctcctgttggtcatggatgttcctgcctgttccctttggcaggtgtttgtgaacacagtatccataggattcttggactacaagacaacgaagattgctgtccccctgatccaggttcgttgtttttgggagctgggtgatggctagcccccgctgcttcgaggaagtctgggggcagtcactgaggaaaacctgggagacccgtggctccttacccacaagctgtaggtggagagggcgagtgtggctttctgcccagctgggatgtacactcccatccccagagcgtagggaagaactggggtccacaagcaaattctgaggggcagctgtggccttctgacagtcatygttagccccgtgttcccggcagggttacaccgtgctgaggatcttggtggagaatcgtgggcgagtcaactatggggagaatattgatgaccagcgcaaaggtgggtcccagaatgtgtcaaaagaagagtggccatgctggacacacaggtggctattgcttctctatgctagcaggccaccaggccatggaggcctcttgyagggaggtggaggctgggttgtcccatacatgaggccagttctgagtgggccagagaaactccgctgggctgtggcccctgtcctgttagcactgcacgcgtgcatcgtctgcgtgctcgtgataaacactgtgaacactgagctggcctcttgtctcccctgggctgcagtcggtttctgcaaggatgtctgcttgggggggcggcagtgaggagcaatgaatgtgatttccaggaatccaaggaaaggcacaagacccctgccttcttgggcctccacactgaagttctcttcttgatccatcttgggaaagcttatctcagatgttgggggaggaggatgcgggacatacagcaaacaaaacacctgttggtagcgtacccctctgggaataggccgccaatttgctttatgtttcctggcctactaaatcttttatgctttaatttagcccttccttttttttttgagacggagtctcgctctttcacccaggccggactgcagtggtgcaatctcggctcactgcatgctccacctcccgggttcatgccattctcctgcctcagcctcccgagtagctgggactacaggcgcccgccaccgtgcccaaatttagcccttcctttttaaaaaaaatctagctaaatgtgggtggtttcaggtaagttataaaaaaagaactcagaacaaaatgaatgmgactgtggtgagcagcaccggtgacctcccagctctctcacggtgtctgcgtttgtgacggaggaaacttgaagagctcttattggtccacatttcctccgagagccgtctggtggcctgccaggaaagccacgtggcccagacactggggcctggatcctggggatcagggcccttctagatgggcctcagagcggcatctagcaccacccaggcccacactcctttaccctagacagctccctctctgggcctgtcctcacttctgttgttctcctgggagttggaaggagcaccagcctgaccattgttcctaactttgcttccctgagcccttgttgagggtcccctgggcccacactgtggagtcctgtcctctggatcacagttcaatgtttataagtcacagacctcccttgagaaatgcgcgtgcccacatagacccgcacctgccatttcggagtctgtaggccctgcaaagcctctccacagtcctcggcctccaaattcccaagctagccactcagcagctctgtaatctgagactggcagggctggcccggccccgggacactgatgagtggctcctcaagaggacacatctcttccctgttggatgcccgagggagggtgccatctgctcacagtccaaacactcctaatgcacagctttaatcctaggtggcagagatgattctggctgagttattaggtctgtgtagcwtgggccccactgaaactggccctgcagctaggccagaaccctctcggtcatctggaacttccttcagagagaggccagaggttgttctcgccctgtaacacctcagctctatatccttcccatggcaaatcttagggtcttcctccttcccgtcccccacagaattgctagggagctttgcttgcaagcgaayggcttcccagggagcgtacacttcagtacccctcaccccagcttctcagggagcgtacacttcagcacccctcaccccagcttcccagggcttcccctcgtggccccggcccagctgactcggcccctgcctttgggctacccacgtgtcctgcctccctcccacaggcttaattggaaatctctatctgaatgattcacccctgaaaaacttcagaatctatagcctggatatgaagaagagcttctttcagaggtgggtccctgcccagcaccagccyttgcactcacaggtatagtgctgtgtggtggggcccaggggtccctggtgcaccgtggcctggcccgcacccaggtgtgaacgcctccaggggccagatcggctggccgaggtgaggggtggcacccgcactagaagccgcatttgcagactaggaattcccagcatcctaccktgctgccattctgtgtcctggttaagaggcggggggccttggatggggaaacggtgtcagggccttttattttgctttattgtgctggtggattgagaagggcctcctccctctccttctctgtgttctgtccttaggttcggcctggacaaatggagttccctcccagaaacacccacattacctgctttcttcttgggtagcttgtccatcagctccacsccttgtgacacctttctgaagctggaggttggtaacgcccttttccctgccagtttctcccacctgcctcccgccttggagggctctgagccaaagccacgagcytggcgagagtcgttggtggcttctgtgcccagagggtctgagagggccgctggggcctccctgggccagaggagtgggttcccagcagaagaancacctcatgcactagggggacaggaaatagagcatcccacctgcccaccctcatggctgtccagacacagctcgctttggtctcctggacctgagagaagcacncatgcatgtctccctccacttttgctgtggctctcgtggtagatgaacacccttcccctctgtttcaagggctgggagaagggggttgtattcatcaatggccagaaccttggacgttactggaacattggaccccagaagacgctttacctcccaggtccctggttgagcagcggaatcaaccaggtgggagcttccagccccntcctgttccccatgacgccctgcccacctgccgtcccagggagccttcggtcagggtggaggggcgtgtcagcgggttcttcctccctcctcctcgctgcagacgagttgttggtccctgtcccttccagcctggttcccaaaccctttccttctgaccctgccacctctcagcacctcccctggctccaggacagacgtcagctgccctcccagccgggccctctctccacaggtcatcgtttttgaggagacgatggmgggccctgcattacagttcacggaaaccccccacctgggcaggaaccagtacattaagtgagcggtggcaccccctcctgctggtgccagtgggagactgccgcctcctcttgacctgaagcctggtggctgctgccccacccctcactgcaaaagcatctccttaagtagcaacctcagggactgggggctacagtctgcccctgtctcagctcaaaaccctaagcctgcagggaaaggtgggatggctctgggcctggctttgttgatgatggctttcctacagccctgctcttgtgccgaggctgtcgggctgtctctagggtgggagcagctaatcagatcgcccagcctttggccctcagaaaaagtgctgaaacgtgcccttgcactggacgtcacagccctgcgagcatctgctggactcaggcgtgctctttgctggttcctgggaggcttggccacatccctcatggccccattttatccccgaaatcctgggtgtgtcaccagtgtagagggtggggaaggggtgtctcacctgagctgactttgttcttccttcacaaccttctgagccttctttgggattctggaaggaactcggcgtgagaaacatgtgacttcccctttcccttcccactcgctgcttcccacagggtgacaggctgggctggagaaacagaaatcctcaccctgcgtcttcccaagttagcaggtgtctctggtgttcagtgaggaggacatgtgagtcctggcagaagccatggcccatgtctgcacatccagggaggaggacagaaggcccagctcacatgtgagtcctggcagaagccatggcccatgtctgcacatccaggggaggaggacagaaggcccagctcacatgtgagtcctggcagaagccatggcccatgtctgcacatccagggaggaggacagaaggcccagctcagtggcccccgccccccaccccccacgcccgaacagcaggggcagagcagccctccttcgaagtgtgtccaagtccgcatttgagccttgttytggggcccagcccaacacctggcttgggctcactgtcctgagttgcagtaaagctataaccttgaatcacaccccctctggtgatagtctctggtcatgtgtgccactcttgccagaagggaaggctgtctgagagcttggttttcttggtcaggttcccattgggccccacttgccgcctgggggtccagatggggaccgtccctggggtgggtgggccatgatcctggcctcatattcccctcctgaccccgacttcccttcaaatgtctctggattggaagtgccctggagaggacagttcaaatgcaaattcattctcatgctggtgggcgggggtaagaatctgccaggcagtcaagggcgctccatatgagttaactgcggggttgagttttgcttcacaaactacatctggcatctactgccaaaaccaaattatctccagtaagagtcagaaagtcaagtagcacacacatccccggcacagcgagagctctgggagccccgtgaaggtgggctgggggatggtgagccgtggagctcactgaggccagcaggcttgctgcccgtgtgtggctgcccagggggagtgcaggggacattcgtggtgtgcagcccagcagctgagccgggtcaagggcttattaaatggagcttattaaaggaaagcttgtggacagtggcttgggaacaacatggggcagagtccctggttttgcccaaactcaccagttcttctggaactgccttggaacgacaagcatggggctaagatgtggatgagactcgggctacttgggtgtggcctgagccacctgcagggtcttctgccccgctttacctgagtgtgtgcttctgcagagctgtgtatgagctggttccgtcagaaagtgatggaatggaagggaaccttcctgcaaatcctcctgtaaggtggagaagccccttggatcacacttccacgcagacctgagcaggacacactgtggtttcctaaggtgaggtcttcctacaccagcttcttattctcacccttcttttctgccagttaattgctcagcttctctatcaaagtacctcttggcagagcttattctccagcgttgactaaagatgtttccattatcttccacacggtatggcctcatctaggtctctttggaggatccctcttcatatccagcctctgaatgctgggggtctctggcccactccttgggctgtttctttcctctgtccacactcactgcatagggtctcacccgtgcacctgtggtttgtaaacaggttggacacccgcgcccgccgatgctgggctgcacctgagctccaggtgtgtgggggcgcattttcttctgcatgtgtctaacaggcacctgacacagagctccatttccccacattacccctcctgcacgcagccctgtatctggaaatggcagtgctgttctgtgtctcgggctattttggacccctctctttatctcccacatccaatccagcagcagatcctcctggctctgcctcctaaacttggccaaaatttgactgcttctctctgccccaaccccatgcccccactcagcccactgcatcttggcctggatgattccaggagccacgtctccacctgcccttgccctctccatttatcctccgtggaggagcagggcagttcttcttagagatggatagattatgttagtcctccgtactggaccccctattgccttctggtttcacccggtgcctggggactcccttctcccacgcccaccacatccctcactgctgttgcccccagcagcccccgccccgtcagttgagcccgatggccttcctgctgatctgtaagcaggctgagcaacgcttgttccgcctggtggagagttcgttcttcttgggcccggggagctgcatgtcagggtgttgctgcttcgctcaagggtcacttatcacggaggcctctgtggtcaccctacagagcactgaccctctccactgctacctctgtctccccgactcaccctcatcctccatacaacagattgcatctgaaataatatgcattcgttattgcctgtctcctctcgtcagtgggtcagttctttgaaaatgagagccttgttttctcactgctgtgtgtcggctcctagaatgatgcctgttcataacaggcacctgatacatacttgttgggtagctaaattaataaatgagaacaaaataaggcagggctgaagaggattaggactgttaaaaactgtatttgacttttaattttgaaagcaaattaaatacagttaaattaaaacagaccagatgcagctgcctgggtgccaccctcaccccagcctctgttcttagaactcctagcccctggcctcactcctgtgtggtggggcttgccagcgagggagcagggaacagactgggtttggaaaacagtggtcatcatggacccatttctgatttataacaaactcattcccaataaagatgaaggctgcagtccaccagggttataattataaataaatatacatgcagctaaaagaggatattaggtgaaaacaactgacctagcatctgcccaaagaagtccccattttgttgttcattatcaaagtcctgaaaatgaaccctaggtttttggctaagaaggtggcctcagaccagccaagctgaccttggcacttggctggcttctgtgaggcagtagagtgcccacacataagctcaccacctgtgcccacctcctcccttctctcccatgccaccccacttgcttccaagggcttggtttccaaagtgacatccagggtgtaagaggttggggaaaacgtcctgcaaggtggctcagggatctgattccatcagatggtctcatgaatactgtgggagattaaatccatctcaaaataggcaaccaatgctatattctgaatgttaggtctctggactgagtcccacccacccacccactcaggagtgggttctgaatggccctcagacctctcctggtgagtcttaatggggtgggaggctgttagttaaaaaataaacacctcttcagtaggctggggccctttccttttcctccacttggggggaaaattgtgcttccaacttgcaggagaatgagccggatcaccactagagagcccggccgggccagggggtcagagccctttccagcgggccccagaggcctggggagggcaggagtttgaggcacactgttctttctccaggatggaaagtggacagctggacatgaggtgggctagctctgcatgctcctgacttagggagaaataacattttctttcccttttttgtgtttagaataatttccaaagcagtgtgctcaggcctccctcctgctcagtgtcccagcagcccctgccccctctttcccagcccctctgctactccagagtccctcctcctcagaccaggggcaggagggagttagggaatggccttggcctccctcctctttccaggctgcaggaggtcccaccttgcccaccacccaccgccttgcccactgcccaccatgggctcactccaccctgaggtctgtggctctgaagagctgcaggaaaaggcgctttccctccccagtccagtccaggcgaggggcctagcagccgaggtgggcggtggggaggcagtgtgtggacagtggggccgtggggttcttagtccaggtcaggcagtgacctgtgctggctctagagcctacccctttgccactgctggaggagaaggggtaaaggaagaggggccggagggggggactctgctcccgccacagcctgaggtacagggggtgcctattaggcccaggctccccccatgcagggctgggtgcctgttgggatccaagacagccttatgctctgtaaacgtgaaccagaggagagccacagaggtatgtctgatttgggggcagctctcgggaagagcaggggcccaggagaggagcagagcgctcgtgatgcccgtgggctgctctctggtcttcagaattccctggctgggtgtcctgtgtggtcgtgctgagcccagggacagggagccagggagggccatgctccacttgactgcggggtcttcttatctccctcccgccctgcatcactgcagggccagtgtgggcgcccactgcacctgctcctgcagccccgtcagtgcggggagctctggggaggtgcgctggagcaccagcttggctggtgctggacaccccaccctggccatcaggtctctcgggccctggtcacgctggatggagagaacaacaggtctgggatttctgtgcttaaattctctgtcctttgttctggcatcaggctgggctctctcagaagcccccagaatagaaaggagggtgatggtgattccttaggagtcggccttggagggaccatcagccgtggggagaggatggaaggccaagaacagggtctgaggaggaggctcctgtgaggggagaggaggaatgagtgaggtgtcggctgagggtggggccggggagggaatggccaggcagggccaccaggacctctgcaaagcccaggcccccaggtcctgtgggggcctttctgaggggcaggtggggaaggtgcttccagtgagggcagtgagggcaggaggcataagtgaggctcggtacagatgcattctaagtggcgctggccaaggtgactgagtgacaccctgtggtcctctgcgggcaaacacaatacagaagctattgcttagctccagggcaagaggacaaatgtctgtctcaggcctcaacctctgtttggcataacctagagtagggagtcaggagtaccagctgcttttaagagacaggataagatcacagaaaagcccctgaaaatgcctggctttgccaaccacccagcacaattcactcgtgccagtgtgtcaccttggaacattcatttagcttctctcaacatcatttctttgcttctgaagtgtaggtggatcctgtggcctacttccagagagggctttaaagacttgaataaaaatagccacactgatgagatttaagtgccatgaactgttctaggtgctctcagcaacctacttcacagatgaagaaactgaggcccagaaaagtcaagtcaggtcaaacagtgaagagcaggggtcctgggagctgaggtgggctctgggtccgtgctgtcactctgcgctacctctcactatgacagccgtgggctcattgctgtggagcagcgagtccgtgagtcctcaccatggccacgtggtgaaggaatccacaggggaagaggcagacttggggggacagacgctggccagcgagagtctgaatggcagtgccttgtggggtgcaggcgtcactgccagcagaaaaatcagcaagatgtttggaaggtgacaccctctgaagagtctggtggcagaaggacccagctgcgtgggtgaaagttaatgcctggatactttcaggtggcccagtgggaaggggactgtggtgacgacgccctccactcctgcccacatctgccctgtcctccacagtgaaagcccaagaggaaaagaatgagacagttgattcggcccaacctggtgccgccctgcccagtgtgtggcccaccctcgtcatgcccatacctgcatcctgaggctcagatctccaccgaggggtcagtgaagcccttcttgccctcattcaccagcactggcttctctgtccgtgtgtgccacaccaggatctgtgtgcccagagatgcaaaacatggtgggacaggcccctgacctcactctgctgcctccctgctccctcccacactgtgtaaacatttctcctgcccctccttttccttcgagagtttttcaattgttccatcaagattttctcaattgttttttatttattttctgtggctctcgactaccccctcatttttgctgtttttacatgtgatgccttcggaatacctgctggaa

SEQ ID NO: 94117 - DNA, 13433 bp, Homo sapiens
ccatttggcctatgtgtctgtttttgtaccactatcatgttgttttggttaatgtagccttgtaatatagtttgaagttgggtagtatgatgcctccagtatttttctttttgcttagtattgcttttgctatttgggctctttcttgatttcaaatgaagtttagaatattttttctaattctgtgaaaaacaatattggtagtttgataggaatagcattgaacgtgtagattgctttggagagtatggtcattttaacaatataaattcttccaatccatgagcatgggtttttttccccatttatttgtatcctctatgatttctttcttcagtattttgtagttttcctcaaagaaatcattcactgctttggttacgtggattccaacatactttattctttttgtggctattgtgaatcggattgtattattgatttggcattcagcttcaatgttattggtatatagaaatactactgatttgtacattgattttgtatcctgaaactttactgaagtttttatcagctctacaagccttttggcaaagtcattaaggttttctaggtatagaatcgtattgtcagcaaggagataatttgacttcctcttttcctattttgttgctttttatttctttctcttgcctgattgttctgactaggatttccagcactatgttgaataggaatggtgagagttggcatccttggcctgttccagttcttaagtgtaacacttccagcttttgccaattcagtataatgttggctgtgggtttgtcatagtgggctcttattatcttgaggtatgtttcttccatgcctagtatgttgaggatttttttcatgaagggatgttggattttatcaaaacattttttctgcattcattgagatgattaaatggttttgtttttaattgtttatgcggcaagtcatgtttattgatttgcatatgttgaaccaaccttgcgtactggtagtgaagcctgcatgatagtggtgaattagctttttgatgtgctgctggattccatctgctagtattttattgagaaattttgcatctatgttcatcagggatatttgtctgtaattttctcttttgttgttgtgtctttactagattttggtatcagagtgatgctggcttcgtagaatgagttagggaggagtcctcttccccatttttaaaaaatatttcagtaggattggtaccagcttttctttgtacatctggtagaatttggctatgaatccacctgtttcagggccctttttatttggtaggtttgtttttcaatttcagaactctatattgatctctccagggttttgatttcttcctggctcaatcttggggtgttgtgaccttccaggaatttattcatttcctctagagtttctagtttgtgtgcatagtggtgttcataatagtctctgaggattttttatatatccgtgggattggttgttatttcacttttgccatttctgattgcacttatttagatcttctctttctttgttgttaatttagctggtgtcctattgatctggttgacaagaaccagctttcggttattactttgcatgtatttttgagtctcaatttcattcagttctctaatgaattttggttatttattgtcttctagctttgggactagttcttgtttttctagttctctaggtgtgatgttagattgttaatttgagatctttctaattttttgatgtaggtatttagtgatgtaagctttcctaacactgctttagctgtattccagagattttaaaatattgtgtctccatgcacacgtatgtttatagcagcactactcacaatagcaaagacttggaaccaacccaaatgtccatcagtgatagactggattaagaaaatgtggcatttatatacaaaggaatactatgcagccataaaaaatgatgagttcatgtcctttgtagggacatggatgaagctggaaaccatcattctcagcaaactattgcaaggacaaaaaaaccaaacaccacatgttctcactcataggtgggaattgaacaatgagaacacttggacacagcaaggggaacatcacacaccggggcctgtcgtggggtgggcggaggaggcagggatagcattaggagatatacctaatgtaaatgacgagttaatgggtgcagcacaccaacatggcacatgtatacatatgtagcaaacttgcacgttgtgcacatgtaccctagaacttaaagtataataaaatatgtatataaaaaagtaaaaataaaaaataaaatattgtatctctgtttttatttattttaaataattttctaaatttttgccttaattttattgtttacccaaaagttactcagaataaagttatttaatttccatgtaattttgtggttttgagagaacttaccggtattgatttgtatttttattccaccatggcccaaagtatagtttgtatgattttgaattttttaactttattgagacttgcctgatgtccaagcatgtggtcaatcttagcatatgttccatatgcaaatgagaagaatgtatatcctatggttgctgggtggagtgttctgtagatgtctattatgtccaattggtcaaatgtcgaatttaactccaggatttctttgttagttttctgccttgatgatctaactctgtcaatgggatgttgaagtcacccactcccatggtgtggctaagtatttttgtaggtctagcagtacttgttttatgaatctaggtgctccaattttakttgcatatatattcaggatagttaagccatgtggttggatcaaaccctttatcattgcatagagcccttctttatccttttttgactactgttgttttaaagtctattttatctgaaataataattgtaacccctgctcttttttgtcttctgtttgggtgatagatctttctcctaccctttaccttgagtctatcagtgtcatcacgtgtaagatgggtctcttgaagacagcagatgggtgagtcttgttttttatccaacttgccactctgtgcctttgaagtagggtgttaagaccattcacattcaaggttaatattaatatgtgagattttgatcatatcgtaaagttgttagctggttgctttgtagtttctattgtgtggttgccatatagggtctgtggactatgtagttaagtgtgtttttgtagtagcagttattattctttccatgtttagaaatccattatggatctcttgtaaggctggtttagtggtaatgacttcccttagctattgcttatctgaaaaatattttagttcttgttaacttatgaagcttggtttggtgttgtatgaaattcttggttggagtctcttccttaaaaaatgctgaatgtaagtcccccataagatttctgctgagaaggcccccaataagtttataatgtttcctctgtttgctgttagcctgatgggattccctttgtatgggatctaacctttttttctagctgcctttaaagttttttctttagcattgaccttgggcattctggtcactatataccttggtgatgtttattttatataggatctggcaggtcttctctggatttattatatctgtatgtctacttccctagcaagataaaggaaaatttctcaaattattccctcaaatatgttttccatgttttttactttttctttttctctctcattaatgccagtcattcacaggttttgccattttacacaacccatgtgtcttggagactttgtgccaagaattttaagaatttttaaatttcttttttctttgtttttgtctgactgggtaagtttgaaagaccaatcttcaaactctgaaattctttcttctgtttggtctagtctattgggaaagcattcaattgtattttgaaattccttaagtgagttttatagttttcattgctctgaatgatttctttttaagatgtttgcatcttcttttatttcctggattgctttacaggtttctttgtactgatttttaaccttattttggatctcattgagtttccctgtaatccatactttgaattcctcctctgtcatcctcctgcctccattttggttaagaaccattgctggaaacctagagtcagcctttgatgatgtcattccattcagatttttaatggtggcagaattcttgtgctggttccttctcatctggagagtgttgtactaggtagggtctttggggttgtttctatagtcctatgcacttctgtcagcaggttttgtgttgggctgtgtggtttgacctatgactcaggatatggcatttgcaggtaagagtcagctgccacacaagtaggtgggaggggagctgacctttatttactgtgaggtgctctctgttgtttcaggtgaaggactggacagtggggtgggtgtccagtgttctgagcttcctaatttgtgagggtggtgggatatacctgggcagagctggaaacgtggctttcccacgaatatctcaatgacaggtgcaggcaccagccctgatgggtgtggctaggagaagctcctgataaaatgtgctgaggtcttcgtgagccccctcacttccttggtgaatcttgacatgctctcttagagaattcacctgaagagctactatttacttgccactttctttcctctctttgagagtagcatactctagctgcttccagtcagccatcttgaacctccataaccattttgaagatgcaaattgtggtagcagctgcagtcaagagatattaaaaataagttatggccgggtgcggtggctcacgcctgtaatcccagcatgttgggaggctgaggcagacagatcacaaggtcaggagatagagaccatcctggccaacatggtgaaacacatctctactaaaaattcaaaaattagctgggtgtggtggtgcgcggtcctgtagtcccagctactcaggaggctgaggcaggagaatcacttgaacccgggaggcagaggctgcagtgagctgagattgcaccactgcactctaggctggtgacagagtgagactccatctcaacaaaaaaaagggattcatttattcattatcttttctttagaattaagtttaagttttaaatacagtataagaaatagctttggaaataactaagggttctaccctaattaaaatacatataatttaactgggtatgatggcacatgccagcagtcctagctcctcagtatgctgaggtgggaggatgagcccaggagcctgaggctgtagtgaaccatgatcacacctgtgaatcaccacggcactccagcctgggcaacatagcaagactgtctttaaacaaacaaaacaaaatacacatcagtatatgagtgttgacgagtcacttggtaatgagtctcatatttctgcatttttctttttcatctgtgagttctagaaagaagtaggaaaaaccactatatcaaacagcctctttggactttattctaaaccacgtaaaatctcaccagatttctttgtgtgtctcagtaattgatcttagaaattatatctggaggtgcaggttgaggtatccaaagaggaaagagtggcaatattttgggagtttccagtcaacaataaaggaccaagagtgtccagcacaggagtggcctcagtgattgaagtaagtgaattcagctataattgaagctggtaagagggccttttaaaaattaaaagttgatacagtacaagaaagtaagttactgctgcttaccattcagagacttacgggtgcttgcctgcattataataaaagaacttaattattgagcaagacctatatttatctcttcactttggacagcctaataaactattattacagtttctctattgactttcaaacgttttgaagtttgaaagacacctttgcaattaacacagcatgagcacaaccagaacagagaacgctgttataatgggtctgtccagtcaaaatggtcagctgaggggtcccctgaaacccagtggtggccctagaggagaggccacacagacacagcaacagacgaaccagctgaaaaacaccaacacaataatagcactcaaccacaagcgcagagtatgaccaccactattaagcctggtgataattggaagaagactttaaaactccttccaaaggatctaagaatcaaaatgttggatgtgacctctacaagaggatattaatttgaagattactgtttgaaacggcagttactgatgagaatttttgaaatgggatggaaaaagccatctcctttccaagaagagagcattcccattgctttatctggtagggatatcttagctagagcaaaaaatggaacaggcaagagcagtgcccatgacattcccctacttaaaaggctagacctgaagaaggacactatacaaacaatagtgattgttcccacaggaggacctgctctacaggtcagtcaaatttgcatccaggtcagcaaacacatgggaggagtcaaagtggtgatgaccacaggaggaaccaattcaggagatgacgtactgaggctggatgatacagtgcacatggtgattgctgcccctgggagaatcctgaatcttattaagaaaggagtagcaaaggtcagtcatgtccaggtgatagtattggatgaggcagataagtttctgtcccaggattttgggcagttaatggaagatattattctcatgctacctgaagacaggcagattttactacattctgctactttccctcttagtatacagaagttcatgaattcccatttgcagaaaccctgagactaacctgatggaaaaactaactctgaaggacataacccagtactacgcatatgtaactgagcaccaaaaagtacacggcctcaccacacttttctccaggcttcagctaaaccagatgatcattttctttaactgctctcagcgagttgaatggccagccaaaatttctcaactgggttatttttgtttctacattcatgctaaaatgaggcaggaacatcaaaattgtgtattttattatttctgaaatggcttattctcatttgcactgatctgtttacttgaggtattgatatacaagctgtgaatgtggtaataaactttgacttttcaaagmtagaagagacctatctccgtcatattggaagaccaggtcactttggccattttggcttagccatcaacttgatcacatatggcgatcacttcaacctgaaaggtattgaggagcagctgggaaaagaaataaaacctattccaagcaacattgacaagagcctgcatgtggcagaattccacagcaaggctgtagaaaatgagaagccttaataagcactctttgacaaactgtggaagccttgtttggatctatgacataccattttttagagaggagtgctcttctctttgtgagtttttcatcttttatttcagaactatgaagacttaaaagagttcagaattttttttttccttttttaactggtgaagagaaaaaagctgaaaagaaggaatattcctttttttttgttccatctgtttgcactgtatgctaagtgaacattagttgcactaactgctggttttaaaaaaatgttttctggggaaaggggacaggaaaggaaaagaaagaaggggagaaaccctaaaaagagaagaatcttaatgaacacaaaagcttgtctattatttcaaaattctccaacatctgactctcgaggacatttcaacttctccctagtcatccattttttttttaagcctgaggagcttattactcatttgtgtgaagtgctgtatgctctgagttattcagaatatcatcttttagacacagaccaaagaatcaacagtagtactctttctttcctttattctttaaaaaatttttgtcttttaattttggttttagggtgaagtctctgttttctttctacccaatactgaagcccagagctggtagatgaaacttattagtcagttaaataccattttctttttctttatattggaggagttgatatgcagctgcagttcatccacactgtaaacacatgtattaaaaaaatcccaacagggcatggtggctcacgcctgtaatcccagcactttgggaggccgaggcagatagattatctgaggtcaggatcttgagaccagcctgaccaacacagtgaaaccctgtctttactaagaatacaaaaaaattagccaggcgtggtggcaggtgcctgtaatcccagctacttgggaggctggggcaagagaattgcttgaacctgggaggcggaaattgcggtgaactgagatcgtgccattgcactccagcctgggcaacagagcaagactccgtctcaaaataataataattccaagtaaaaatttattctggtctgagtagataaaacatcaatgctcccaaaggaaaagcagtctatcattggaggagccttatgacaagcctttgtgctctatagcaaacactaaagactggtttacatacgtctccagtaacaatatggcacttgacttgtagacatgtcagaaccttgaccctatttcttttgtggcagagtgtgttgcgttgaaaattgagtgtgtatacttttatcaaccttgtaaataagtgtatatgtatatatacatatatatgataaaggttgatgggattaaggggattagagtgattatgggagcagctaaagatgaaggggctcagtttactcagcactaaattctagaaagcactttggcctcttgctgtagagagcaggtttctatggtacccttggttaggaaagggacacagaaatctgggatgtcctgtttgctcccacgctgtctcatctagtacccctggaggaggcttaccagagagagcaacgaagcgtcaaaaattgataattcaagattttttttttttgagaagctcttttattttgcttcttcaccctttctaaaagtttaaggaatttttcaagctctccaaaagagggcaaagattaatctaccatgcatctaccttgcagtgtggggattctgttgagtggtagtattgttgagcagtacatgcataaagcacagattcgcatttcatagtattagccagtaccagctttggtgatgttaggagttctggagcttaattttctatggatcatctgtagtgtgtaaatgtattgccttctgcccaccttgatacataaacttttgcaggaatggacaacccctgagaactgtttaactttcataccacacaaagctgcttgccattctcttgtgttatgacaataattgttatctgtcattttgtactgtaaattcctggcaaatgctttacagtcaataatgttgctttaaattgttgccctcccaacatgcttgatgtttggcctaatctccaggccaaaagactgagatgaatcaaaaccagtgaacttttttttaatgtttttgaattcccttttaacccagtgtactaggtcaatcagaaggcatctgggaggagaaaaaaaagcaaaaaataatttttaaaaaattgattcccatattgcattgatttttaaaaacctaaaatatacacgtttgtatttaactcatatggacaaagggattaattatttgaagttgcttttttgactctgcccacttctattttttttcccaagacagagtctcactgtgtcacccaggctggaatgcaatggcatgatcttggctcagtgcaacctccgcctcccgggttcaagagattctccctgtctcagtctcccaagtagctgggattacaggtgcccacctgtaatacaccaggtgtatgtgactcacccacaattccttggagatcaaaatcctacagatgcctcctgatcagacacagccctaactcttcaacaactgtggcaagagctgcacagtacaaacccaaaaaagagcaatctcatttatttggaatccaagtcacgtatgttctgtccagtcaatgttggttactaaatacaaaccttaattcaggaagtaacctttttttttttttgcatgaagcgctgggagagggaatttaaacggtatcaacttttgaccaaaaagtcttgttcttgtactgacgcagcattctttctcctacacctcctgcaagagggatcattaatatagaagaaatgcaaggaaagagtgtaaatgtaattctgtatctcgctaaaaaacatgtgagtgaccaatcaaaagttcagtcttcttttccagtcttacactgctctgcctggtgctgagttcctgtgggtccctcttaaagtacagacttaaaattggaagtattgctgaagtataacatctaatgacgagtggcacttaaactatctgggacaccactattggacacagtgttacagaggcagctgtccagcttgttgcttggttcttgaatataaatcatgaaatggaaatatgctctaaggacttggtcaaagcctggtctttttttttgtccctcatattaaggaggattgttactactggaaagtgttttcagattatttccaatattggaatgtattttttaaagtaatggtaatattttttccagtggttcatttggatgataactagttcctatttttaatattaaaactatattcaactcatggtttagcctttggttgcatcgttgtgtaatgggttatggactgtcacacaccttcccacctctgggcctgtgtgttttctctccccgtatgttctgacgggatggaaacttttttgtctttcccttaggaaaggaataaagttattctaaaatgatcttttactgaagtaagggagagggaaacctaaatatacctctaaattatttcaagttggtcccagtatcataagatgggttggcctgaaatggtaagagggtggggttggttatcagtatttgttttcagaatgaggcgggagtgtctttcgtttgccacgtgctttgtgcttgacaccttcatgcttgattagaacaagacaactcagcataaagccttgagtgtaaattgttaagagtcaaaatatctcattctgataacttagtttaactgttttctttttaatagggatgggagaaaccgtactttgcccccaaagggagagtgtctgcactaaaaatgtagaaactctttggaagctcataaccttatcagacactgcctttaccacactcctgaccttctagattagtaacaaaagagatgaaataagttcttgggaattaagctatattatcttaatttgagaatttttttcaatgttctaggtatctttaaatgtgttattgtggaattattttcttgccaaataccttcgtcaagcaaaaattactggtctcatgagagctgaagtaactcagctctttggcgaacttcagtggactttggtgagctcatagctctactttacgtctttaaaaacagttttttttaaaactctcaaatctactctcagatacttttaaacatattgtttccttagaagattcaggactttttttattttacgtctttcatactggaagtctggactatatgataaaaatatttcaatttcgtactcttctaacacctggaatttggagcccttaaaattttcatatagaagggaaatagtttagtaagttatggggttttgtcatccttagcattggttctcaaattttagcagacatttgagttgcctgaagatcttgttaaaacataaggacctaagtctaagcctcaaactcatgaattctgattcagtaggtctggaatggcactcatgaatttgaatgcctaacaagcacccaggtactgctgctgctagtccaagagccaaacttggagaatcaatgcactctaaatcacatatttccaaaaaagaaacaggaacatttaaccctttaaaaattaatggatctctaatgccagacctcctggaaaactagaagtcagtacttaacatttttttatgctacaaatttgagcctttgtgtcaaaattagatttagaacagctattttggtcataaattatgatctctaacaatcagaaatatctactgaaatattcaaaaacaaatctagcaacaatatctgcaaatctcatatgatagctaaatccattaatatgtatattaaaatttttgcaacaactttgtaagtacttagaaataaaggtaagtccataatgttgttttatattttggagttgtctcaccatcttgtatacacattttagtatttttaataataatataattgttacaaaaattcctctgaagctatgtggatatacattatttttttaaaggctacatagcattctgctcagataacaattcacaatttgcagaaaaattttctttatttatttaacaaatatttattgattgcctattgtataccagtcacttttccagtttttcattattataagcagcattagtcaatgttttctgtaatcattatcacattcaacaaaccaggttaaatagctctattaatattttttcttaattatgaataacataacaactaagtgatagcataagcgtatttataaatattgcattttctgcagttggttttttccttaaaattaaagaatataagattattcagtttaagtttatttctaaaactgtatgcatttaaatattgataaattcctctctaaaattattgtaaaatattatattgcttccagtattgttctccctcagtctagccaacatgaggaatttatcatttgttattttttatacttaataatagaaggcatactgtatcatatataagtacataacaactacagtcagattgcttgggtttaattctagtgctaccatttatcctttgtgaggtgactttagtcgcttaatctttctgcatctgtaaaatgagcatattgaataaataattctgtaaagtgcttagcagagtgactcaaaaatggacacttaatggtgctacatattatgtccattaatgttttgtttaaaattttattacaaagaaatcatagacaagacaaacaaatgggaacacatcctatgctcatggatgggtagaatcaatattttgaaaatgaccatactgccaaaagcaatctacagattcaatgcaattcccatcaaaatacccccaccattcttcacagaattagaaaaacaattttaaaattgatatggaacctaaaaagagcctgcatattcaaagcaagactcagcaaacagaacaaatctggaggcatcacattatccaacttcaaactatactgtaaggccatagtcaccaaaacagcacagtactggtc

SEQ ID NO: 94118 - DNA, 24725 bp, Homo sapiens
gggggccaggcgtggtagctcacacctgtaatcccagcactttgggaggtccgaggtaggcagatcacgaggtcaggagatcaagaccatcctgtctaacgagacggtgaaatcccgtctctactaaaaatacaaaaaattagccaggcgtgtggtggtaggtgcctgcagttccagctactcaggaagctgaggcagaatggccagaatccaggaggcaaagcttacagtgagctgagatcacgccactacactccagcctgggcgacagagcaagactccctctcaaaaacacctttaggatctaattagcaaacggacaaccaccacgtgtggtcaacttccttctgatctcttctgtgcatggttttgtatttaatgacctaaaactaggagacaggcttaacatgtataatcataagaacacttggtttcttcagaaaacttgatggaggcataatccatccaataaatggttctcactgacctttctagcatcagtaagtgatttttttcagatgaggctgctgagcccagcctgggacagtttctcacctttaggactctgatattatcgcaggagttggattcatgggccaaaatgtagaaccacctaccctgaggcttcacaccagtcaggagccttgaaggcatcatcacctgagctccaactcctggcatgtaataggtcttcaaggaatactggtgaataactggccattgcttgtgtatgaacatctggttgtctaccaagacctgaatgctagaaacggggatggctgagccatttcagctccagccctcctggaactcacagccttgcatctgatatgaggaatgagctggtaccttgaccatcaaatgtgaccggcaccaggttacttcagtggctggtccatcccttctttctctcctagaagacaactccagtacctttgagttggtgctggggcccgaccagcacgcctataccttggccctcctcgggaaccacttgaaggagactttctacgttgaagctatagcattcccatctgccgaattctcaggcctcatctcctactctgtgtccctggtggaggagtctcaagacccggtatgtccccataatagatgggtccttagactaggatgctccggtgggggaaaagccatctcccacagttgggcagagctcgaggtttgctgggggagagctgcagaaggcaagtggggcccagctgggggccggactgaacggccggaaccctggggtaagaggggagcgagtaaatgtggaagcaggttgctaacaggaccttgtcttgttgcagtcaattccagagactgtgctgtacaaagacacggtggtgttccgggtggctccctgtgtcttcattccctgtacccaggtgcctctggaggtttacctgtgcaggtgagagaccatcaggctgactgtgccaggcggttctcataactggcaccctcttctttctatatgcagggcagggtgggtgaagatgactaggacctcccaccaggagagttgaaacccttctgtctgagctgtctggacctgccccaagacagtccaatacatgcctgaatattcccaaagatgggcatggaacagtgaatgagacagtccccccattatgtgagggccaaacggcatggttttaaacagtaccaagtgctctaaagcagggtgaagatggagaggtcaggatgagaacctgtcccagggatgatgaagctcctacggagccagagaacaggtgtgagcccaggaaggggcggtgtggggatgggtgaaaagagcagagccctgtgggccctgggtgttagggtgaggtagctggggccatacctactctaaatacagtggtgaaagctttctgtcacctggatgcctgcaggaagatggtactgctcgcccactgccacttaggggccctggttcctttcagtcttgttatgctttcccctggggtggctgcctcctctctggaggctgagtgcacacatcctaggtccaggcccgggccccaggagggagaaagagccaagatttggacactgcaacctatggttgctgctagtggtctggaagtctcctgaaccacttctcacatgccaaaatcctgaacacgcacggggccacgtccggcttcagggaatccaggagcagtctctagctatgtagccacatgcctagggagaaaaggagataggatcctgaaggcagaaccagtgggaagccaagggttctgtctgcatgatcactctggccacatggaaagtcaggtacagataaaaggtggaagaccagtctagacacagcatggctcaagccagggtggcaggagcagcctttagttgggattggtccgcaggtaggacacccccgccccactcgctccacaccggccgcctccagattactaccaccacgttgccctttattgcaaattccttaggtgaaggcttttttgtttttttaaggtaggaggcaaaggataatgctgatggaatgctctagcagggatgggaaacactaataggaaaaggtggccagtgtggtggctcacacctataatcccagcactttgggaggccgaggcaggaggatcacctgagggtcggaagttcgagaccagcctggccaacatggtaaaaccccgtctccactaaaaatacaaaaattagccagatgtggtagtgcatgcctgtagtcccagctactcagtgaagctgaggcaggagaatcacttgaacccaggagacagaggttgcagtgagctgaaatagccccactgcactgcagcctgggaaacaagagcgaaactgtctcaaaaacaaaaaataaaattgctgggtgtggtggctcatgcctgtaatcccagcactttgggaggctgaggcgggcggatcacctgaggtcaggagttcaagaccagcctggccaacatggtaaaaccccgtctctactaaaaatacaaaaaacaattagccaggcatggtggtgcaccccagtaatcccagctactcgggaggctgaggcaggagaatctcttgaacccagaaggcggaggttgcagtgagccaagattgcaccactgtactccagcctgggtgacagataagattccatctcaaaaaaaaaaaaagacttctacccctcttccaggctccgtgggtgtagaagccagacagcttttccagggcagggctcctggggagtgtggtcctcagaggaatagcaggcttcaggatgagaaggtaaaatctcagaaagtctgatgggattctgctgatggcagatacaaaagacataaagcagagagatgtggtatctcgagtatttgaagacgggtttctcactcacaggaggcatctacttgttcttcaaagaaacccaagtcttccatacagtgtgatattcaggcatggtttgaccccatatagctgcatatgacctgcaagactgagccgacacacccttcccccagtaagcgtcagactgttctagaccttgtcaggctggtagctccctgtggctttgcatagacccaagaaataggttctttggagcagtagcatagatactatgaatgtgctatgccagtagttacattgctgtattctattagtagcaacatgagctttggacctgaagccggactacagtcccaatttcaatatctcccaatattagggccttgctgacctccaacttttgaggacctgtttgttccgtttgtttaagataatttattattttttctttttgagatggagtctcgctccgttgcccagactggagtgtagtggtgtgatcttggctcactgcagcctccacctccagggttccagcaattctcctgcctcagcctcccgagaagctgggattacaggcatgtactgccacgcccagctaatttctgtatttctagtagagatggggtttcaccatgttggccaggatggtctcaaactcccagtcttaggtgatccgcccgcctcagcctcccaaagtgctgggattacaggcgtgcgccactgcgtccggccagatgagtggtcttaacatcagcctcacacactgctgtttcccttcaaggaagggatggccactgtagatctgtgagcctgatgctgtgcacaacggcttgaagaccccagggctcaagacccacccaacgccacacatataaaaatgacaaccatgcatggtggcaggcgtatagtcccagctactgtggggggccgaggcaggagactcacttgaacccaggaggtggaggttgcggtgagtcagatcatgccactgcactccagcctgggtgacagaacgaaaggaagggtacttgcagaatgtgaccgaagggtataaacagagcaggccttggctaccagggaaggggtcgccactggcacttcccaacctggctctgccatgggcaaagctgagtagcgtcagacaagatgggctctgagcttctggcttgtgccgaggtcagggatggttgctctgtcgacctcacgggcagggatgtaacctctcctggtgagaaggatgtgttcttcctctcttggcacaaggaggtcataaccagtaagggaccttcgaaagccttcccagaactggcttctctcccatggcagggagctgcagctgcagggttttgtggacacagtgacgaagctgagtgagaagagcaacagccaggtggcatctgtctatgaggaccccaaccgcctgggcaggtggctccaggtaacaccccacctgggaacccacctgtcggggaggggtggggagactcagcatgtgccacctaagaggaacttcacaggcttctggttaaccttaaagaccgaagccttgataggggcggccctgttcttaggacttcagtggaggctcagatgaggatttgcctgagtcatggccactaaggaatagttagagtccagcctccttcccattccagaatggacacgtgttcaagaccacagaaccctaacccccaggccccggaaggctctgatacctttggttaaggctgtgagagctgggccactgccctggggtcccgcctgactctggcacagcaccaagtctagagccccggtcagccttcggttctagagctctgtcctctgcagatgagtgatcatcacatgctaggcacrccatcctgagcaccagagataaactggaacatatgctgtcccatgttagcaaggatagaacttttaagtgctatgaaatttagacaatgagatgatacagtgattcattagaccaaatgaggcagtttaagaatagttgggaaaatctgcaaatgaaacttaaggaaacaaggagctggccatgcagagatttggggcaggggtggccaggattaaaaggagttcctggccgggtgcagtggctcaagcctgtaatcccaacacattgggaggctgatcacttgaggtcaggagttttaaaacagcctggaaaacatggcaaaatactgtctctactaaaaaaatacaaaaatcagccgggcatggtggcgcgcgcctgtagtcccacctactcgggtcactgagacagaagaatcgcttgaacccaggaggcggaggttgcagtgcacctagatcacgccactgcactccagcctggatgacagagcgagactgtctcaaaaggaaaaaaaaaatctgggggtgtgcttggaggtcttgaagaaggctgatgcagacagatcacagtgaacaaaggtgaaaggcagggctacctcctggttaaggtaccttttaagctaaggacaaacaagagacactcaaagcatgaatcgggaatgaaaggttatagttcaggttttcaaaagacccctctggctaagatgtagggaacagatcttaagagtaggcaagaatagaagcgaaactggaaggcatcacagtggcatagggtggagacacggtggcttccttagtggcaccagcgcagagctgactcagaatgtaagccagtaaggcttgttaatkgattctttacraaagaagaaaggaagaatctggatgctcaagtctttttcgcccagactggagtgcagtggygcgatctcagctccactgcagcctctgcctcctcctgagtagctgggattacaggcatgagccaccatgcctggctaactttttggttttgttttaagtagaykgtctcaccatgtttcccaggctggtcttgaattcctaggctcaagtgatccacccacyttggccacccaaagtgctgggattgcaggcgtgagccaccacacctggccatggatgctcaagtcttaaacctgaagagtaggggagagagggatcggagagccttcaagaaggggtgatatctgagctgggtgttgagggttgagcaggagttggcaggaaggaaggggrttcttaccgtaccttttccgtaaatggggtccggggagatgtgtgacyggcaaacaatctgtcttcctctccattccaggatgagatggccttctgctacacccaggctccccacaagacaacgtccttgatcctcgacacacctcaggccgcygatctcgatgagttccccatgaagtactcactggtgtggaacttggtttggctaatctgagctcagtccmatctctcaggcctggggcctgcctagaaataatggggcaccaagtggggagagggcccaggtggcctctgaggggggaggggacgtggaagtctacctgagagcctggatttagggataagactggggcctaaagccatcccctactaacaccccttccctggctcggtctctcccccagagccctggtattggctacatgatccaggacactgaggaccataaagtggccagcatggattccattgggaacctgatggtgtccccacctgtcaaggtccaagggaaagagtacccgctgggcagagtcctcattggcagcagcttttaccccaggtgagccacaaagccagacgcctccaaatgaaaggaagggaccatggtcgttcccctggccccgcctgcttcccatagcacctcagcaggtcacacacactggaccatttcttaaactgaagacatttgagcttttgattcacrtgggagactaaagatgagaataaaccatttattctttgattccagggtttaaactgaaacaagtgaaatttggtccaccaggatgtcatttccaagagatatgtggttggatttcttggtggccataaatccaaaatgatacttgtgcccgggcttgtctgtctagaaacactaggctctgttctgagtggggtcagagtaagggattcgtaaccaacacatccgctatggaccggcctctttcacacaacggtcagaggccagctccctggaggcagcatgacaccaagtggcgggtgaccagccctgggccacactggctcaagagctgttctttccatcttccttctagcgcagagggccgggccatgagtaagaccctccgagacttcctctatgcccagcaggtccaagcgccggtggagctctactcagattggctaatgactggccacgtggatgagttcatgtgcttcatccccacagatgacaagaatgagggcaaaaaggtctgctttggggtctggagaagggacatctgacccttgccttctgttggggaatcttggaagattctggagagaaaactggctttttcttgttttttttttttgtttgtttgttttttgagagtcttgctctgtcacccaggctggagtgcagtggcgtgatctccgctcactgcaaccactgcctcccggactcaagcaattctcctgcctcagcctcctgagtagctggaattacagamacatgccaccacacctggctcatttttgtatttttagtagagatggaatttcaccatgttggccaggctggtctcgaacttctgacctcagaggatctgcctgcctcggcctccaaagtgctgggattacagatatgagccaccatgtccagctgagaaagctggcttctgacccaagttctgtttcccagggcttcctgctgctcctggccagccccagtgcctgctataaactgttccgagagaaacagaaggaaggctatggcgaygctcttctgtttgatgagcttagagcagatcagctcctgtctaatggtaagggaactccctttccacagaacagaactggggtcttcctttttccaggggtcctttctacatagccattctgtcacgcttggcgtaaaggatgccagggaagcacagaagctgttggaattgccatattagaacgtcttatttctgggctgctctagtggtactacaacacaagtagaccagatgttctgggatggcctggaggctgtttggatgtatttgaagggggactcacttagtacataggtggccccaagtggggggmaaaygggtgttaacaatgctagtgcctggatttattcagggcatgttggattaagtatctagggactgggactttgtgggtctcctggttacattaaggaaacacacaggtggacaagcagaggtggtgtggctggtgccattgcacttctgatctaaaggctgtgggagtgggctgggcatggtggctcacacctgtaaccccagcactttgggaggctgaggcgggcagatcacctgaggccaaaagttcgaggccagcctggccaacatgacgaaagcccatctctactaaagatacgaaaattagcygggcatggtggtgcatgcctgtaatctcagctactcgggaggctgaggcaggggaatcgctttaacctgggaggtggaggttgcggtgagctaagatcgtgycattgcactccagcctgggccacagagcaagactccatctcaaaaaataataaaggctgtaggaacccagaaaggggctgggggtattaggtttttctagaccctcaatactcaaagtgttatctgagggccagcgcacctgggagcttgttaaaaatgtagaatttccaccctgctccacacctcctggatactcagcctttggggttggggcccgggaactcctggtcatagaagcaccatggaaggtgacatctgctgagcatgaaccacatgacaaagactrtcacctcagagctggcaaataaattgggcatccctgtcccaaagatcaggcaattgaggaacaaaggtaatgtaacctggagagggtcacaggcagaaagtgccaggttgtattggcataaggggagtaggggctgaagtcatcctaacaagctctaggctgtgtccctcagcctggcacaggctattccccctcatgctggggacagagtggccagtggcagtaagtcctgcctgggagttctggtgtagaccctggtcagtccccagaaggaagatattggacctgagggtgtgatccctggagataggccagtcctctcgccatggtcactggcccaggaatgcacccaggtggctgggcctggcccgartgtgcccagctctgggcagtgctgccattccctgaccagcaggcctgctgcccgcttcttcctacaggaagggaagccaaaaccatcgaccaacttctggctgatgaaagcctgaagaagcagaatgaatacgtggaggtaggaccagtgtgaagggggccatccccaagaaagagctggtgccgcaggtcttgcaggaaggtttccacccacccctcctgaggggtgaagtgttgggcggcggggggcagctgcctgccaccctttcttccaggtcttgatacaggcccaggtctggggctagagctggccatatgccaatgtagggagactagaggagtaaggagttaggtctctggagtcaaacacagcacgatgtacctttatgcttggaagagggctggaagtgggtaacacagctttctatggtgtcagatggctgaggacccagggtgggacaggggcrgggaggagcgccatggcatgtcgggaccgttgacagatattacttgcagatactgtcagagggagtttactttgctatgactatgcagctggatcttttcccccaagctgggaaagccctgattatccaggttcctagctgagagcyaatgatggcccaagcrttttgcgagatacctcactacaaaccctgcagatagccctataaaactacaaaccctgcagatagccctataaagtaaaacacctcttacatatgagggtagtgaggcacacagtaaaaccgctagcccaggacaatcatttgggaaaatgagtctgaactcccaagttcatgtgttgctcattatactcaagctgcctgggktccatttcccggaaaatgacatagctccgcagcctccttgaagaagccggctcctcacttccgagaagctgagtatcagactcaaatagacgagggactactcaatgctttctggatgaagtggcccatcacagcagtcccgaggatggtgttcagggtcaccaaacttcagagatcttagaagtgaatcattggctataagaagcagagtctccccaacttgtagaaggagaagcttaggcccagagaagggtaatttcttggctgaggttgcatggtcagcaaaactgcttctctcactgggtccttaacattcccaggaatgttcccaaggaatgttctatgccccgcacagtgcatgggtaccctgttttgcaagaacagcccccctggcatagcagggtgggtgccagccaggcatggggctgagacagcatctcccagcccctggcgacagcttaggtgtgttgggtatgtgtctgaagcctatttcaagacctagggagacaggtgtgttgggttatgtctgaagcctatttcaagacctagggagatgcctgggtattgggctcagctggtctgggttgagaagtgccagacgctgtctagccatgggatcctggactaaagactaggccattcctgagcccctacttccccatgtgaaaagggaactgccyatttcgtaaggctggtatgaagtgtgaggctcctggcacacagcaagtgatggggatggtagtggtgtcaggccatcacctaccttcagtatggaaggaaactggttttaattcctgatgagctctccttgctcccccgcccccccccacccacccacccacccacccacagaagtgcattcacctgaaccgtgacatcctgaagacggagctgggcctggtggaacaggacatcatcgagattccccagctgttctgcttggagaagctgactaacatcccctctgaccagcagcccaagaggtcctttgcgaggccatacttccctgacctggtgaggggcractgsgcatccctgggtgggggagggcctgtccaggcaacactggctgccacctcactgtgctggactgcagatatggtggacagcagataacggtacctatgaggaaatgggagggagaccccttctcccccatctcggttagggacgccccacccagagagcaagtgtacagggcctgaaggcttggaggttccccaggcagttactatgggccaggccctgggccaggtgctttaggagcctcagtgagctgygcccccagtctaaaaggrtgaacctgtgaggcccacttcggatggggtgctatgcaacccagagtcgaggttgccgcgcatctgccagcagcraggccttgagcaacctacctcagggtgggtcttcctgtccgctatctccagggtccagggcagcagtgtctgatacatagaggtacatcagcccttaaaataacattctaggccaggcgcagtggctcatgcctgtaatcccaacactttgggaggccgaggcaggtggatcacctgaggtcaggagtttgagaccagcctgaccaacatgaagaaaccctgtctctaaaaatacaaaattagttgggtgtggtagcacatgcctgtaatcccagctactcaggaggcagagacaggagaattgcttgaaccccggagacagaggttgcattgagcctagatcactccattgcactccagcctgggcaacaagactgaaactccgtctctaatatttattctgcttggctggtcgtggtggctcacctgtagttctagtacgttgggaggctgaggtgggaagatcacttgaactcaggagttggagagcagctagggcaacatagtgagaccctgcaactttaaaaaaaagaaaaaaaaaatgctggggccagggtgcagtggctcatgcccgtaatctcagcactttgggaggctgaggtgggtggatcacttgaagtctgaagttcgagatcagccctgcaaacatggttgaaactctctagtaagaatacaaaaaactagctgggtgtggtggtgcatgcctataatcccagctaatcagaggctgaagcaggaggatcccttgaacccaggaggcagaggttgcagtgagccaagattgcaccactggactccagcctgggcaacagcaagactgtctcccaaaaaaacaaacaaaacaaaacaaaaaatgctgggtgtggtgccacatgcytgtagtctcagccactcaggaggctgaggcaggacaatttcttgagccccggaggtggaggctacaatgagccactgcactctagcctgggtaacaaaccaagaccttgtctgataaaccaaaccaaaaaaaaaaaaaaacattctggggctgggcgtggtgtcttacacctgtaatcccagcactttgggaggcccaggcaggcagatcacttgaggtcaggactgcgagaccagccttacatggagaaactgtctttaccaaaaatacaaaattagccaggtgtagtggtgcatgcctgtcatcccagctactcaggaggctgaggcaggagaatcgcttgaacctgggaggtggaggttgcagtgagcggagatcaccctgttgcactccagcctgggcaacaagagcaaaactgttttgtttttttgtttgtttgtttttgttttttaaattctgttcctacttattctaaaccagaagttatagtcaagagtggggctgtgagtacaagaggtcctggcttcaccaagcctatgccgactgtggctcacatctgaactttctcatgtaacaactgaccccttatataggtgtgtaaaatgaactgaggcatttgagtgccccaattctctaaacacctgctgacctcttccctgggtcctagggacacaggccctgcatgctccaattgtacatgggtgtcttctaacttgatcagctcagtgtggtccggcaggggtgagtaacggtaagaagctgctttgaggaggagttgagatacaaaagatgcgcagcastcaactgacaaagcgggggtggggagagtgtttcagtggaggcagcagccatgtgttgtatccaggtgacaagaggccagaataatcgaaacgtagaaactagagaagttgacaatcccagaccttggccaggcaggattttatctggctgttgagaaacagccattgtagggctaagcaaaagtgagctgggtttcactgacctggaggaggcggctgcctgcctgctacgcctggtctgaccgcagagaggcaggtgggcggctggctttcaggcctctgatccctgtccaggcctcacccaccctgtctttctaacagttgcggatgattgtgatgggcaagaacctggggatccccaagccttttgggccccaaatcaaggggacctgctgcctggaagaaaagatttgctgcttgctggagcccctgggcttcaagtgcaccttcatcaatgaytttgactgttacctgacagaggtcggagacatctgtgcctgtgccaacatccgccgggtgccctttgccttcaaatggtggaagatggtaccttagacccaggccctggagctgccagctctgccccwgcgtggatggcccactgtcaccatgcaacagcatgattctttgcccagtagaggaggctggagagtccaggcaacagaaccctttcttccctgtctgccccgaccraccctcggacccagtaggatggcaaatgccgccagcttgaacccctrtggggaaaagatgcaaaagtgttcagccaagtgacgtttactaaatagccaataaagggctggtgggtgtgaatgcatcttggcagtgacctccttgtttggggaggggatragtgacaactgaggacaaggctgagctgagatacctatggccatgctggcctgcttgtgtggggggagagacttggctacatcagttgctgtccttcccctcatctctaaattatgtcgtggcaggaagtggttggacttatccaaatggacttagattatccaaatggatttaagattatccaaatgctgctctggtttaagcaactgggacaagctgggtctagagtccagggcccaggctagaggaaggtcgagggcctcccccttgggactggtaggacctggagggggcaggcccacggtgggggtggtgccatgcacggcaggcagctggcctcagcaagtggaggctctggtctccttgggtctgtaggtgtggcctctttgagaaggcacagcaggggtggacctgggctgaccctcagcctgaaatgtcccctccagggcccaaagccacatattcccatctgaccacccctgtgttaatggtacagggatgctgttaagctttaactggcgctgtggctcccaccctgctcctcctggatgatgatgactctaggacactctaatcctcagggtagaacctgagaagggagccctgtgtccatgtcccacagggagttgaaggcagagctgggcctcaaactagcccccttcctaacacctggggctctgtgggcagcaggcaggacctggccagcctctgccagctgctggggcagtggaggagggtcatcctaaggaagcgaggcagaagccagggttggggcagcagggctggtctctggatcagatgtgggtttttatccaagagctgtgccctggtgtgccagctaccccaggacatcttacgacatctcgttaacctgcccatggtggtgcagagtttatggactacactagagacctcttgttgtattcatggctctgacccctataccagcctgggactgacacagaccaggccttcaaatatggggagggatggatgagctcatctgcattttcagatagtctagaaaagccaaaagaaatagaggactctggaccccaagggcttggggctccatctctagggaaaaaggggagaggaaagccctagggccagaagggggacaaaaggttcactcttccacccccatgggcttttcccagggaacttgcccacctctaccaagggctgccttagggtggatgaattggtccctcctctgaccctaactagaccctcacccagagcttttcaggtcagccctgggcccctcccgccccacctgcctaagggtcctgcaggaaatcttggcagcttgacacccttctctcctgttacctcccaggcagcaccatcctgatagcacctggagaagcaccccccsagccctggctgttagcagacacctgcagcagagagctgggtgtacttggcttgcacagtgttataaacgtctctaagttaggcactgacaatttactcaaagtctggatttccagctcctgctgccaagtctttagacctgaccacactgggcccgaggctgaagactcactggccacaccctctagacaaagatgtgctccaacaggccccagtccccatccctccccactgtgttcccctgcaaaggtcagtggtcatttggcgccatgcttgcactactgctgtaggraaggagaggaaatgctccctgtactggccaaaggcaagaaaacaaggtaagtgggctctgtgcctcagtttcctcaccagcgcaagtgggtaagagttgtgcctgtctcgaggttgttctgaggactggagttatttacataaagccctagaaagacacgtggcacctctcattcctgaaggctgggagaccacatctctgtagaagtaaacaaaaccctccattgcctgcatagcagacacggggccaggcgcagtggctcatgcctgcaatcccagcactttgggaggctgaggcaggtggatcatttgaggccagggcttcaaggccagccwggccaacatggggaaaccccgtctctactaaaaatgcaaaaattagtcggggcattgtggcatgcacctgtaatcccagctacttgggaggctgagtggctgagttgagagaatcacttgaacccaggaggcagaggctccaagatcatgccaccgcactccagcctgggcaacagagtgagacttcgtctcaaaaaaaaaaagaacaaaaatcacaggaaatgctggcggggtggggggtgggtgggagagtgctggggacccagtgtgggggcagctgagggttttggagattccagccctcccatgtgcctcccaacctgcaacaggccatcttttagttctctagaggcaccgagtcctctcccctccaggctgcttcagtgcccagaatgcttttagcagggggcgacccccatttcccttccaaagccttgaaggggctgttcctgtctccccttccctcctccctgcatccctgcatccctgcctactgagtcctcccagtctggagagtgggctccattgctattgtctggtgtgaacaccagctaagctggatcctgagaccctccagcttgrccatcccgcgtgrcgcttccgcaggtccccgcccttcaatgtggggctggggcaggtgttcggggcaaagcagggctgggtaggaaccggcaagtccccttccccattcgccatccttccagcccttttcactcttccctgggagcttaaggagccgcttagtgtggaggacattggccagaaaggctgctggcttgacggggcaggacaatagcaggaggcagcagctttgcaggtgagaaaaccccagagccaaaggccgggcacggtggctcatgcctgtaatcctagcacttcgggaggcygaggtagtgggaggaatcacctgagttcaagagttcaagaccagtctggtcaacmtggtgaaacctcatctctactaaaaatacaaagaaattagccgggtgtggtggcctgtgcctgtaatcttagctattcaggaggctgaggcaggagaattacttgaacctgggaggaggaggttgcggggagccaagattgtgacactgcactccagcctgggggacattaaaaaaaaaaacctccagagccgcccgtggggagcctgccttctctgccccccgacttcaggaggcttctcccatcccccagccacaggcctggcrggccccggctgctctgtattggccacctacactgcccctggaagggcaggtgaaggtctcctggatgttctcgaagctctcaagacagcccctccagggtggccacaggtcacatgggctccctgtcctcagccaggggcaggctgggggagcaggggaggccatctttgttactaggatctttgtggttccaggcacaggtcttcctacccgccccactgtgtccctcagccaaagccattttctctctgcaccccacttccctctataacacaggaataaaaaacagccttcccttcaagactgyctgtgtggccgggcgtggtggctcacgcctgtaatccyagcactttgggaggctgaagcgggcagatcacttgaggtcagtttgagaccagcctggccaacatggtgaaaccccgtctctactaaaaatacaaaaattagcagggygtggtggcacttgcctgtaatcccagctactcaggaggccgaggcagaattgcttgaacccaggaggcagaggttgcagtaagmagagatcacaccactgcactccagcctgggcgacagagcaaagctccatctcaaaaatacaagaccgascgcggtggctcatgcctgtaatmccagcactttgggaggcggccaaggtgggaggatcacgaggtcaggagttcgggaccagcctggacaacatggtgaaaccccatctctactaaaaatacaaaaattagccaggcatgtggtggacacctgtaatcccagctactcaggaggctgaggcaggagaatcgcttgaacccaggaggcagaggttgcagtgagctgcgattatgccactgcactccagcctgggtraaactcagtctccaaaaagactgtcggagtggactgcaggagtcaggggcgagacacacgacactcaatttgcagcatgtgcccaatacacaacagccagtgtgtcagcagggacgctgcccccagcagtggcttccctgcccacgggggctcttccagggcaggagcatctgatgggaagctccaagctgccaaggggggagatggggaaacaccgtgttttacatttggactgtcctgcaacagtgcacatgctccttctgcagctaacaggccatgggagaccgtttcctcctctcccaaactgggccaatgcctgccaggaggggctggtctggacactattcagccagtcaacacaaggtggcctgcactcgaggttccagggatcccaggcatctttgcggctgcagggagccggtgtcctgtgcaagggtctggtctaggactctgcccggtatagactcagcagcagcctagaagggagagtgtccgtgatctctgaacctacgaccagcctcctggtgccctctggtgggcagttggccacaatgcctgcacagagcagcactggcctgaagccacagccggggcctgaccagagccccctgctgaagtctggggagtgggtgcacatgcagtcaccgcgctggatgcctcccatgacttatttttttcctctcaaagccccagtgaaaatgcaaagaactccacttctgaattggacaactgaggtactgactctgtcccactcccctagcatttcatggggcagagttgggggatccactcacttcaaccagtgcagtttaaacctggaagctcctctggggccacmtgtctcctggcaccaccttctgtgggtgccagggcttaggaggtacacatataaggagttaagaaaaacagagctccgttccaaccgaaaaagaaatgcaaaatccaagacagtagacaakgttgtttatttaaaatgtttactccaagaaatatatatataaaaaaaataataagacaattacagcactaaaccaggcaccttcgaccaaatcacaacctcctctttgattccccttcacgctaagcctctttcaaattctttttcctgagctggaagaccagtcagatgcccgcagggtcagcgccaagcacattcccaaccgggcaactgtgtacctttctctaggagtgcacgacacccttcccccacaactccttgttttaaaggatttaacccattaggaagcccatttttcaatctaagccagaaggagctgcgggacaaggcagtcttcactttgaaggtccctttcctgctccagtccctgggctagggttctagaagaggctggctgccacgtttacatgaggccaccgaagatctaagtccagctaagcccagggaggctcctgcaaaggctgggacctcgggtgctgcgtcctcaaccctctcggtgaccacggctcaaaggagagacctcaagggtgccaggagcacaggtgcctgggctgcattccaggaaagagacctgtccagggaaacggatcaggctgtcgcatggaagcttacgtcagagatggtggttttggggtgatttggacaaattaggttagtttagcaaagctctgaagtagcagaagcttctcccctggactactgattgaacacagaacaagagatgcrcgtggcgtcagactaagtcttagagagatgcaggccagtctcctcccacagggccttgggactggcaggacagacactgctacatgccctccaagggcaggagtcacggtaaggagcgactggggtggaaaatagggaaaaaagcaacaacaactacatcatttttggcattttaacatggagacagtgacaagtggtaacaaagcaaaagaaaaaaaaaacttgaagagaccaatatttaactttcccatccacccaagtctcacacttaagttctagtcccatctcccccataagcaccactgaactaaatatctattttaaagcacccaaaccagtccagaccctctggaaaccaagagccccagccacagctgtcgcctctcttgggtccaggcgagaggagggttccgggaaaggcacctcataactcactcagcgcagcacacacggcggcgagctcgggcacttgacgaggacgcaggtggcagtcacagcatccgtgctgacacgcaaggaaggggactcttcggtaatcccaactatttggtaccagagccaagcaaacgtgactaaagggagctgggtcagcagaacggtaccccgagtctcagcaacaggacggcccgcgcgaggcaggatccaggcgggggggagaaaaagagaccaaagcacaaggcgatcgaggctggcacagaaagggctgatccttcttgcaaggactggagaatgcacttgactgctggctggtccatctcttaattggcgagtgcgcgtgacaaggctcagccctggctccacagggagccaccaagctgactcaactgatacaaatgttcccacctctgccccacccccaagtccccatggttccacaatcacctgattttcatttggacctctttaacagctaaagtagatataaatggctaaacacagatccccaatcccccaccaggggggacacggccgattctataatgtcgcagccagaaggctgtgggcgtacaggcagccaaggggagaaacagaaccgacaccggcctaggcccatctgcaagaaaaagcggagaaggagtgacccggatgcttccgaagcacgcgagcgtgattttggatggaggcgggccggtgactgcctagctgctgccggttcctgtaagggacattttttctgagtaaatggcgattcctcttccatgtggcatctgcttggatcacgatgctaattgtaactggaaaggggtgttttggggagtgtattcaggagaggaagaaagaaaaaacttaaaaaaaaaaaaaacctagattgctcaaagtttctgcctcttttgtaggaatggtaaatcaactatgagcaagtattttaattcaacattaagggaaaaaaaaggactttggaaagcatacagaaaaaaaggtagttaacgttggatcatgtgtaaaacggaacctcagggagtctaaacaaaaatgcaccttcggtcaacttttgcttttttaaattcctcgtttgacttcccgtcccagtgcacatggaaatgacagctgccgcgagaggtgtggagtcggaggagtctccgggagcatcagagggttcgggggttgtattctggcagtttcttgatcttctctttctcagtctcactttcatctcttgctatcaccaaggagtgtgagtagcccatggcgacctggggggacaaatcagcgttgggtgtgcctgaggcgcctggactaatcaatgcgttgaagagactctggaaactgggctgctaaagcgggtcagcatggagaaaaacagagtgcccttgaaaactgcaaaaagcccctctgcccaagacagctagtttccatgtgactgccaccaacgctctgccaatcagagccttccaggctgccctgggagacccagctggaaggaagcccactgggccacctcttatcagcagggacaggtggggacatggctccagctccacttccatcccccccctctctggctcacaatcctgcctgggtgaggtgcaccacccctctctgtgtcttggcagacagggccagcaggctggctgactgagccgcaggggcctcaccccgccatctgactcctgcagccacgcagcctctactctgtggacctgcggacctgcctccagcccagtggatctgagtcctgggtgtgatggagacgcgagcgatgtgctcgcccgagagtggatctgctgcggccagttggtgccatctgtcatcaagggtgaggacagccacccagcctggccagcaaccctgtgcactctctcctgcagaatgattgttacctctcaaacaaatcttagcgtgagacaccaggaaagccagctgagatggtaaacaagacaacccaaacagactgcgatgatcaaaatcatgaggagtgacataccactgggtacggacacgtccccgagctggcacagctgcccccactcacctgctctgagaaaatgccatccagagtctttacctcctgggctgcagtggaagacttgggcttgtggtccccgtagccctggcgaagcaaacaagatgttcgcaatcggggatccatgtggctcagtccacaagtggggaatcacggcaacatttcctggcccccactaaccagaagccagtgatgatgccctctggcccatgacaagcccggccacccttgcacacaagggccaggtggaatcatccaagtttatccacaaaaggtgccaccagcaggcgactagcgcttaacctaaggaagaccaaggtgcccaactctagcctgcaggacttctgtgtgcacaagtcccttctggggagtatggcactggtgacaagagatgacaccacgagtgcaggaagaatggcaactgcggcccttcaggaccaaagcgaccaagaacacgggctgaccaaatgcccttgatgcctccaccatccagagtggaataatcaccatccaaaacaaaacaaaataaaagggcttaagcgtgacagggagactattagcaatggcaccagagaaccagtttccctcccagaggtagaaggaactggatgaattggcgcagctaagggggagtcttgtgcaaaggtgtggagctgggcaattgaaagactgaaggccctggctcaggtgaaacagagggtcccacagggcgggagaggaggaccctccctccccagcccaggcctgcccacatgtccctggtttcatctcctgccaggccccacctcgggccttcccacacagtagatgttccctccaaggtgccaggccaacttctcacccttgagaagctccccaaaaagtctcccttgctcccctctagtttcaaaatttatatttagaaggtcaaagtctatttctgataggccccagaaaacatccttcctcctctaagaactatctgtagaaactgggccaggctctgtctctttcctgtcaatgtttcaaatcgggccaccagagcatctgagccagactccaagggtgtgcagagccccgagaaaaaggtgcattcaccatccatcccagccacagctcaagggaccaaggaacgcccttccttcccctcctctccatcaaccacaagagtaccttgcaaccacaagagtgcaggagagggagacagactgtgcttctaacaagaaataagggactaaaactaagaccaccaagagttaagcggagaatcaaaccatgactagtgtaggcagatcaggatgcactccacagccaagctagtcttcctaacaaaaactcaaagacccgccttggccaggtgcagtggctcacgcctgtaatcccagcactttgggaggttgaggcgggtggatcacctaaggtcaggagttcaagacagcctggccaacatggtgaaaccccatctctaccaaaaatacaaaaattagctgggcgtggtggcaaacgcctagagtcccagctactcaggaggctgaagcaggagaactgagaatcatttgaacctgggagacagagggtgcagtgagccaagatcgcgccactgcactccagcctgggtgacagagaaactccatctcaaaaaaaaaaaaaaaaaagactcacctagcaccaggatctaagaatgaaagacatttgtttgcggaaggccacgtgtgtgaaattgagggccatgagttctaacctcatcactcaagtaactggtattaacaacagaaacacaggtttaaactcaatttggaaaaatgaagaatgtcctcaaatcacccacaactgtgagtttcccactgacttaggcctccaggggagagggaacaaacaggcccttttcctaccataacccaactgtggtttacaaaatgtgaggggaaaccggatctgaaaagtcccaattttcagagtttacaaatgtgcagagatgactcagaattatctgactagcacagaattgtccttgaaaactcatgggactcaatcgtgttgcaaaccttaatacaataaggggggaatcccaaatgtttttcttctgtgtgttttgggagacaggtggagagaacccaaaggccatgagccaccctgactggcttccacttcccctgacccgcacaggtgacagcttaccagttccccaaaggtcggtgacggaccccagctgatggtgctctcatcggcggccacaatgatgctgct
